United States Patent Application Publication US 2017/0114356 A1 - sequence listing, part 53

SEQ ID NO: 71576 - DNA, 1485 bp, Zea Mays
agccgcttccctccagtcccaagtcccaacccgaactcgcacgccaagaattctagaatctctctttaagagggatacagagtaggaaagagacagagggggcaaagagcgatggacgccgcggtgcggaaggccgcgggcgccggcatcgcgcgcgcgccggcgctggtgctagcgctggtggcggcgggggcgttcctgatctcctacaacttcttcaccatgctgttccacggcggcggcggaataggcgcggcggtgaccgctgggacgagggaccctgtggtggccatgccagcgtggatgcgcgcggcggcggacaccgaggcgcgacggcggccgttccatgtggcgctcacggccacggacgcgccctacagccggtggcagtgccgggtcatgtacttctggtacaagcggatgcaggcgcggccgggcggagaggccatgggcgggttcacgcgcgtgctgcactcggggaagcccgacgggctcatggacgagatccccaccttcgtcgtcgacccgctgcccgctggcaaggaccacggatatgtggtcctaaataggccgtgggcatttgtgcagtggcttcagaaagcaaagattgaagaagagtatatactaatggcagaaccagaccatatatttgtgaaacctctaccaaatttggcccatgacgatgacccagcagcatttcccttcttttacattacaccatcagaacatgaaaaaattatcaggaaatactatgctaaagaaagaggtcctgtcacagatatcgatccgattgggaattctcctgtgatcattaagaagacaattcttgagaagattgcccccacatggatgaatgtgtcaattcaaatgaaagaggatgaagagacagataaagtttttggatgggtgttggaaatgtatgcatacgctgttgctagcgcattgcatggagttcatcatatccttcgtaaagatttcatgatccagccaccttttgatacaaagctccagaatacatttataatccacttcacttatggatgtgactactcactaaagggtgaactgacctatggtaaagttggtgaatggcgatttgacaaaagatcattcccagataggccaccaccaagaaatcttacattgccccctcctggagtaccagaaagtgtggttactctagtgaaaatggtcaatgaagctagtgcaaaccttcctcggtgggatgatggaatataaactttggatgatgtcaattatatcttaggttcctttgatctgcccttgtatatggggaatatcaaagtatcaggtgcaagggtgaaaagaggaggttctactggggtgatctgaagatggccatatgttccgacttccgagttgttggcgaagacagacccatcaatgatttatcgtggagtgcactaaaatttaacacgcctttaagagccttgcagtgtgtgccgcgttggacagaagtatagt

SEQ ID NO: 71577 - DNA, 1182 bp, Zea Mays
aaacacgccatcgagtgcggatgcgtgcacatgctgtcctccgtgaagctgaacattactagccgttggagacagggcggcggcggcggactgtcactcgtgccacacggcccccaaacgtcgccgccgtggaggaaggagcaactcgatcgccagtcatgacccggggagagaaccaggagtcgcagaccgggaacgtctccgccgcatctgcggctgcgccgggaccgaagccggcatcggcgggggccgggaagggcgcggagggccagtcggtggtgcggcggctgcagtcggagctgatggcgctgatgatgggcggcgacccgggcgtgtcggcgttccccgagggggacaacatgctccactgggtgggcaccatcgcgggatccgccgggacggcctacgagggcacctcctaccgcctcgcgctggccttcaccgccgagtacccgtacaagccgcccaaggtgcggttcgacaccccctgcttccaccccaacgtcgacgtgcacggcaacatctgcctggacatcctccaggacaagtggtcctccgcctacgacgtgcgcaccatcctcctctccatccagagcctgctcggagagccgaacaacgactcgccgctcaacacgcaggcggcggcgctttgggcgaaccaggaagagttcaggaagatggtggagaagctctacaaggccgccgcgtagaggacagcacacggcgcagatgccgactcaggttcttcaagcaccgatctcacttggatcgattgacgtggatggttttgttgggttgggttcccagtctggtgctgtagcggtgtagcaggaacgcgtgggtagccttgagcctggcgattctgtaattgtcctttgagttctgaaatgttaagagattcatttttacatgactttttgttttttcatttttacactctggatatggacgggactagttgaatttaggaagatcgtatgatctcgaaaatgttcagtaactgcatcaacacaatgttcaaatgaccttcgtccttgttgccgactgggaaggaaaagccacctcgtttcctcttctaacggcgcagtgttgctcggatgatgtatcaaatggaccctatagccaaactacgaatggtgttttgaattgggattttttttataaagacaatcatttttttct

SEQ ID NO: 71578 - DNA, 2962 bp, Zea Mays
cctaaaccaatttatttggtaccaaataaataaaaaagggaaaaactgttgggagaaacttaaaagtaaagttgattccaaaggaccactccatttcacaaatcatgatgcattatgttgtcataacccaatttgttaaccacgtgatgcaagctactctctctttcaaattataaatgttttggtttttatagatatattgtttttattatatatctagacgtagtatttattggcacggtgcgaaacgctggagctaatatctagattagactcgggtgcaaagcttgtgtaaccggtgccaagagttaaggccccctttagaatgcaggaatttcggagttattgtataggaatttcatagaatcagttgattttcacataaaaacacaagaaacagaaaaaaatcccgcgttccaaatagggcttaaataatattttgtctctgctcaacagtacaactacaatggtctttatcagtcctgcatacagtgaggaagcaaaggaggcggagctagtagtttatttcctgtggaccccatcgttagaatagttgggtgatccaaacgttggagcattttacacagtttagcacctcctcctgacatgtatagttttagaactgtaataggatgaaacaatagtgttacatctctatctctatctctactatataaaagcaccagttttgacggtcaccccgcgtcatattttataaaataatcccttctattatttgaaatggcccacaagacacattctcttcacatcgatcgcatctaatccaattcgtctatccactccctgtccacagcgtatccacgccccgcacggcgcacgagcgcctcagtaacccacacaatgacaaaaacccatgcacgccatgtcttccgtttatagaaacgaccggcatggcaagtgggcccgtgccaaatgcaccacgacaggagcccaacaacccatggacgccgctccataggggacagggaaaacgaaacacagggaaagcggtttcaacagctgcggggtggaactattttactcatcctaatccgccaaccaacctggctacaaaaagtcgtactgaggcccctcaagcgatagcggtggtggatctgctcgccaccggtggcctgacgcccctccagatactccgactcgcctacgtcctccaaggcctgttcaccgagttcgtgttgcgttcgtgggacctaatggagaccgacgctgctggaatggagggcatcgacgccggcatagggggcagcgcggcggtgttcggtaccacatggatctgtggcacgacgcccaccgcggtaacatcggggagggtccatatgactgatttacttcgttcaaccattgattgcattgcagatattattctagttcttggtaatgtagcactgttcagtaatagtgtcaaaacatatttcggaccataccagaaagacacagatatgctaataagctacaaccagcaatcaagtacagcaaagcagtaaatttgatattcatcaaacttagatgtccattggtgtacacaaagcaataaggttgtcctctctgacctgaactttttgaaacacaaatcactgtggcaattttatagacagtactcgaattagtataagtatatacttgctctaaatcacaattctagccagtatcccctgtttgaagtatttgtccaacaaggaaagcaagggcacagttattgaaatatttccttgtttaattgttctgcaatgatgttgaagacatcaaggcattgtttggatctctagttttgtaaaaaaaaggatcccaataaacctgtttgtccatttctctgattttttgatgtaactaacttgagggtgagcaacagtagttttctctaaactccagtttttccgtttagtgtgtttcagatgtcatcattctcaacaacctggcaacttcactgaacactgacaggtacaacagcttcagccaaaaagtcacaggggctagagcttgtcaccagcaaagaaacaaccacgctggatgctttgccagaaggtgatgattaagagcacgatgatgacgacaacagccaggacagcaaacagcttggtgctatggtactcatacgcattgatgagagggagatgatgctgtgtgagcgtgatgggcgatggccaggaaggggagatactcaggatgttgccgtccacttggatgctcatcaaatatgctggagaaacggatgactgagacggagaggaagttcagcgggcttcatgtgctcagcaagatgccggagaaagttcagcaagatgacaatggttattgcttagccagggtgctatggtcatttgtgctctggcgggtcattggtgctgctgctggataccctatccatttcctgagattaggaatgaagaggcatccatggatgtgagctacagaaaggaagcagtaagatgattgattcaggggctcccgtgctgtacaatgaagagtagaaggaacaactatgcaagggtgaagtaatgggcaatggagagattaccaaacctcagtttagtttcctacatattaatccaaataacatgttatgttatgttatgtaaacctagattaatggtctagcaacttaaaactagtttttccttaaatttctgataaaaacatgttcttaccaaactgatctttattttatagatctaaacaaccactagatgattgtagcatgccatttaacagggattttatagccattactcagtaacattcttaagagttagtgacacattgtcctttgtggtggtcataaacataaatgtgccatagaattaaggtgaaggattaacccaactcatgtctacttttcatggcaagttagaccgaaatttgaataaacatgatcacggataataagattcagaccaaagaaaactacttttcatgactagacagaaggtaactttgagatttg

SEQ ID NO: 71579 - DNA, 796 bp, Zea Mays
gtttgttcttgttttatttgttgtttaattttgaaactggacatacattcagttgatcacttgtcaggaaagctgaaaattcacaaaagtgccccaccttaacttcagccctagtcacggtggacatgagcctggttggcgtgaggttccagtagaggatcctgtggtcaaagatgctgcacaccatgctgtgaaatcgatccaagagaggtccaactccctgtttccctacgaacttctcgagatccttcgtgcccatgcacaggttgtggaagactttgcaaaatttgacattctgatgaaactgaagagaggcagcaaggaggagaagatcaaagccgaggtccataagagcctggaaggggcctttgtgctaaaccagcatcagccggcggagcatgatgagtcgagcagccagtgaactgacgtaactgtgtgagctgtagtagtaacgtacttcgtgttacgtagaagaataaggagaaaacgaccaatccggttttatctggatgtcatgtatggtcgacggtcgttgctggcttggcttccgaacgcagcaggcatactggtgctggaagacggtacctgctgtcgcacttgccgttataataggcattggaacttgtcgatttcgggagctgatctgtttgtaccgtattgtttatttataatatgatggatcgtatgttgatatatggtatcccacactacccttcggttgcttatgatcatagtatgccaagttagcttaaggtgccaatgtcaccatcacatacgtatcttcaaattattctcc

SEQ ID NO: 71580 - DNA, 5497 bp, Zea Mays
cgctaatggcacgggttcgcgatttggcggcagagtgccccgacggcgggaggtattgtgccgccagcacggtgaactgcccactcgttgagtcgttgttgctgcggacctgcggtactctattgatccctagatttcccaacaaatatggcggaggcgggggccgactcctccaacgcggccgtcgacggcggtggcggtagcgtccaaaacgactatcccaccattgacccgacctcgttcgacgtggtgctctgcggcacgggcctcccggagtctgtcctcgccgccgcctgcgccgccgctgggaagacggtcctccacgtcgatcccagcccgttctacggctccctctactcttccatccagctctcctccctcgcctccttcttatcccgtgaggccaccccgcccacctcgaccgtggcagcggccgcctccgattggcataccgtcgtcgatctccaccgacggatcgtgtactccgaggtcgagacctcgggggcggcgccagagccggcgaggcggttcaccattgacctggtggggccccgggtgctgtactgcgccgatgaggcagtggacctcctcctgcggtcggggggcagccaccatgtggagttcaagagcgtggaggggggcagcctcctctactgggaaggctgcctctacccggtgccagactcgaggcaggccatcttcaaggacaccacactgaagctcaaggagaagaacatcctcttcaggttcttcaagcttgtgcaggcgcacattgctgccgcctcagcttctgctgatgagacgggacagggggatgcacctgccaggatacttgaggaggacctggatcttccctttgttgagttcctcaagaaacaggggcttcctcccaagatgagagcggttgtgctgtatgccattgccatggcggattacaatcaagatgtcttagcaacacgttttattatccaggtgttgcggatgccagtggttgcacttcttatggatgagaaacattttgtaggcgctagattggtatctggtcaggatattttatgccaacaattgataattgatccgtcttataagactatcttggatgtcccatttgatggttcagattctcattttccaagaaaagttgtgagaggggtatgcataattagcaagtccgtgaaacagggatcatcaaatgttctggttattttccctccaaaatcactagaagagcagcaagttacagctgttcgacttcttcagttgagcagcaatctcgcagtatgccctcctgggatgtttatgtcatatctgtctactccctgtaccgatgtctcagtcggaaagcaatgcataaaaaaagcaatagatgctctttacagtcctcaggcttcagatggttcagaagaccatcttgagacagccagtgaaagcaccgaggatgtgaagccaacactaatctggagttgtgtgtatgttcaagagatcacacagggaacagctggtcctttattgtcatgccctatgcccgatgaatacctggactacagaaacatactgggatcaacaaaaaagttattcgcaagtatctatgctgatgaagagttcttgcctaaaaagtcagctcctgtatatgccaatgatgactctgattctgcagagtaaaaccatctttctagagcccgtcactgaaattccgagggcaaaagagcgtcgcaaggggagcctgtggggcttgatgagcagttgtgctggatttccaatgtacaggtgcccactggctggccatacattgcattggtagggaacagttggagggagacatgctcggtgcaaatggccttgtatggattggcaaacattgttgtacgcaagatcacagcaaatacgggatacaaaatgctgaacgctcgatttggtcccccaatttgaacgacagagtgtagaagggtattctgaagacttactagttaagtggctgagggctgatttagcgacgagggaaataaaggtgatccatgaggaaaatagcaatgaaattcctcccccgtgtggccatgtctccatgtggtcattaaaccagccctgaatgtatttttggtcggccaaagcggtgtgtatagtatctttctttgtttttggttgtttcaggtgaggttttagtcttcagctcgcagaattgggcgatattattacccggcctatagtattttttttcttctcgcaaccattttttgtttgttgatgagttctgagagtgcattgtttagttttctacaagaacaatcgtaggacgacacgggaacatgggactcactgctgaaggtcggaaggataagcttcttatcttgcccaaccagattccacgtcactatgtcagtcacggctcccatctctagtgttatttatttgtccgtacccaaactacacccgccgaatggattggctagagtacggggctacccatttattcctagatatgggtaggataacaataagtattattcacttatctctgctcatgtgttaccttttcttttttctgttttattaaagataaagtaaaattatttataagtgggatccaagtcttgattgttgactccacatttacacctacataaccaataaaacatattttttatattttattaaaataaagttaatatataatgtgatatatagaaagtagcaaactattctagcggcagaactagtgtcacccgctactggaatactggatttctttggttgagctatgacgtgaagaaaggaaaaatgctacgattgtgaagaaaaggaaaaaagctacaacctgtttagttaaaattcgtgtaaatatatatcttatctttatatccaattaaaaaaatacgaataagttctttcattccacacattttggaaaataagaaaaccaaaagctaaaaaatagagtcctttggaatggaggattagtaaaacatagggatgagaaaaatgtaggaatagagttgcatgtcatcttcaattcatatattttttttttcaaaagattggatctcatgttaaaaacctacaaaatttcactacaatgctcaattctataaaaattttataggatttgtagcaactcaatcctttgttctaaagtaccacgtaggaaaactttccatagggtttcaatccttttccttcacttttccattgttccaaagaagggcatactaaaaatagttgcttttcaaaaagagccttcgagaatcgtccctttgttgagcttttggcttcttgagaaaaatagccctcaaaatccaaccaatacgtctttgatggaagtcgtttcggaggcttgcttttgccaaatctatgctcgcaaagccatgacagtagagctcgcagagccatgacaatagagatgtataagagtggttaagcgagagaagagaattgtctcttaagcagaagtaccttatataagcgcgggagagctcgattcactgaacatggatcgatgctctctgatgtgctttgatggtcatcagtccaatggttataggtaatagtcacattgacggtcaacagtcaggtcattcaggtcgtcatttactcctttgatgacttgattaaactctgtaacggtccgtctatctcgacttgacttgatacaatgtcacatgcccataccctgacactgtacaatctgcgagttagtccacgcccacgaccataaccatatagagtctccaacaaccttagattgtcttcagaaacgttctctataaagatatcaatttaactcacagacccaaaatccaatgaacgtgtatatgagagaagatttcgacctgtgtgtgcacctacaccagacccgaagtttcacgggtataaatacgagtttcttattttaatttgtggttgacccgcacctgacccgaaattcgattcattatttattttgcgtaaaaatgattaagatacaataataattatttagatagtcttaaaataatataaatttagataccaggttccagctctaatgtggagctgtagtttataatataaatttagatagtcttaaaatacttttaatgtaaataataaacaaaatgacttacctaaatatcttctatattcacaacttcagctccacaattttctggagcacctaatgacttgctccaccaactcaatcaaaatttctaagctggactagtgccaaataggaccttaatttcttagctgaattattgtttaaagtgtatattgggtaaaaacccttgggtgacttaaaacccacccgaaacacgatgggttcagatgtgattgcggacgactttaggtagatttcacggacatgattgggggtgagtttttgctccacctgattcattgtcatccatatatatctgtgctttacggtctattctaaaagatttcctactctatatctcattcctctctagcagtgttctctgtatttcatcatcatatacctaaattagagacataattttgttctagattttattaagataatatttgttatatatcctcaaatggtttatacatattttaattttgcttaatcaactgtttaaaatattaaatagatatagaagaggagagcgaatctctatttataaaggatgaaaaaacgtcctatatatttagaggatgttgctaaagggtacaaaaaaatgtaaatatcatttgtacatgtagagtataaagctgtttacaactctcatgctttctccagcaggattcgtaaagggtctcgcatccccaatttacgtattgaggagctactgaacctgtcccagcagcatgcatatagggtatcgcataattggaggtctggcttcagcatgcgcaaacccacacttctctctcctcctcgcatattctagacaactacgccgtggcggtagacaacaatgcgaggccgggtaagagagatgctggagcactccagttaaatgcgcacgcgcagcggcatgcagactccctaaatgcgcattcgcatccgaatgccactggagaaagcctcaagggagccctataacctcctcgcactatttatatggagaacacagttctctaacaactctatatacttgaaagaatctcctggtatatataaagaaaacactaagttcctcatatattttaattacatatattttgtgatattaattataattaagtcaagtaacatgataaatagtctataccactatataatccactagtttgaactttgcaaaatccactcaaccaaatcatccttacatataagtatataaccttcactaaatctactaaacaaattgcacatagaattaacacactatcaaaactaacagttcagatcgctggataactcatctttcttactaaaatttaatgagcaacagtatttggatcattcttcatccctcattcctctccctccactcgcgaacacaaactccccctcccccgccacctccccttcactcacgttaccactgtc

SEQ ID NO: 71581 - DNA, 2091 bp, Zea Mays
cgctaatggcacgggttcgcgatttggcggcagagtgccccgacggcgggaggtattgtgccgccagcacggtgaactgcccactcgttgagtcgttgttgctgcggacctgcggtactctattgatccctagatttcccaacaaatatggcggaggcgggggccgactcctccaacgcggccgtcgacggcggtggcggtagcgtccaaaacgactatcccaccattgacccgacctcgttcgacgtggtgctctgcggcacgggcctcccggagtctgtcctcgccgccgcctgcgccgccgctgggaagacggtcctccacgtcgatcccagcccgttctacggctccctctactcttccatccagctctcctccctcgcctccttcttatcccgtgaggccaccccgcccacctcgaccgtggcagcggccgcctccgattggcataccgtcgtcgatctccaccgacggatcgtgtactccgaggtcgagacctcgggggcggcgccagagccggcgaggcggttcaccattgacctggtggggccccgggtgctgtactgcgccgatgaggcagtggacctcctcctgcggtcggggggcagccaccatgtggagttcaagagcgtggaggggggcagcctcctctactgggaaggctgcctctacccggtgccagactcgaggcaggccatcttcaaggacaccacactgaagctcaaggagaagaacatcctcttcaggttcttcaagcttgtgcaggcgcacattgctgccgcctcagcttctgctgatgagacgggacagggggatgcacctgccaggatacttgaggaggacctggatcttccctttgttgagttcctcaagaaacaggggcttcctcccaagatgagagcggttgtgctgtatgccattgccatggcggattacaatcaagatgtcttagcaacacgttttattatccaggtgttgcggatgccagtggttgcacttcttatggatgaggaaaagaaacattttgtaggcgctagattggtatctggtcaggatattttatgccaacaattgataattgatccgtcttataagactatcttggatgtcccatttgatggttcagattctcattttccaagaaaagttgtgagaggggtatgcataattagcaagtccgtgaaacagggatcatcaaatgttctggttattttccctccaaaatcactagaagagcagcaagttacagctgttcgacttcttcagttgagcagcaatctcgcagtatgccctcctgggatgtttatgtcatatctgtctactccctgtaccgatgtctcagtcggaaagcaatgcataaaaaaagcaatagatgctctttacagtcctcaggcttcagatggttcagaagaccatcttgagacagccagtgaaagcaccgaggatgtgaagccaacactaatctggagttgtgtgtatgttcaagagatcacacagggaacagctggtcctttattgtcatgccctatgcccgatgaatacctggactacagaaacatactgggatcaacaaaaaagttattcgcaagtatctatgctgatgaagagttcttgcctaaaaagtcagctcctgtatatgccaatgatgactctgattctgcagagtaaaaccatctttctagaggtatcttcggaatcagggtacgggtatacaagagtatggtcaagacgaagcttgagtgggatggaaggcgatcatgacgaaggctaagataatcacgaagctatacgcagaaaagcttcggcatgacagcagaaaaggggaaccgacttaaagatgaaaagccaaattagacctcgaagaattactatagagttattgataaatgtaaagggcattaatgtaattttacacgggttgtgtcccgtgtctataaatagatgaacagtactcccgtactgttcacgctgacttggcattcgctctccgcattacgcctgtacctttactttccatcaatccgaaggtacatttataatttgttattgtggatatgataatgcaaataaaaaataattcgatgataatat

SEQ ID NO: 71582 - DNA, 4625 bp, Zea Mays
atgggcatggtgagctgcctcaagctttctgtcgctgtgctgcggttaagggtgccatatatgtgttgcggatgccagtggttgcacttcttatggatgaggaaaagaaacattttgtaggcgctagattggtatctggtcaggatattttatgccaacaattgataattgatccgtcttataagactatcttggatgtcccatttgatggttcagattctcattttccaagaaaagttgtgagaggggtatgcataattagcaagtccgtgaaacagggatcatcaaatgttctggttattttccctccaaaatcactagaagagcagcaagttacagctgttcgacttcttcagttgagcagcaatctcgcagtatgccctcctgggatgtttatgtcatatctgtctactccctgtaccgatgtctcagtcggaaagcaatgcataaaaaaagcaatagatgctctttacagtcctcaggcttcagatggttcagaagaccatcttgagacagccagtgaaagcaccgaggatgtgaagccaacactaatctggagttgtgtgtatgttcaagagatcacacagggaacagctggtcctttattgtcatgccctatgcccgatgaatacctggactacagaaacatactgggatcaacaaaaaagttattcgcaagtatctatgctgatgaagagttcttgcctaaaaagtcagctcctgtatatgccaatgatgactctgattctgcagagtaaaaccatctttctagagggctttatcatttggttggagaacgccgtcagcccgtcactgaaattccgagggcaaaagagcgtcgcaaggggagcctgtggggcttgatgagcagttgtgctggatttccaatgtacaggtgcccactggctggccatacattgcattggtagggaacagttggagggagacatgctcggtgcaaatggccttgtatggattggcaaacattgttgtacgcaagatcacagcaaatacgggatacaaaatgctgaacgctcgatttggtcccccaatttgaacgacagagtgtagaagggtattctgaagacttactagttaagtggctgagggctgatttagcgacgagggaaataaaggtgatccatgaggaaaatagcaatgaaattcctcccccgtgtggccatgtctccatgtggtcattaaaccagccctgaatgtatttttggtcggccaaagcggtgtgtatagtatctttctttgtttttggttgtttcaggtgaggttttagtcttcagctcgcagaattgggcgatattattacccggcctatagtattttttttcttctcgcaaccattttttgtttgttgatgagttctgagagtgcattgtttagttttctacaagaacaatcgtaggacgacacgggaacatgggactcactgctgaaggtcggaaggataagcttcttatcttgcccaaccagattccacgtcactatgtcagtcacggctcccatctctagtgttatttatttgtccgtacccaaactacacccgccgaatggattggctagagtacggggctacccatttattcctagatatgggtaggataacaataagtattattcacttatctctgctcatgtgttaccttttcttttttctgttttattaaagataaagtaaaattatttataagtgggatccaagtcttgattgttgactccacatttacacctacataaccaataaaacatattttttatattttattaaaataaagttaatatataatgtgatatatagaaagtagcaaactattctagcggcagaactagtgtcacccgctactggaatactggatttctttggttgagctatgacgtgaagaaaggaaaaatgctacgattgtgaagaaaaggaaaaaagctacaacctgtttagttaaaattcgtgtaaatatatatcttatctttatatccaattaaaaaaatacgaataagttctttcattccacacattttggaaaataagaaaaccaaaagctaaaaaatagagtcctttggaatggaggattagtaaaacatagggatgagaaaaatgtaggaatagagttgcatgtcatcttcaattcatatattttttttttcaaaagattggatctcatgttaaaaacctacaaaatttcactacaatgctcaattctataaaaattttataggatttgtagcaactcaatcctttgttctaaagtaccacgtaggaaaactttccatagggtttcaatccttttccttcacttttccattgttccaaagaagggcatactaaaaatagttgcttttcaaaaagagccttcgagaatcgtccctttgttgagcttttggcttcttgagaaaaatagccctcaaaatccaaccaatacgtctttgatggaagtcgtttcggaggcttgcttttgccaaatctatgctcgcaaagccatgacagtagagctcgcagagccatgacaatagagatgtataagagtggttaagcgagagaagagaattgtctcttaagcagaagtaccttatataagcgcgggagagctcgattcactgaacatggatcgatgctctctgatgtgctttgatggtcatcagtccaatggttataggtaatagtcacattgacggtcaacagtcaggtcattcaggtcgtcatttactcctttgatgacttgattaaactctgtaacggtccgtctatctcgacttgacttgatacaatgtcacatgcccataccctgacactgtacaatctgcgagttagtccacgcccacgaccataaccatatagagtctccaacaaccttagattgtcttcagaaacgttctctataaagatatcaatttaactcacagacccaaaatccaatgaacgtgtatatgagagaagatttcgacctgtgtgtgcacctacaccagacccgaagtttcacgggtataaatacgagtttcttattttaatttgtggttgacccgcacctgacccgaaattcgattcattatttattttgcgtaaaaatgattaagatacaataataattatttagatagtcttaaaataatataaatttagataccaggttccagctctaatgtggagctgtagtttataatataaatttagatagtcttaaaatacttttaatgtaaataataaacaaaatgacttacctaaatatcttctatattcacaacttcagctccacaattttctggagcacctaatgacttgctccaccaactcaatcaaaatttctaagctggactagtgccaaataggaccttaatttcttagctgaattattgtttaaagtgtatattgggtaaaaacccttgggtgacttaaaacccacccgaaacacgatgggttcagatgtgattgcggacgactttaggtagatttcacggacatgattgggggtgagtttttgctccacctgattcattgtcatccatatatatctgtgctttacggtctattctaaaagatttcctactctatatctcattcctctctagcagtgttctctgtatttcatcatcatatacctaaattagagacataattttgttctagattttattaagataatatttgttatatatcctcaaatggtttatacatattttaattttgcttaatcaactgtttaaaatattaaatagatatagaagaggagagcgaatctctatttataaaggatgaaaaaacgtcctatatatttagaggatgttgctaaagggtacaaaaaaatgtaaatatcatttgtacatgtagagtataaagctgtttacaactctcatgctttctccagcaggattcgtaaagggtctcgcatccccaatttacgtattgaggagctactgaacctgtcccagcagcatgcatatagggtatcgcataattggaggtctggcttcagcatgcgcaaacccacacttctctctcctcctcgcatattctagacaactacgccgtggcggtagacaacaatgcgaggccgggtaagagagatgctggagcactccagttaaatgcgcacgcgcagcggcatgcagactccctaaatgcgcattcgcatccgaatgccactggagaaagcctcaagggagccctataacctcctcgcactatttatatggagaacacagttctctaacaactctatatacttgaaagaatctcctggtatatataaagaaaacactaagttcctcatatattttaattacatatattttgtgatattaattataattaagtcaagtaacatgataaatagtctataccactatataatccactagtttgaactttgcaaaatccactcaaccaaatcatccttacatataagtatataaccttcactaaatctactaaacaaattgcacatagaattaacacactatcaaaactaacagttcagatcgctggataactcatctttcttactaaaatttaatgagcaacagtatttggatcattcttcatccctcattcctctccctccactcgcgaacacaaactccccctcccccgccacctccccttcactcacgttaccactgtc

SEQ ID NO: 71583 - DNA, 4568 bp, Zea Mays
gttaagggtgccatatatgtgttgcggatgccagtggttgcacttcttatggatgagaaacattttgtaggcgctagattggtatctggtcaggatattttatgccaacaattgataattgatccgtcttataagactatcttggatgtcccatttgatggttcagattctcattttccaagaaaagttgtgagaggggtatgcataattagcaagtccgtgaaacagggatcatcaaatgttctggttattttccctccaaaatcactagaagagcagcaagttacagctgttcgacttcttcagttgagcagcaatctcgcagtatgccctcctgggatgtttatgtcatatctgtctactccctgtaccgatgtctcagtcggaaagcaatgcataaaaaaagcaatagatgctctttacagtcctcaggcttcagatggttcagaagaccatcttgagacagccagtgaaagcaccgaggatgtgaagccaacactaatctggagttgtgtgtatgttcaagagatcacacagctggtcctttattgtcatgccctatgcccgatgaatacctggactacagaaacatactgggatcaacaaaaaagttattcgcaagtatctatgctgatgaagagttcttgcctaaaaagtcagctcctgtatatgccaatgatgactctgattctgcagagtaaaaccatctttctagagggctttatcatttggttggagaacgccgtcagcccgtcactgaaattccgagggcaaaagagcgtcgcaaggggagcctgtggggcttgatgagcagttgtgctggatttccaatgtacaggtgcccactggctggccatacattgcattggtagggaacagttggagggagacatgctcggtgcaaatggccttgtatggattggcaaacattgttgtacgcaagatcacagcaaatacgggatacaaaatgctgaacgctcgatttggtcccccaatttgaacgacagagtgtagaagggtattctgaagacttactagttaagtggctgagggctgatttagcgacgagggaaataaaggtgatccatgaggaaaatagcaatgaaattcctcccccgtgtggccatgtctccatgtggtcattaaaccagccctgaatgtatttttggtcggccaaagcggtgtgtatagtatctttctttgtttttggttgtttcaggtgaggttttagtcttcagctcgcagaattgggcgatattattacccggcctatagtattttttttcttctcgcaaccattttttgtttgttgatgagttctgagagtgcattgtttagttttctacaagaacaatcgtaggacgacacgggaacatgggactcactgctgaaggtcggaaggataagcttcttatcttgcccaaccagattccacgtcactatgtcagtcacggctcccatctctagtgttatttatttgtccgtacccaaactacacccgccgaatggattggctagagtacggggctacccatttattcctagatatgggtaggataacaataagtattattcacttatctctgctcatgtgttaccttttcttttttctgttttattaaagataaagtaaaattatttataagtgggatccaagtcttgattgttgactccacatttacacctacataaccaataaaacatattttttatattttattaaaataaagttaatatataatgtgatatatagaaagtagcaaactattctagcggcagaactagtgtcacccgctactggaatactggatttctttggttgagctatgacgtgaagaaaggaaaaatgctacgattgtgaagaaaaggaaaaaagctacaacctgtttagttaaaattcgtgtaaatatatatcttatctttatatccaattaaaaaaatacgaataagttctttcattccacacattttggaaaataagaaaaccaaaagctaaaaaatagagtcctttggaatggaggattagtaaaacatagggatgagaaaaatgtaggaatagagttgcatgtcatcttcaattcatatattttttttttcaaaagattggatctcatgttaaaaacctacaaaatttcactacaatgctcaattctataaaaattttataggatttgtagcaactcaatcctttgttctaaagtaccacgtaggaaaactttccatagggtttcaatccttttccttcacttttccattgttccaaagaagggcatactaaaaatagttgcttttcaaaaagagccttcgagaatcgtccctttgttgagcttttggcttcttgagaaaaatagccctcaaaatccaaccaatacgtctttgatggaagtcgtttcggaggcttgcttttgccaaatctatgctcgcaaagccatgacagtagagctcgcagagccatgacaatagagatgtataagagtggttaagcgagagaagagaattgtctcttaagcagaagtaccttatataagcgcgggagagctcgattcactgaacatggatcgatgctctctgatgtgctttgatggtcatcagtccaatggttataggtaatagtcacattgacggtcaacagtcaggtcattcaggtcgtcatttactcctttgatgacttgattaaactctgtaacggtccgtctatctcgacttgacttgatacaatgtcacatgcccataccctgacactgtacaatctgcgagttagtccacgcccacgaccataaccatatagagtctccaacaaccttagattgtcttcagaaacgttctctataaagatatcaatttaactcacagacccaaaatccaatgaacgtgtatatgagagaagatttcgacctgtgtgtgcacctacaccagacccgaagtttcacgggtataaatacgagtttcttattttaatttgtggttgacccgcacctgacccgaaattcgattcattatttattttgcgtaaaaatgattaagatacaataataattatttagatagtcttaaaataatataaatttagataccaggttccagctctaatgtggagctgtagtttataatataaatttagatagtcttaaaatacttttaatgtaaataataaacaaaatgacttacctaaatatcttctatattcacaacttcagctccacaattttctggagcacctaatgacttgctccaccaactcaatcaaaatttctaagctggactagtgccaaataggaccttaatttcttagctgaattattgtttaaagtgtatattgggtaaaaacccttgggtgacttaaaacccacccgaaacacgatgggttcagatgtgattgcggacgactttaggtagatttcacggacatgattgggggtgagtttttgctccacctgattcattgtcatccatatatatctgtgctttacggtctattctaaaagatttcctactctatatctcattcctctctagcagtgttctctgtatttcatcatcatatacctaaattagagacataattttgttctagattttattaagataatatttgttatatatcctcaaatggtttatacatattttaattttgcttaatcaactgtttaaaatattaaatagatatagaagaggagagcgaatctctatttataaaggatgaaaaaacgtcctatatatttagaggatgttgctaaagggtacaaaaaaatgtaaatatcatttgtacatgtagagtataaagctgtttacaactctcatgctttctccagcaggattcgtaaagggtctcgcatccccaatttacgtattgaggagctactgaacctgtcccagcagcatgcatatagggtatcgcataattggaggtctggcttcagcatgcgcaaacccacacttctctctcctcctcgcatattctagacaactacgccgtggcggtagacaacaatgcgaggccgggtaagagagatgctggagcactccagttaaatgcgcacgcgcagcggcatgcagactccctaaatgcgcattcgcatccgaatgccactggagaaagcctcaagggagccctataacctcctcgcactatttatatggagaacacagttctctaacaactctatatacttgaaagaatctcctggtatatataaagaaaacactaagttcctcatatattttaattacatatattttgtgatattaattataattaagtcaagtaacatgataaatagtctataccactatataatccactagtttgaactttgcaaaatccactcaaccaaatcatccttacatataagtatataaccttcactaaatctactaaacaaattgcacatagaattaacacactatcaaaactaacagttcagatcgctggataactcatctttcttactaaaatttaatgagcaacagtatttggatcattcttcatccctcattcctctccctccactcgcgaacacaaactccccctcccccgccacctccccttcactcacgttaccactgtc

SEQ ID NO: 71584 - DNA, 1010 bp, Zea Mays
atatatgtgttgcggatgccagtggttgcacttcttatggatgagattctcattttccaagaaaagttgtgagaggggtatgcataattagcaagtccgtgaaacagggatcatcaaatgttctggttattttccctccaaaatcactagaagagcagcaagttacagctgttcgacttcttcagttgagcagcaatctcgcagtatgccctcctgggatgtttatgtcatatctgtctactccctgtaccgatgtctcagtcggaaagcaatgcataaaaaaagcaatagatgctctttacagtcctcaggcttcagatggttcagaagaccatcttgagacagccagtgaaagcaccgaggatgtgaagccaacactaatctggagttgtgtgtatgttcaagagatcacacagggaacagctggtcctttattgtcatgccctatgcccgatgaatacctggactacagaaacatactgggatcaacaaaaaagttattcgcaagtatctatgctgatgaagagttcttgcctaaaaagtcagctcctgtatatgccaatgatgactctgattctgcagagtaaaaccatctttctagaggtatcttcggaatcagggtacgggtatacaagagtatggtcaagacgaagcttgagtgggatggaaggcgatcatgacgaaggctaagataatcacgaagctatacgcagaaaagcttcggcatgacagcagaaaaggggaaccgacttaaagatgaaaagccaaattagacctcgaagaattactatagagttattgataaatgtaaagggcattaatgtaattttacacgggttgtgtcccgtgtctataaatagatgaacagtactcccgtactgttcacgctgacttggcattcgctctccgcattacgcctgtacctttactttccatcaatccgaaggtacatttataatttgttattgtggatatgataatgcaaataaaaaataattcgatgataatat

SEQ ID NO: 71585 - DNA, 2038 bp, Zea Mays
ccgagtgctgcaaacacaggcacacagctgctatcggatgtcggaggccaaaacccagacgcaacgcaacccaccccctctctgtcctctccgtcctgaactcgcgcctcgcttcgtctctcccattcccacccgctgaagcttcaaggagcttctcgtctgagaccgagctaacgagctcaccggcgggcaggatgctggcggcgtccaccaaggtcggctctaggctggcctctccgcacgcctccttgtccgccggtgctgcggcggcggcactggcgagctcccccgtgctgggctctgggatgctcccaggcgccgggttcggcgagacggggagtcaccacgcggcagacgcgccgccggcgctgccttgcagttcctcgggcgattcaagggaatattatcagtggaagagactggtgaatcaaaggcagtcaacgctagatggaggcaaagtgcctgctgcattgggccaccatgtttttggtgcgggctgttcctcacggaaccaacatatctacagatatttttcatcttctcatcaagggagtatatgggccgggagcaaggttctacatgacctgccagggtatgtaaaaattgtggaagtagggccacgagatggtctacagaacgagaaggacatcgtgccaacacctgtaaaggttgagcttatacgaagattggccacatctggattacctgttgtggaggcaacgagttttgtatctccaaaatgggtacctcagttagctgatgcgaaggatgttatggaagcagttcggactatggggggtgtacgttttcctgtattgactccaaaccttaagggatttgaggcagctattgcagcaggggcaaaagaaatcgcaatatttgcatcagcttctgaaggattttccaagtcaaacataaactgcaccattaaagagagcattgcccgttataatgacgttgctcttgctgcgaaagagaaagaaattcctgtccgagggcaccgtggttccgatgcttgaggcagctatctccgtcgttcccgtggagaagctcgctgtccacttccacgacacctacggccagtccctctcgaacattctcatctctcttcagatgggagtaagcgtggtggactcctccgtcgccggcctcggtggctgcccgtacgcgaagggtgcgtcggggaatgtggcgacggaggacgtagtgtacatgctcaacgggctgggcgtcaagacgggcgtcgacctgggcaaggtgatggccgccggcgagttcatctgcaggcacctgggacgccagtctgggtccaaggcagcgaccgctctgagcaaagttaccgcgaacgcctccaaactctgacaatttaccatgatcccctactgcagataattgcagtaaaattagcgcatggtaataaatagactgaggctattcaaataaatacggcctcggagctagtagtgagtagatttttatttatgtccatctagctagcaaaataagcgcgacactgccaacactgccggtctagcaagcaaaatgagcaaatatgtgaccacctctacgggaaagattcccccaacactctcagcaaacggaagtggtgcatcagttcgttccagcttccagtcatcacatgttcactcagcaaacagaaatggagcatcagttcgttccagcttccagtcattacatgtttacaacatccagatctcacctacgctatggacacaatgggaaatgtctagtgctgtaatgcattccacgaaagttgatgggttagctatgatctcaaacttacagcagattcaaagcatttttgggagggctcccaaactggccctggctctgctttctctaggtgcaaaaaaaaaacagcttcaacatagagcatttaggagctggaaccactttttttttataagctagagtaaaaaaaaagctcctagcggctcctccctccactccctgtcctgcccagcgctcgtcgcctggcctctgtcgcgttgcatttggtgtagccggcctatgcccg

SEQ ID NO: 71586 - DNA, 1486 bp, Zea Mays
aatatgcctctctctaaaggctctgaatggaatttattgtgtcaggtcgtgccaatagaatcattagctgatgcgaaggatgttatggaagcagttcggactatggggggtgtacgttttcctgtattgactccaaaccttaagggatttgaggcagctattgcagcaggggcaaaagaaatcgcaatatttgcatcagcttctgaaggattttccaagtcaaacataaactgcaccattaaagagagcattgcccgttataatgacgttgctcttgctgcgaaagagaaagaaattcctgtccgagggtacgtttcttgtgtggttggatgcccagtagatggaccagtgccaccttcaaacgtagcttatgtagcgaaagaactttatgacatgggctgctatgaggtttcacttggtgataccattggagtcggtactccaggcaccgtggttccgatgcttgaggcagctatctccgtcgttcccgtggagaagctcgctgtccacttccacgacacctacggccagtccctctcgaacattctcatctctcttcagatgggagtaagcgtggtggactcctccgtcgccggcctcggtggctgcccgtacgcgaagggtgcgtcggggaatgtggcgacggaggacgtagtgtacatgctcaacgggctgggcgtcaagacgggcgtcgacctgggcaaggtgatggccgccggcgagttcatctgcaggcacctgggacgccagtctgggtccaaggcagcgaccgctctgagcaaagttaccgcgaacgcctccaaactctgacaatttaccatgatcccctactgcagataattgcagtaaaattagcgcatggtaataaatagactgaggctattcaaataaatacggcctcggagctagtagtgagtagatttttatttatgtccatctagctagcaaaataagcgcgacactgccaacactgccggtctagcaagcaaaatgagcaaatatgtgaccacctctacgggaaagattcccccaacactctcagcaaacggaagtggtgcatcagttcgttccagcttccagtcatcacatgttcactcagcaaacagaaatggagcatcagttcgttccagcttccagtcattacatgtttacaacatccagatctcacctacgctatggacacaatgggaaatgtctagtgctgtaatgcattccacgaaagttgatgggttagctatgatctcaaacttacagcagattcaaagcatttttgggagggctcccaaactggccctggctctgctttctctaggtgcaaaaaaaaaacagcttcaacatagagcatttaggagctggaaccactttttttttataagctagagtaaaaaaaaagctcctagcggctcctccctccactccctgtcctgcccagcgctcgtcgcctggcctctgtcgcgttgcatttggtgtagccggcctatgcccg

SEQ ID NO: 71587 - DNA, 1492 bp, Zea Mays
cctctctgcatttgtgaggggaagactctcggtttatccatccctagaccctaatcatgttcaggcaggttagctgatgcgaaggatgttatggaagcagttcggactatggggggtgtacgttttcctgtattgactccaaaccttaagggatttgaggcagctattgcagcaggggcaaaagaaatcgcaatatttgcatcagcttctgaaggattttccaagtcaaacataaactgcaccattaaagagagcattgcccgttataatgacgttgctcttgctgcgaaagagaaagaaattcctgtccgagggtacgtttcttgtgtggttggatgcccagtagatggaccagtgccaccttcaaacgtagcttatgtagcgaaagaactttatgacatgggctgctatgaggtttcacttggtgataccattggagtcggtactccaggcaccgtggttccgatgcttgaggcagctatctccgtcgttcccgtggagaagctcgctgtccacttccacgacacctacggccagtccctctcgaacattctcatctctcttcagatgggagtaagcgtggtggactcctccgtcgccggcctcggtggctgcccgtacgcgaagggtgcgtcggggaatgtggcgacggaggacgtagtgtacatgctcaacgggctgggcgtcaagacgggcgtcgacctgggcaaggtgatggccgccggcgagttcatctgcaggcacctgggacgccagtctgggtccaaggcagcgaccgctctgagcaaagttaccgcgaacgcctccaaactctgacaatttaccatgatcccctactgcagataattgcagtaaaattagcgcatggtaataaatagactgaggctattcaaataaatacggcctcggagctagtagtgagtagatttttatttatgtccatctagctagcaaaataagcgcgacactgccaacactgccggtctagcaagcaaaatgagcaaatatgtgaccacctctacgggaaagattcccccaacactctcagcaaacggaagtggtgcatcagttcgttccagcttccagtcatcacatgttcactcagcaaacagaaatggagcatcagttcgttccagcttccagtcattacatgtttacaacatccagatctcacctacgctatggacacaatgggaaatgtctagtgctgtaatgcattccacgaaagttgatgggttagctatgatctcaaacttacagcagattcaaagcatttttgggagggctcccaaactggccctggctctgctttctctaggtgcaaaaaaaaaacagcttcaacatagagcatttaggagctggaaccactttttttttataagctagagtaaaaaaaaagctcctagcggctcctccctccactccctgtcctgcccagcgctcgtcgcctggcctctgtcgcgttgcatttggtgtagccggcctatgcccg

SEQ ID NO: 71588 - DNA, 1208 bp, Zea Mays
atggtccatattgtggcaaccaagacacaaataaagaacaaatgggacaggttgaaagaattcaaggcatggaagaagttgatgaggcagacatgtactggacattccaagttgtgggaacttcaaaatatggaggaactagaaatatgttttggcagcatcacaagtattggtgttgatcactggtctcctcatatggccactgctttcaccattgctgaacaaggaggtacaccacacgaggcaatcaattgtgacacacaagaagatggtgacaccaatgaatgtgaagtttcaccgcagaagcagttggagagtttggtaaatctactggcagcgacaaacaggtaatgttgctatgcaccttcctctcagtctaataatagtgaaattcatgctgattaagttgctgctgcagtgatatataatggtcacctattatgaagaaatagtgaatgggagaagggttgagttttggagccggtgcatgcaaatcatataccgggtttatactataatgttttccttatgaagaattaaatatttgtgtgtttttatattgtctgggtagttctgccaattcagtgttaatgttgtttgaaatgtgccacaacaacatttgacgattggtcgcagcatcatgtttgattaaatatctgactcctgtcatatggcaactatccattatgaccacctgatggatacgaaccaagcagtttgcgtcgctaacttgtttctgttatccttaacataagtgacatggagcttgtatattttcaataggcccaagttaaaccttattcagttttgaaccgaaggcagatttcgttttgtagacctacttataggtatactgatcattgtcccaattctagatctgatcattgtcccagttttaaactgatcattgtccctccaagtacccagttctgctcatgggatgtacaacatttcttttggtcatgatattggaaatgttgatccgactatctaagtaaacatgtcagcaagtcacacaacaatcagccaagcagagggaagtatgcttcatgggcgctcccggtcgaccgatgtggtggtcagggtcggagcgtgcagactctgctctcactcaccgtgaaacagaccatggacgcagcgcaagccagcggttgaactatggtgtggtgttcaccgtgaagagcttacaaggagctcagatcttgtaa

SEQ ID NO: 71589 - DNA, 436 bp, Zea Mays
aacgaaacttgcattcttattaggaggtcagactcatgagctgccttttttctgaaataaagcagttggagagtttggtaaatctactggcagcgacaaacagatctgatcattgtcccagttttaaactgatcattgtccctccaagtacccagttctgctcatgggatgtacaacatttcttttggtcatgatattggaaatgttgatccgactatctaagtaaacatgtcagcaagtcacacaacaatcagccaagcagagggaagtatgcttcatgggcgctcccggtcgaccgatgtggtggtcagggtcggagcgtgcagactctgctctcactcaccgtgaaacagaccatggacgcagcgcaagccagcggttgaactatggtgtggtgttcaccgtgaagagcttacaaggagctcagatcttgtaa

SEQ ID NO: 71590 - DNA, 767 bp, Zea Mays
aattctcccatagcttcatagtgtggctcatcaacttatttttccggctgcatcaccaccaaggaacttggaactgtgatgcgctcgttggggcagaaccctactgaggctgagcttcaggacatgatcaacgaggttgatgctgatggcaatggaaccatcgacttccctgagtttctcaacctgatggcacgcaagatgaaggacaccgactctgaggaggagctcaaggaggccttccgcgtgttcgacaaggaccagaacggcttcatctctgctgctgagcttcgacatgtcatgaccaacctaggtgagaagctgacggacgaggaggtggatgagatgattcgtgaagccgacgtggacggtgatggccagatcaactacgaggagttcgtgaaggtgatgatggccaagtgagatgatgtgcctgttttgaagctagttcctctcttgatggtagtagctagtctagtgttggagactgactgcatttggtccgccttgttcctctcgctgcatcaatggacatatccgtttgttttctcccaagggattttaccatgtcggtaatttcgttcaaatttgtttatggttgtattaacatttgtgttatcttggtacaatgatcatgcctttcccttctaaatttaggtgttgaatttcttgtagaaatacgtggcatgcatgtgcagatatatccgattttgtttggttttctcgttacttgtgctgtaattctttcgcagcattattacccaacgatt

SEQ ID NO: 71591 - DNA, 1451 bp, Zea Mays
tccggaagaaacaaatcctgttcgctcttcttgtcgagaccagaccaccgtatactggagagaaagaatcctccctcgcctccccaccccgccccacccatggcctccgccgccagcactgccgccgccgccggggccccgctgcgcctcctctcatcctcttccaaccgtatctccaagcccttccttccccgcccccaccgcctcaccctctcctcccccatctccttccagcgcctcacagcccggtccgcggcctccccttccccatccaccgccacctcgtccccgtccggctctgtcgacccggcgcaactgccccccgcgctacgcgacatcgtcggcctcttccagtccgtcccggacgcgcgcacccggtacaagcagctccttgcctatgccgcgcgcctgccgcccatggacccggcgctcaagaccgacgccaaccgcgtccggggttgcgtctcacaggtctgggtccacgccgagcccgacgagggcgacgccggccgccgcagcgtcaggttccacgccgactccgacgcgcagctcaccaagggcctcgccgcgctgctcgtgctagggctctctggcgcgcccgccgcggatgtggccagggtgcccgttgacttcatcgagctgctcgggatcaggcagagcctctctccctccaggaacagcggcctgctcaacatgctcagcctcatgaagcgcaaggcacttgagatcgccggtggtgactcaacgtcaagtcagcaatctgtccaagaggttaccagaccgcgtctagtgaacgggaaagagcctgaatttgcagctttcgaggtgcaagaaaaggaaaaggaaaggccacaggatgcagagaggcgcgacgaggatgaacaattgggtcaacttctaccacttgatgcagaagtgaatggtgctgcgggcggtgggaggaaggagaggataagggagagtttggagagggcactttctccggtagagttggagattgaagacatatcacacctccacaagggccatgctggcgtggctgggaccaatggggagacacatttcaatgtgagggtggtgtccaaggagtttgaggggaagagcttgctcaagaggcacagggctgtctatgatctcctgcaggaggagctcaagaccgggttgcacgccctgtcaatcgatgcaaagactccatctgaagtttagcacaaaatcgctggtgttctccatgttcgggcatcaatcggtcctatttcccaacaattttctcaacaatgttcggtcaatcattaggtgttaaacatatccatggtagagttggaactttgaatggtggcgagtcctatttgatgtatgggtggttggcatccaacttaaactgtccattttatgctagtacggaagtgctatcatacttgtgttgctaagttgcttcatataatttaaaaacg

SEQ ID NO: 71592 - DNA, 1783 bp, Zea Mays
tccggaagaaacaaatcctgttcgctcttcttgtcgagaccagaccaccgtatactggagagaaagaatcctccctcgcctccccaccccgccccacccatggcctccgccgccagcactgccgccgccgccggggccccgctgcgcctcctctcatcctcttccaaccgtatctccaagcccttccttccccgcccccaccgcctcaccctctcctcccccatctccttccagcgcctcacagcccggtccgcggcctccccttccccatccaccgccacctcgtccccgtccggctctgtcgacccggcgcaactgccccccgcgctacgcgacatcgtcggcctcttccagtccgtcccggacgcgcgcacccggtacaagcagctccttgcctatgccgcgcgcctgccgcccatggacccggcgctcaagaccgacgccaaccgcgtccggggttgcgtctcacaggtctgggtccacgccgagcccgacgagggcgacgccggccgccgcagcgtcaggttccacgccgactccgacgcgcagctcaccaagggcctcgccgcgctgctcgtgctagggctctctggcgcgcccgccgcggatgtggccagggtgcccgttgacttcatcgagctgctcgggatcaggcagagcctctctccctccaggaacagcggcctgctcaacatgctcagcctcatgaagcgcaaggcacttgagatcgccggtggtgactcaacgtcaagtcagcaatctgtccaagaggttaccagaccgcgtctagtgaacgggaaagagcctgaatttgcagctttcgaggtgcaagaaaaggaaaaggaaaggccacaggatgcagagaggcgcgacgaggatgaacaattgggtcaacttctaccacttgatgcagaagtgaatggtgctgcgggcggtgggaggaaggagaggataagggagagtttggagagggcactttctccggtagagttggagattgaagacatatcacacctccacaagggccatgctggcgtggctgggaccaatggggagacacatttcaatgtgagggtggtgtccaaggagtttgaggggaagagcttgctcaagaggcacagggctgtctatgatctcctgcaggaggagctcaagaccgggttgcacgccctgtcaatcgatgcaaagactccatctgaagtttagttcaaatgagccttgcgtggtgggtgactcgatggtgcctagcgtacctgacgacgaagaaagaaggtgaatcattggattcctcacgtttgatattgatggtgggtcgctggatccattatgcctcacgctgcaatagcattctaatattcattggcattagggtttgtttggaatcaaggaatacaaaatggaataccaaacacgggaatagaaaaaaaaataacgaaggaataagatgaagtggatagtgaagagctatggtttctaaacaataggaatggatatttgaagctgtttgcattggatgaaaagaagtacaggaacatgagcaagcatagcaagaaggagagcaaagattctttcccttaggttggagtggatgttctctttcctatattttgtactaccatggttttctttcatttggaagggaactcaacattctttcattccaaacacaatgaactaattcctttcctttagaatttattccttcaaaatctcttcgaaaaatcctttgatctatataggcccttcagtgatctgatgcagtctttttaggtggcaattcaca

SEQ ID NO: 71593 - DNA, 1387 bp, Zea Mays
cgtcttcattctttctccctgcccctgccctcgcctgctgaaggaagccgcctttttggagtttggactcgggaggacagcctccgcactttccgtccgtcgcgaggaattcctgcccgggcgggcgtagagcagggcgaagcattcgttggggacgaacgtttagggccggggatcggggaacacgaggctgcgcgttggcgcaagcaagcaaattttgggtcctagcttgaaggactgccatctttttttttgcgtctgtttgatagaacgcatttttgccggccagctccactcgagaatttgaaggaattttaccaacgtggggagctgaattttttttctgctcctcacattttccactctccacccgcgcctgactgcagctggctgcgatccccctatctaccacctgattcatctttgtctccgtcggtgccgccctctccgccagcctgaccccagggatggctggaaaaggaagctatgtacctccacaatatattcccttatacagcctagataccgaagaggatcgtgtccctgccgtggaagagaaccatgctacgcgccctaaactaaaccaggatccaacacaatggtcatctggcatctgtgcctgttttgatgacccccagagctgttgtattggtgcgatttgcccctgtttcctttttggaaagaatgcacaattcttgggatctggaactcttgctggatcatgcactacgcattgcatgttgtggggccttctcacaagtctatgctgtgtatttactggaggtctagtattagcagttccaggatctgccgttgcttgttatgcttgcggatatcgcagtgcactaagaacaaagtacaatcttccggaagcaccctgtggcgatttgacgacacacttattctgtcacttgtgtgctatatgccaggagtacagggagatccgtgagagaacaggcagtggctcctcaccagctcctaatgtgactccacctccagttcagacgatggatgagctttgatctttaactgatatgaatgtatgttatctgacaaactttggtgtgtggcctggtgactagtgctgcctttgcctgttggcattttgacatatttttgttcttgggctctcacaacgctgctatgttgtttgtagagttgtaaacacgttttgaactagtgaaccactgacagttcacggaagttgtaacacagttgtaccatggaactgtagtagaattaagtgtatttttttgctatttatataggtgagaggatgagaagggaaaagaaaagaaatgcgcttatcatgcagaatgtttcattgtgtttagttctatgaacaatccaatattgtggtgagtggttgtttaagtttcagtttatt

SEQ ID NO: 71594 - DNA, 1377 bp, Zea Mays
cgtcttcattctttctccctgcccctgccctcgcctgctgaaggaagccgcctttttggagtttggactcgggaggacagcctccgcactttccgtccgtcgcgaggaattcctgcccgggcgggcgtagagcagggcgaagcattcgttggggacgaacgtttagggccggggatcggggaacacgaggctgcgcgttggcgcaagcaagcaaattttgggtcctagcttgaaggactgccatctttttttttggttgaacgcatttttgccggccagctccactcgagaatttgaaggaattttaccaacgtggggagctgaattttttttctgctcctcacattttccactctccacccgcgcctgactgcagctggctgcgatccccctatctaccacctgattcatctttgtctccgtcggtgccgccctctccgccagcctgaccccagggatggctggaaaaggaagctatgtacctccacaatatattcccttatacagcctagataccgaagaggatcgtgtccctgccgtggaagagaaccatgctacgcgccctaaactaaaccaggatccaacacaatggtcatctggcatctgtgcctgttttgatgacccccagagctgttgtattggtgcgatttgcccctgtttcctttttggaaagaatgcacaattcttgggatctggaactcttgctggatcatgcactacgcattgcatgttgtggggccttctcacaagtctatgctgtgtatttactggaggtctagtattagcagttccaggatctgccgttgcttgttatgcttgcggatatcgcagtgcactaagaacaaagtacaatcttccggaagcaccctgtggcgatttgacgacacacttattctgtcacttgtgtgctatatgccaggagtacagggagatccgtgagagaacaggcagtggctcctcaccagctcctaatgtgactccacctccagttcagacgatggatgagctttgatctttaactgatatgaatgtatgttatctgacaaactttggtgtgtggcctggtgactagtgctgcctttgcctgttggcattttgacatatttttgttcttgggctctcacaacgctgctatgttgtttgtagagttgtaaacacgttttgaactagtgaaccactgacagttcacggaagttgtaacacagttgtaccatggaactgtagtagaattaagtgtatttttttgctatttatataggtgagaggatgagaagggaaaagaaaagaaatgcgcttatcatgcagaatgtttcattgtgtttagttctatgaacaatccaatattgtggtgagtggttgtttaagtttcagtttatt

SEQ ID NO: 71595 - DNA, 1357 bp, Zea Mays
cgtcttcattctttctccctgcccctgccctcgcctgctgaaggaagccgcctttttggagtttggactcgggaggacagcctccgcactttccgtccgtcgcgaggaattcctgcccgggcgggcgtagagcagggcgaagcattcgttggggacgaacgtttagggccggggatcggggaacacgaggctgcgcgttggcgcaagcaagcaaattttgggtcctagcttgaaggactgccatctttttttttggttgctccactcgagaatttgaaggaattttaccaacgtggggagctgaattttttttctgctcctcacattttccactctccacccgcgcctgactgcagctggctgcgatccccctatctaccacctgattcatctttgtctccgtcggtgccgccctctccgccagcctgaccccagggatggctggaaaaggaagctatgtacctccacaatatattcccttatacagcctagataccgaagaggatcgtgtccctgccgtggaagagaaccatgctacgcgccctaaactaaaccaggatccaacacaatggtcatctggcatctgtgcctgttttgatgacccccagagctgttgtattggtgcgatttgcccctgtttcctttttggaaagaatgcacaattcttgggatctggaactcttgctggatcatgcactacgcattgcatgttgtggggccttctcacaagtctatgctgtgtatttactggaggtctagtattagcagttccaggatctgccgttgcttgttatgcttgcggatatcgcagtgcactaagaacaaagtacaatcttccggaagcaccctgtggcgatttgacgacacacttattctgtcacttgtgtgctatatgccaggagtacagggagatccgtgagagaacaggcagtggctcctcaccagctcctaatgtgactccacctccagttcagacgatggatgagctttgatctttaactgatatgaatgtatgttatctgacaaactttggtgtgtggcctggtgactagtgctgcctttgcctgttggcattttgacatatttttgttcttgggctctcacaacgctgctatgttgtttgtagagttgtaaacacgttttgaactagtgaaccactgacagttcacggaagttgtaacacagttgtaccatggaactgtagtagaattaagtgtatttttttgctatttatataggtgagaggatgagaagggaaaagaaaagaaatgcgcttatcatgcagaatgtttcattgtgtttagttctatgaacaatccaatattgtggtgagtggttgtttaagtttcagtttatt

SEQ ID NO: 71596 - DNA, 713 bp, Zea Mays
cgtcttcattctttctccctgcccctgccctcgcctgctgaaggaagccgcctttttggagtttggactcgggaggacagcctccgcactttccgtccgtcgcgaggaattcctgcccgggcgggcgtagagcagggcgaagcattcgttggggacgaacgtttagggccggggatcggggaacacgaggctgcgcgttggcgcaagcaagcaaattttgggtcctagcttgaaggactgccatctttttttttggagtacagggagatccgtgagagaacaggcagtggctcctcaccagctcctaatgtgactccacctccagttcagacgatggatgagctttgatctttaactgatatgaatgtatgttatctgacaaactttggtgtgtggcctggtgactagtgctgcctttgcctgttggcattttgacatatttttgttcttgggctctcacaacgctgctatgttgtttgtagagttgtaaacacgttttgaactagtgaaccactgacagttcacggaagttgtaacacagttgtaccatggaactgtagtagaattaagtgtatttttttgctatttatataggtgagaggatgagaagggaaaagaaaagaaatgcgcttatcatgcagaatgtttcattgtgtttagttctatgaacaatccaatattgtggtgagtggttgtttaagtttcagtttatt

SEQ ID NO: 71597 - DNA, 1353 bp, Zea Mays
cgtcttcattctttctccctgcccctgccctcgcctgctgaaggaagccgcctttttggagtttggactcgggaggacagcctccgcactttccgtccgtcgcgaggaattcctgcccgggcgggcgtagagcagggcgaagcattcgttggggacgaacgtttagggccggggatcggggaacacgaggctgcgcgttggcgcaagcaagcaaattttgggtcctagcttgaaggactgccatctttttttttgctccactcgagaatttgaaggaattttaccaacgtggggagctgaattttttttctgctcctcacattttccactctccacccgcgcctgactgcagctggctgcgatccccctatctaccacctgattcatctttgtctccgtcggtgccgccctctccgccagcctgaccccagggatggctggaaaaggaagctatgtacctccacaatatattcccttatacagcctagataccgaagaggatcgtgtccctgccgtggaagagaaccatgctacgcgccctaaactaaaccaggatccaacacaatggtcatctggcatctgtgcctgttttgatgacccccagagctgttgtattggtgcgatttgcccctgtttcctttttggaaagaatgcacaattcttgggatctggaactcttgctggatcatgcactacgcattgcatgttgtggggccttctcacaagtctatgctgtgtatttactggaggtctagtattagcagttccaggatctgccgttgcttgttatgcttgcggatatcgcagtgcactaagaacaaagtacaatcttccggaagcaccctgtggcgatttgacgacacacttattctgtcacttgtgtgctatatgccaggagtacagggagatccgtgagagaacaggcagtggctcctcaccagctcctaatgtgactccacctccagttcagacgatggatgagctttgatctttaactgatatgaatgtatgttatctgacaaactttggtgtgtggcctggtgactagtgctgcctttgcctgttggcattttgacatatttttgttcttgggctctcacaacgctgctatgttgtttgtagagttgtaaacacgttttgaactagtgaaccactgacagttcacggaagttgtaacacagttgtaccatggaactgtagtagaattaagtgtatttttttgctatttatataggtgagaggatgagaagggaaaagaaaagaaatgcgcttatcatgcagaatgtttcattgtgtttagttctatgaacaatccaatattgtggtgagtggttgtttaagtttcagtttatt

SEQ ID NO: 71598 - DNA, 1177 bp, Zea Mays
cgtcttcattctttctccctgcccctgccctcgcctgctgaaggaagccgcctttttggagtttggactcgggaggacagcctccgcactttccgtccgtcgcgaggaattcctgcccgggcgggcgtagagcagggcgaagcattcgttggggacgaacgtttagggccggggatcggggaacacgaggctgcgcgttggcgcaagcaagcaaattttgggtcctagcttgaaggactgccatctttttttttgggatggctggaaaaggaagctatgtacctccacaatatattcccttatacagcctagataccgaagaggatcgtgtccctgccgtggaagagaaccatgctacgcgccctaaactaaaccaggatccaacacaatggtcatctggcatctgtgcctgttttgatgacccccagagctgttgtattggtgcgatttgcccctgtttcctttttggaaagaatgcacaattcttgggatctggaactcttgctggatcatgcactacgcattgcatgttgtggggccttctcacaagtctatgctgtgtatttactggaggtctagtattagcagttccaggatctgccgttgcttgttatgcttgcggatatcgcagtgcactaagaacaaagtacaatcttccggaagcaccctgtggcgatttgacgacacacttattctgtcacttgtgtgctatatgccaggagtacagggagatccgtgagagaacaggcagtggctcctcaccagctcctaatgtgactccacctccagttcagacgatggatgagctttgatctttaactgatatgaatgtatgttatctgacaaactttggtgtgtggcctggtgactagtgctgcctttgcctgttggcattttgacatatttttgttcttgggctctcacaacgctgctatgttgtttgtagagttgtaaacacgttttgaactagtgaaccactgacagttcacggaagttgtaacacagttgtaccatggaactgtagtagaattaagtgtatttttttgctatttatataggtgagaggatgagaagggaaaagaaaagaaatgcgcttatcatgcagaatgtttcattgtgtttagttctatgaacaatccaatattgtggtgagtggttgtttaagtttcagtttatt

SEQ ID NO: 71599 - DNA, 1057 bp, Zea Mays
cgtcttcattctttctccctgcccctgccctcgcctgctgaaggaagccgcctttttggagtttggactcgggaggacagcctccgcactttccgtccgtcgcgaggaattcctgcccgggcgggcgtagagcagggatggctggaaaaggaagctatgtacctccacaatatattcccttatacagcctagataccgaagaggatcgtgtccctgccgtggaagagaaccatgctacgcgccctaaactaaaccaggatccaacacaatggtcatctggcatctgtgcctgttttgatgacccccagagctgttgtattggtgcgatttgcccctgtttcctttttggaaagaatgcacaattcttgggatctggaactcttgctggatcatgcactacgcattgcatgttgtggggccttctcacaagtctatgctgtgtatttactggaggtctagtattagcagttccaggatctgccgttgcttgttatgcttgcggatatcgcagtgcactaagaacaaagtacaatcttccggaagcaccctgtggcgatttgacgacacacttattctgtcacttgtgtgctatatgccaggagtacagggagatccgtgagagaacaggcagtggctcctcaccagctcctaatgtgactccacctccagttcagacgatggatgagctttgatctttaactgatatgaatgtatgttatctgacaaactttggtgtgtggcctggtgactagtgctgcctttgcctgttggcattttgacatatttttgttcttgggctctcacaacgctgctatgttgtttgtagagttgtaaacacgttttgaactagtgaaccactgacagttcacggaagttgtaacacagttgtaccatggaactgtagtagaattaagtgtatttttttgctatttatataggtgagaggatgagaagggaaaagaaaagaaatgcgcttatcatgcagaatgtttcattgtgtttagttctatgaacaatccaatattgtggtgagtggttgtttaagtttcagtttatt

SEQ ID NO: 71600 - DNA, 1373 bp, Zea Mays
cgtcttcattctttctccctgcccctgccctcgcctgctgaaggaagccgcctttttggagtttggactcgggaggacagcctccgcactttccgtccgtcgcgaggaattcctgcccgggcgggcgtagagcagggcgaagcattcgttggggacgaacgtttagggccggggatcggggaacacgaggctgcgcgttggcgcaagcaagcaaattttgggtcctagcttgaaggactgccatctttttttttgaacgcatttttgccggccagctccactcgagaatttgaaggaattttaccaacgtggggagctgaattttttttctgctcctcacattttccactctccacccgcgcctgactgcagctggctgcgatccccctatctaccacctgattcatctttgtctccgtcggtgccgccctctccgccagcctgaccccagggatggctggaaaaggaagctatgtacctccacaatatattcccttatacagcctagataccgaagaggatcgtgtccctgccgtggaagagaaccatgctacgcgccctaaactaaaccaggatccaacacaatggtcatctggcatctgtgcctgttttgatgacccccagagctgttgtattggtgcgatttgcccctgtttcctttttggaaagaatgcacaattcttgggatctggaactcttgctggatcatgcactacgcattgcatgttgtggggccttctcacaagtctatgctgtgtatttactggaggtctagtattagcagttccaggatctgccgttgcttgttatgcttgcggatatcgcagtgcactaagaacaaagtacaatcttccggaagcaccctgtggcgatttgacgacacacttattctgtcacttgtgtgctatatgccaggagtacagggagatccgtgagagaacaggcagtggctcctcaccagctcctaatgtgactccacctccagttcagacgatggatgagctttgatctttaactgatatgaatgtatgttatctgacaaactttggtgtgtggcctggtgactagtgctgcctttgcctgttggcattttgacatatttttgttcttgggctctcacaacgctgctatgttgtttgtagagttgtaaacacgttttgaactagtgaaccactgacagttcacggaagttgtaacacagttgtaccatggaactgtagtagaattaagtgtatttttttgctatttatataggtgagaggatgagaagggaaaagaaaagaaatgcgcttatcatgcagaatgtttcattgtgtttagttctatgaacaatccaatattgtggtgagtggttgtttaagtttcagtttatt

SEQ ID NO: 71601 - DNA, 2439 bp, Zea Mays
tccacactcctccctgtctcggcttcgattccgcacttcccagttcccttcccacattcccacacccgcctgccttccttcccgtcgccttcttccccgctcctccgtgtcccactcccgtacgtgatacgccctcgggctcggagaaggaaaagcccgctctggcaccagctcctcgcatcgcatctcccctgccagggaccaggcatccctcgtcccggtctggagcagatatgggtgtcatcggaggaacacctcctgcaagctgcccaacaacccggcactgcgcagaatgggcccgaatctacttgaagtactgcttgtgcagccagaaggaaggcgctgctctggcacttggactaatcagtgtcgtaagctggggcctcgccgaggtgccacagataatgacaaattacagacacaagtcaacagaggggctctctgtcgccttccttatgacctggattgttggagatttgtttaaccttgccggttgcttcctcgaacctgcaactctgccaactcagttctacatggcactgctatataccatcacaactctgattcttactggacagacgatctactatagccacatctaccatcatcttaaactaaaaaactccagggcagctagcaagcctcaaaagcatcaataccgggatgcttcattacgcgaaaagcttttgggtgccaagggcagtgcagcatcaagaaacaatgaatcagatactacagttcttattccaagctcacctatccctgttaatatgaaattggttgaccaataccatggaagcagctccaacgctgactactactacatgtcagcaaggtccttgtccaggagtccagtgccaactgctggtatatggtccggcagtaatcgtcaatcatcaagaagtcctccacaaatgaatgatcaaaggggatctttaattggtgagatcgctccggaacattctgcaccatctactgttacaaaaaatgccctctcagtggcaccatggatgggtcttctattgggtacgtgcctcttgcacattttgattggaaacaaacatagggagatggcaagtggcactgtcataccaattggaagaaggcttttactgtttgtggatgatcatggaaattcatcgcttagccagagcagtggaagtgaaattggaagctttcttggttgggctatggcaatgatttatatgggtgggcggcttccccagattttgttaaatatgcaaagaggccacgttgaggggctgaatccattgatgtttacctttgctttactgggaaattcaacatacgtaggaagtatacttgtaaatagcttggactggtcgaaacttagaccaaatctcccgtggcttgtagaatcgggaggatgtgttttgctggattcttgtgtatcctttacagctcttctactttgagcacagtacgtttctactttataatatttgtcctagcataaatggaatgtaacaaatgtttgagaagaatattagttacagaaaaagactggcccttaggtaagtactgagtacacagtagctaatccttggccaatgaatgatcatgcctgattccttttggctgaggtcaatccatgtaaggcttattttgtctcagagaagttaaatattatagactccgaccaataattagtcaaattattatatggatagtcagcgtacaaaaacagcaccaatagattcatatattcaaaccgcattcaagatgctgcttatttttttagcattgataataacatgtaagggtaaccatatttttaaaggctttcttaatttgaaaatacagaccaaattgatggtcggagtgagtacccactgatacagaacatagtcattttccgtatgcattaatgattcagagcctaaacttgttggagtagttgggttgctaatttaccattactggacaaccccttaaccatgtttccgcagattattcttcagttcctttatttccattatcggaaacgaagggagccttcggatgagcacgacaacgcagacaaagcctgactgatatagaaactactgtttcttcttcggctcaaagaactgaagctgaaatgggtaccgacaccgacctgcctcctacaacgggctctggatagcagcagcatcgttgttacctgaagatttggagcgtcgtttcactggttgctgcttggagggtacttctcaccgccgtcatgtcctgtggagagccttgtgaactattatttgtcttgtagtgtcaaaatgtcttgtttttttgtatttatttatatcagatatttgatgttggctggtctgcttttgttttatattcttttttgtgtgtgtgcgcgctgcagaaacttgcacgagaaatgtacattcgtcgaataaaaatgtgcttattctcgttttaatttctgatgagttt

SEQ ID NO: 71602 - DNA, 1119 bp, Zea Mays
ctttttctatgacacaaaacaatgaacttgacaaatacagaagtattaatcatttgtacagcaccagaactacaaacaataataaaatgaatacatgagtacacttcttccaccatccatcatctgcaattatgcttccgttgtccatttgcaaatatgagaaaagggcacctttcgagatgggttacccgaggggtgaggagtatagcgagttttaggcactgtttgggaggccttcactttaaaaatgacaacttcgattttctaccttcactgtgaaacaacttcaacaaattgataagacagggttcaatagtgtttgacttatgcataaactctatcttctataatacaattaatttgtgtaattttccttaattaccattgatgattggcaggtggagaaaaagacatgaatcgataaatcatgtaaccaatgacatggtgtgtaatttttatgcaacttcatgagaaggtataaaaacagtatttttaaagcactagcttcaaaaatatcatgaaattgacctctagttttttttttaaatagagcttgtggagctgaacctgtttatagaagaagttaaaatagacctgaaatttttgaagtgcgagccttaacttctccttgagtgagctgaggggtccgtaatattttaggcacttttagctttggtactttagctcctaaaatgactaaattttagtccctttgctttagcttaagaggggtccaaacagaccctacatgtaaacagatcaagaacataaaaaatagaatgatcgaccgttcggtgattacatgggacattatattaaacaaatgaataaatttaatgcttagtgactagtctgtgggtctatttgatacaactcatggttagatagctaaaattggcatagtgcatttaaacagaaagtgtcaataagtaaaaaactatttttagctaaaattagcctagccactcaatcaggaagacagttaaaaagctactacctccgttctcgaataattgtcgccgactagttcatttttaaactaaaacgcgataaataaaaaagaacggagggagtattttatagcagtctttaactagtctgtctctagctgatttgaac

SEQ ID NO: 71603 - DNA, 388 bp, Zea Mays
acaggtacgtatgccaatgacctgtgagaacatacagtacaacaaaacctggttagcgtacaacagtttttgcaggatagatcagttcaataacacaaggaaacaaccagataatgtacataacaaacaaaaaatatttcatatccctacttcagatatttcagcgtatacaaaaaaaactcctacttcagctgtgacgcaatggatgccctgtcaaaaagtattttcaataatcagtggcatcatacacaatgaaaaaactacaagaacggtcatcagcctaaacctttcaaaataaccaccaaacaaatagtactgtcatcgacattgtacagaagaatctacatgtaacatgtacacccataagacaagaaaaaacataacattg

SEQ ID NO: 71604 - DNA, 959 bp, Zea Mays
attaactcaagttatggtgatttagacctcacaacacaattagtaagttttggtatctagatgtacattttaagtttggggacgtaggtgacactccaaggtacaagaatatgtcgaagctgcaacactctgtagattttgcaagactggcactctattaagccttgctgaaatcaatgattctttactagcactaagtggtcaatctgttgagcccttacagttaaatgtgcttgactatcttttaggggttgctgatttgtccggagagcttatgaggctcgcaataggccgtatatctgatggggaagttgaatatgcaaaaactatctgtgcttttgtgcgggatatttacagggagctgacccttgtggtgcctttaatggatgacaatagtgagatgaagaagaaaatggaggtcatgctgcaaagtgtagtaaaaattgagaatgcttgcttcagtgttcatgtgagaggttcagagtacattcctctgctagaatcatcagcagatccaggctattcttattttggtgccccggactttgatcaatgaatgttttgaagcaagaactaactgagtgttaaaggagcttagatcaatttaaggagagcggttgtgtcaaggctactcttaggtccacagttgggtgtttgattttatcgccagtttatgttgcacatcttgaagtctgtaaatctaagccccaacgtggtaatccgggagaatcatgttgcaatacaacctttttatggtgcagacttgtaatactcaaattgtaagggagaattaaaggaggaattgtctcctttgaatgtgtgtgtgcatctccatttatcatcacatgtgactgaccatgtttaaaaaaatgagtaaatccttaataagaaacaattaaatcattgcatcatattggattttgtttgtgcattgaaatataataaaagtataaaagtga

SEQ ID NO: 71605 - DNA, 2040 bp, Zea Mays
gacgctcgcgggtgcgaacacgtggccaatctctatggccactccggacctcaaaccttcatctaaattccctatgagctgagcgttcgattccgctttgtctcggcctctctctcccgtagtgcttctcctctacctccgccgccagcccgccactgcctcgattcgctcccctccggccctcccgttgcgcgcgctctgcctcgctggccccacggtcgcccgcgccggcaggctcgctgataggctcgagtccctcgacgccatcgcctagattgtttactagctaccccccccccccccccccccccgctcgccgcgaggtggtgcctgcggaggtggcggcgatcgtgcctgcatggtgctcgacaacaaggtgctctacgagacgacatctgcttccgtgcgcacaagctcaccatgcgcagcttcggtgacgtttagccacctcatctccgccaccatgagcggcgtcacctgctgcctttgcttctccggtcagctcaactccgatctccgtaggctagccgtcaacctgaccccattcccgcgcctgcacttcttcatgatatgggacgccaagaacatgatatgcgtcgtggacccgtgccacggtcgctacctgacggcgtccgccatgttctgcgccaagatgagcagcagggaggtggacgagcagatgcttaacgtgccaaacaatgactcctacttcggactcgatctccaacaacgttcagtccacggatgtgcctcttttgggagtgaattatacttttactcaattaggatattgtgtttctttggatctttgtttgattaatgattttttggatgagagtgtggctacaggatgaagcaatgcagttttttatggaacacacatgtgcagtatacaaatggaccatcaggttgcgggtatgttttttagacaaattattccattttttctattttgttgttccatcgagtctaattggattgggaatgcacatgctaactataccactagaacattagatcatgttgtttttggacaaataattttatttttccgttccaaatttctcccattaagtctaactggattcaagtgtgatattagaaatcaccaagggacaaatcatggtggcatttgaggttgttctttctaactgtcatgttatttttgttgggacttcattataaagattgatgtttcataatgattttcaatattggtccactctgtttaagtactaaagatgaattaacaattttagttgtcttgatgtcatctttctatagcctaatactatttccctcttttgtatcgaactagagcaaaatagcacccctacttattatagaatagactccatagcttcgccataatttgcatctatgcaaaaatgattgtttgtatgtttcagggaagaaatttctagctttatttacttttatcaaaacaattagtataagtatcacatcgtactgaataaaacctgctgcatttgccaagaacctgcaactttgaaagtgctaaggatatacccatgttcatttctgctaaaaattagcttcatatgcatcattgaaacttcataaatcaattcatcatctacaaccattcagcacacccttgccaacattcatgacacagaaagttagtgtagaaatatatggcagggctagagcatttcagttatactaccaggtacaaatacacaattattttctcttgtcactaacatgtgttacagaacattaaccatttattttactttacaatattttcttatgcacgatatctttgacgctgctggatggctcgcatgctcaatttacatgcattagaaattttttagtgcattccaattctatcaacctacagagcattccattaatccaaccttattccagagtagttctgtgcactttaaagccgaacgtttgtggatccagaaagaagaaaattttgtatgtatatatgtgtagatccagtgacactatctgacgcttgtaatgttgcttggtcatgaactgttgtcgcgctatgtaaag

SEQ ID NO: 71606 - DNA, 1969 bp, Zea Mays
gacgctcgcgggtgcgaacacgtggccaatctctatggccactccggacctcaaaccttcatctaaattccctatgagctgagcgttcgattccgctttgtctcggcctctctctcccgtagtgcttctcctctacctccgccgccagcccgccactgcctcgattcgctcccctccggccctcccgttgcgcgcgctctgcctcgctggccccacggtcgcccgcgccggcaggctcgctgataggctcgagtccctcgacgccatcgcctagattgtttactagctaccccccccccccccccccccccgctcgccgcgaggtggtgcctgcggaggtggcggcgatcgtgcctgcatggtgctcgacaacaaggtgctctacgagacgacatctgcttccgtgcgcacaagctcaccatgcgcagcttcggtgacgtttagccacctcatctccgccaccatgagcggcgtcacctgctgcctttgcttctccgatatgggacgccaagaacatgatatgcgtcgtggacccgtgccacggtcgctacctgacggcgtccgccatgttctgcgccaagatgagcagcagggaggtggacgagcagatgcttaacgtgccaaacaatgactcctacttcggactcgatctccaacaacgttcagtccacggatgtgcctcttttgggagtgaattatacttttactcaattaggatattgtgtttctttggatctttgtttgattaatgattttttggatgagagtgtggctacaggatgaagcaatgcagttttttatggaacacacatgtgcagtatacaaatggaccatcaggttgcgggtatgttttttagacaaattattccattttttctattttgttgttccatcgagtctaattggattgggaatgcacatgctaactataccactagaacattagatcatgttgtttttggacaaataattttatttttccgttccaaatttctcccattaagtctaactggattcaagtgtgatattagaaatcaccaagggacaaatcatggtggcatttgaggttgttctttctaactgtcatgttatttttgttgggacttcattataaagattgatgtttcataatgattttcaatattggtccactctgtttaagtactaaagatgaattaacaattttagttgtcttgatgtcatctttctatagcctaatactatttccctcttttgtatcgaactagagcaaaatagcacccctacttattatagaatagactccatagcttcgccataatttgcatctatgcaaaaatgattgtttgtatgtttcagggaagaaatttctagctttatttacttttatcaaaacaattagtataagtatcacatcgtactgaataaaacctgctgcatttgccaagaacctgcaactttgaaagtgctaaggatatacccatgttcatttctgctaaaaattagcttcatatgcatcattgaaacttcataaatcaattcatcatctacaaccattcagcacacccttgccaacattcatgacacagaaagttagtgtagaaatatatggcagggctagagcatttcagttatactaccaggtacaaatacacaattattttctcttgtcactaacatgtgttacagaacattaaccatttattttactttacaatattttcttatgcacgatatctttgacgctgctggatggctcgcatgctcaatttacatgcattagaaattttttagtgcattccaattctatcaacctacagagcattccattaatccaaccttattccagagtagttctgtgcactttaaagccgaacgtttgtggatccagaaagaagaaaattttgtatgtatatatgtgtagatccagtgacactatctgacgcttgtaatgttgcttggtcatgaactgttgtcgcgctatgtaaag

SEQ ID NO: 71607 - DNA, 695 bp, Zea Mays
gcgatcgtgcctgcatggtgctcgacaacaaggtgctctacgagacgacatctgcttccgtgcgcacaagctcaccatgcgcagcttcggtgacgtttagccacctcatctccgccaccatgagcggcgtcacctgctgcctttgcttctccggtcagctcaactccgatctccgtaggctagccgtcaacctgaccccattcccgcgcctgcacttcttcatggtcggcttcgcgccgctcaccttccgggggctcctagcaataccacgtcctgactgtgccagaactcccaaaatagatatgggacgccaagaacatgatatgcgtcgtggacccgtgccacggtcgctacctgacggcgtccgccatgttctgcgccaagatgagcagcagggaggtggacgagcagatgcttaacgtgccaaacaatgactcctacttcggactcgatctccaacaacgttcagtccacggatgtgcctcttttgggagtgaattatacttttactcaattaggatattgtgtttctttggatctttgtttgattaatgattttttggatgagagtgtggctacaggatgaagcaatgcagttttttatggaacacacatgtgcagtatacaaatggaccatcaggttgcggagcattccattaatccaaccttattccagagtagttctgtgcacttta

SEQ ID NO: 71608 - DNA, 116 bp, Zea Mays
tgcatccaaaatctagtgggcaaaccaccgccacgggttgacttttgctcttccaacattttttttccgtgtttaagcatccatatttgtacatggcgactattgcaaccggtaaa

SEQ ID NO: 71609 - DNA, 1399 bp, Zea Mays
cgcggcggagacgtagggcgggtcgtcgtcggccgagttgcgccggctcccccgcccgcggtacgtggtcgggtacgaggacgacgccgcgaagctctccaggtcgaacaggtccgagctcgcgtcgctcatcgcctcctcgtccaccagcgccgccggcggagcgcgcgggggtagcccgacacggggcacggcggcggcggcgagcggagggtccgcgggcatcaccgagtcctcgtcgatcgggcggaacacctccaacgacacgcgcggtggctcgtccaagatgccggcgctgaggctgagctccgggaacgtgaacccgccggagctccggacgcggcgaccggtgtcgggattggtgtaagcggtgaacggcacgtcggcgctccggttcggcgccgccgccgccgcgaaggcgttgtcggcggcgagagggaacgcgcggctccccggcgttaccgtgaccgtgaccgtcagcttggcgggaggctcgggctcctcggtcgcggtcggagacgggtctttcgccttgaagatggcgctctccagacactcctccacggcacactgcgggctgaacttggcgtgggaatgcgccgccgtcgcggggctcctcggctcggacgcgatgccgacggtgaccgccttcctgccggcgcaggggcagtcgcggccgaacagcgtccagcgctgggcagagccaccgccggcggtcctcctgccgcggtaaccctgatcgctgccagcgtcagcgctccccgtctgctgctgcctggcagcggccaggtgtccggcagacagcaggccggagcggctgttccagctggcctccgacgacgcggcggtgcggccactgtggctggccacgtccgccaccgatgatgggacggacagcgtcggcaggtcgcggtcgtggtcagggagcgcgggcgcggcggggatcatggcgtcgcgcctgccggtgtcgcccgcgctgaagtagcgctcggccgtgaagatgccgatctcggcgacgctcgagcgtcgcgccgactgcgccgccgcgcggaggtggaccccggggccggcggcggagaggcagaccggccgcgccggcgcgatcctgtacctgtccatgcggctgcgtctctctctctcgtttgtctcgcaggcgcagctgagagtgaggtgaggcactgtgcgtgatgagacggaggaaggacacggagacgggcgcgtgatttgtaggagcaggagcgcgggtggagccaagcgagtacagactggaggacggggatcggcgagtgtaagcgtccgtgccgcgggaaattcctttctaaaagcgtgtggttctggtcgcgcggcagcaggcactgtattccaggcatgcacgaacctagttttccaacaacatgat

SEQ ID NO: 71610 - DNA, 2142 bp, Zea Mays
gcggtagagatgggagatgctctcagtgcaattcgatctgaatgcccctcgtgacctaccgctaccaggccctcaaggaatccctcgccgccgccatcacctcctccccgcacgccgccgaccctcgacgaccccacgcgctcgccgtcgtctctggtctcgccgccaatggctacctcgcgtccctcctcgtcgcccgctacgcccgcctcggcgaacccgatgccgcgcgcggggtcttcgacgccgccgcctcctccccctacgcgacgccgcccaagccgctcctctacaacgccatgctccgtggctacctctccctgggcctcccgcgcgaggccgttgcgctcctccgcgccatgcttgcgtccggctcctgcgcgcccgaccgccacacgtaccacctcgccgccacggcctgcgcgcgcgccccggaccttggcctaggccgccgcttcgaggctgccgccgcggcatgtgggctcgcggcgtccgacctcctggtggccactgcactcatcgggatgcatgccgaggccggggacatgggcgccgcgcgcagggtgttcgacggaatgccttgccgggacgctgtggcgtggaacgccgtgattggtgggtatgcgcgcgcggggcacctgtctgaggctgtggagctgtttggcatgatgaggtctgcggttggagcgtgcccaactgaggccacgcttgtgagcttggtttctggttatgccgtgttcggttcttggaagggccatggcatgatgcacgccgctgtgattaagtctggcttccagcgcagcctcttcgtttccaatgctctcctggagatgtacacagagttgggttgtttgagtgaggcattgttggtgttccggcagatggaggtgaaggattctgtgacttggagttcgatgattggtggacttgtgcggagtaacaaaccgggttatgctgttaggcttttccactggatgctctcgaaatcggaggtgttggtcacacggtctatcttgctcaatgtgatcttggcctgctccgagttgggggactggagagaaggaaaatggattgaagaaaactttgtcatgtgtaatggcagtgaattcaagagagatccctctgtagtaaccagactgatatatatgtacgcaaagtgtggacagttaggttcgtctgagactcttctacatgaatccacagaggttagatgcgatgtggttgcatggaatgccctgatcaaagcctgtggagagcttggactagtggaaaaagcaatcgggtttgcgatacaaatgcataggacaggcatttacccagacaacgttacattcttggagattctacatatgatctcattaattccatcactgaaaaaggggatggaagttcatgctcacattgttaaaagaggtttccagaatgaacgggcgattgctaattcacttatttacatgtttatgcatggagtggacttgcaccagaagttgttaagctttttgagatgatgaagaaaacaaaagtacaacccaaccactacactttaattgctgtgttgactgcctataaaaacacaggtcttgttgaggagggaatgggcctgcttaagtgcatgaaagagcagtatggtctggagccatttatagagcatgtttcatgtgttgttgatatgctctgtcgtactggacgcttgagtgatgcatatcacctgatccagagttcccactctgaacatgcaagaaaccctaaattgtgggggacattactaagtggttcccgttactggggggatttggtgattggagaagcagcagctaggcatctctcgtctttggatccaggaagcaacgctaactataagatgctggctgatatttatgtttcaactgggagaagggacagagctgaggatgttctgagaatgtcgatgtcaaaagaactggacttgagaccaggctgtagctggactgaaggtggctaaagattgcaatacatgctagaagtagaggactagagtgtataattttagtatgcttgcatgttctttaaaaaatgattacatcaataagcgtgaatcaacatttgaatctcatttgggatttcttgtactatataaagatcaattgtattaatattaagcga

SEQ ID NO: 71611 - DNA, 3863 bp, Zea Mays
cgcccccgctcgtgatgcccgtcccgcctccccgctgtggcagccgccttcgcgtccgtcgatccctccgtgcacagatgcgccccaaatcgcgcctcccccaccgcgctccgtgaaatccgccctcctcaacctccccgccacccagaactccctcgcacctcatccttcgcgcgatgctcgccgatgtgccgccttcaaacatcgtcgtcgtcacctcctccccctttcctaggagggcatcctcgccgatgtgtcgccttccaacatcgacaccaccgcgtccccgcaccaccctcccccgtgtgcgtccctggccccctgagctcgcgcaggccggaggaccgcgctcgcccacctgaagattgctccctcccccaaggagctggcggcgacgcggctgcgtcaggagatttgggtccaacttcacatcttattcctcttcagttctcggcagctttggaattgctcagctcagcttttcgacgccgagtctatagctgctgctcaccactgccctcggtgtctgtagtctgtccatggaatgctttcatactgcttgctactcgcagtgtcgtgctgtgcatgcctgccttcgaggcaacaaccaccgtgcatacattgtccgggtcgggctggtatcctttgctgctacttgctgatgctgataagaagaactgcagcttttatcaccccggccgaaaagtcgtctcttgactcgttcgcgctagcttcaaagatagagctaagcaggcgaggcctagaccgtccatgatggcgacaggagctcgacttcgagcgggcctccccagagatgatgctcctccgcagcaggaaatggtagcagcaaacggaacgggccaaccgcagctggtggtggacgaacacaagacgattcttgaagaggtccccagagaagaaaatggcaccctttctgccgccaattatgctgctcaaggtcatgagaatgttgccgctgagtactacaaacaacaggaagaacaggaaaaagttgtcaggagtgaatcattagccatatggctgtctaatatcgcaaatatggttctctttgctgcaaaagtgtatgcttcaacttgttgtcatgatatatcttgtggtttactgccttttcaatgcaaacgccaaatccctatagaaacccaattggaaaagcgtatgcagccactgaaccagggaatgcaagttgggattgcttggctggtcatacgaggtttgatctgttctgggtttcatgtaggaatcaaggaactagctgaggtctccttccctcaagatgacaaacaaacagaaaaaactaccctcaaggtgacctaaacacaaagggagctacataataccctacaagactagaccagccgacccccttccatcctcagtgccctcctaccattggcggcatgggatctcggtgatggaagggcaggggcagcacaggatctactgcattttttacaacgcagtggcagacattggagacgggttcgtgtgggatgccgactcctagctctactgccacgccaggtagctgcttcctttctctctacgtgatgtagcgttccgctgattgggcaccgcagacggtctgtggttgtggatgggattatcgttttggcagaaagctggttgaagctcgtgatgaactaatgaaaggaaggtttgccgcttgcatgcgacctgtcccccctttctgttcaaaggcgttcgacaccccaccaggccgaggatgccgtgatctcctgtgcagcgcggacaatgcatgcaaccaacaccgtgggtgtgtgggtgttatagccattggattatcggattgctgctatgccgtgttttggtgtcaaattaaaactgtctttcttgcataaaaacagcttgccggttctaactcaacggggtgaaccacgtatatattctcgtgtaaggagggtgaataaactaattccctatttggatcctcctgtccacgaagccaggcaacaaagtcattaatgtcagcaccactgatcatcatctaactacattagtttacaggggttcgaaaaattttataggggtgagctgaccccaataagaacatgtagctccacccctgctcctagctaactgtttggcagtggctaacaattagtcgacaaatattaagctgacaaacaatttactgggacttgttttaattattgtctaatagacgtataaaattaaagtatagtagatagtttgttttatccctgcaagacaaacaatagtagcatatttttctttctcttctatctgctaatagttttcttttcttcagacactcttcccatatgaactttttgtgaagctctatagcaaggttgagttgcacccttttggtcttcataaccttggtaacaggccaatttatgctgggaatgcactttgtactgtgaaatataccgacgaggatccttgcatgatgagtattagatcaacttcattttcccctactgctgatgctatgtctgaaacaaaggttgcacctatcacccaggttgatctctctttcctcagtgaagggaaatctacatgggtgaatctgacatcccaagacacaaagcggcatgatcttgcaaatgcatgtgtagtagtcacaggaggcagaggtttaagaagtgctgaaaattttaagttgttggagcagcttgcggagaaatttggtgcagcagcgggcgcgactagggctgctgttgaagcaggttatgttccaaatgaccttcagagttgcaggagaaggctgcagcagcttgaatctcagctaatggaagcgaacagaatcaaagaggaaggcaacactggaagtatccgatggaaggagaacatattagaccaagagaatgaattacagaacataaaacaagagaacgacgacctgcagacaaaggaatcagcggcttctgagaagattaaggaactctcttcccagcttactaatgcaaaatatggcatgataaatagtaacaccaaggagataatgagaaggggggcactgaagaggacgatgaacctgttgtagtagttgccaaaatatgggagaacaacaagtttgttgactatgattcatctaaggagaaggagaatgatggtgactcacaggttgatttggaatcaaacaagggggatgcaggtcttgatagcaacgggttgcactcaactaaggagaacagtggcagggcatcaccaactaaacaacaccagcagtataagaagaagtctctgctgaagagattcggtggtctgctaaaaaagaaaagcgaaaattagcataaaactgtctgatgatattctttgttctatcatttgacatattttttgtaaaccctctcagagatgctgaaagccaacttactattgagagtactatgaaacctctcgcgcagtgtgaaataaatgacagaaatgaagtgtgtgttggtgttggtgctggtgctggagacactaacataaccggtggtattatccaattgtattggagttctattcttgaaaggtgcttggatacaaacgatcaaagcttgaaggaggcttgagtcaattgaatcatctgtaagtaatttagaagaaatattgtttttgttggtgaagcgagtttgttctttcctttgggctctatttatttatgaattgataacccaacaggattgtagtttgtagccatttagatttgaatccgagctatgactgagacgaatacaacatatgcattttgtagccatgtatatctgaatcagagctctgtgattgagatgaatatggttttatgtgccgtcgcaacacactgacattgtactatggtattataagtatcaatatgaagtatttctttg

SEQ ID NO: 71612 - DNA, 3628 bp, Zea Mays
ctcgtgatgcccgtcccgcctccccgctgtggcagccgccttcgcgtccgtcgatccctccgtgcacagatgcgccccaaatcgcgcctcccccaccgcgctccgtgaaatccgccctcctcaacctccccgccacccagaactccctcgcacctcatccttcgcgcgatgctcgccgatgtgccgccttcaaacatcgtcgtcgtcacctcctccccctttcctaggagggcatcctcgccgatgtgtcgccttccaacatcgacaccaccgcgtccccgcaccaccctcccccgtgtgcgtccctggccccctgagctcgcgcaggccggaggaccgcgctcgcccacctgaagattgctccctcccccaaggagctggcggcgacgcggctgcgtcaggagatttgggtccaacttcacatcttattcctcttcagttctcggcagctttggaattgctcagctcagcttttcgacgccgagtctatagctgctgctcaccactgccctcggtgtctgtagtctgtccatggaatgctttcatactgcttgctactcgcagtgtcgtgctgtgcatgcctgccttcgaggcaacaaccaccgtgcatacattgtccgggtcgggctggtatcctttgctgctacttgctgatgctgataagaagaactgcagcttttatcaccccggccgaaaagtcgtctcttgactcgttcgcgctagcttcaaagatagagctaagcaggcgaggcctagaccgtccatgatggcgacaggagctcgacttcgagcgggcctccccagagatggtagccagatccggccattgagccccccctaaccgagcggatccaagatgctcctccgcagcaggaaatggtagcagcaaacggaacgggccaaccgcagctggtggtggacgaacacaagacgattcttgaagaggtccccagagaagaaaatggcaccctttctgccgccaattatgctggctgtcggccccaaattatggtacagcgcatacggaggctaaccttccattggcagcgcacagatcatccggggcggacctataagatgtcaagtgtgtacgccccaacaacccacagatgcggctcgacgctctccatctgcatgtctctttaattatctctatatatatggatagacgacaaccttctatctatgaattatatgtcatgtctctttaattatctctatatcaatgtctacctatgtgatataagataccgtagcaacgcacgtgcacctaattagtgaatttggaagtgtgactttataaaaaaaatgagttatatgttcaagataatgttagtagtcatactatttaaagtccttttactttcttatttggatgagtcttttttcacatatcttccttcttaatgtaccattcatggttctattgatagctcaaggtcatgagaatgttgccgctgagtactacaaacaacaggtggagatgttagagggtttttagtgagatggacgcatttacatatcgtgcttttcctacctgtaatgtccaaggtatgctatatatggactttctgtttgaacattagggaaggtaacttatgtggatgttaataatcaaattttcttcactatattttttcttctttttaatagtgacgacatcaatagatatctggccactttattgacctgcaggaagaacaggaaaaagttgtcaggagtgaatcattagccatatggctgtctaatatcgcaaatatggttctctttgctgcaaaagtaaacccaattggaaaagcgtatgcagccactggaatcaaggaactagctgaggtctccttccctcaagatgacaaacaaacagaaaaaactaccctcaaggtgacctaaacacaaagggagctacataataccctacaagactagaccagtgccctcctaccattggcggcatgggatctcggtgatggaagggcaggggcagcacaggatctactgcattttttacaacgcagtggcagacattggagacgggttcgtgtgggatgccgactcctagctctactgccacgccagacactcttcccatatgaactttttgtgaagctctatagcaaggttgagttgcacccttttggtcttcataaccttggtaacaggccaatttatgctgggaatgcactttgtactgtgaaatataccgacgaggatccttgcatgatgagtattagatcaacttcattttcccctactgctgatgctatgtctgaaacaaaggttgcacctatcacccaggttgatctctctttcctcagtgaagggaaatctacatgggtgaatctgacatcccaagacacaaagcggcatgatcttgcaaatgcatgtgtagtagtcacaggaggcagaggtttaagaagtgctgaaaattttaagttgttggagcagcttgcggagaaatttggtgcagcagcgggcgcgactagggctgctgttgaagcaggttatgttccaaatgaccttcagagttgcaggagaaggctgcagcagcttgaatctcagctaatggaagcgaacagaatcaaagaggaaggcaacactggaagtatccgatggaaggagaacatattagaccaagagaatgaattacagaacataaaacaagagaacgacgacctgcagacaaaggaatcagcggcttctgagaagattaaggaactctcttcccagcttactaatgcaaaatatggcatgataaatagtaacaccaaggagataatgagaaggggggcactgaagaggacgatgaacctgttgtagtagttgccaaaatatgggagaacaacaagtttgttgactatgattcatctaaggagaaggagaatgatggtgactcacaggttgatttggaatcaaacaagggggatgcaggtcttgatagcaacgggttgcactcaactaaggagaacagtggcagggcatcaccaactaaacaacaccagcagtataagaagaagtctctgctgaagagattcggtggtctgctaaaaaagaaaagcgaaaattagcataaaactgtctgatgatattctttgttctatcatttgacatattttttgtaaaccctctcagagatgctgaaagccaacttactattgagagtactatgaaacctctcgcgcagtgtgaaataaatgacagaaatgaagtgtgtgttggtgttggtgctggtgctggagacactaacataaccggtggtattatccaattgtattggagttctattcttgaaaggtgcttggatacaaacgatcaaagcttgaaggaggcttgagtcaattgaatcatctgtaagtaatttagaagaaatattgtttttgttggtgaagcgagtttgttctttcctttgggctctatttatttatgaattgataacccaacaggattgtagtttgtagccatttagatttgaatccgagctatgactgagacgaatacaacatatgcattttgtagccatgtatatctgaatcagagctctgtgattgagatgaatatggttttatgtgccgtcgcaacacactgacattgtactatggtattataagtatcaatatgaagtatttctttg

SEQ ID NO: 71613 - DNA, 4643 bp, Zea Mays
ctcgtgatgcccgtcccgcctccccgctgtggcagccgccttcgcgtccgtcgatccctccgtgcacagatgcgccccaaatcgcgcctcccccaccgcgctccgtgaaatccgccctcctcaacctccccgccacccagaactccctcgcacctcatccttcgcgcgatgctcgccgatgtgccgccttcaaacatcgtcgtcgtcacctcctccccctttcctaggagggcatcctcgccgatgtgtcgccttccaacatcgacaccaccgcgtccccgcaccaccctcccccgtgtgcgtccctggccccctgagctcgcgcaggccggaggaccgcgctcgcccacctgaagattgctccctcccccaaggagctggcggcgacgcggctgcgtcaggagatttgggtccaacttcacatcttattcctcttcagttctcggcagctttggaattgctcagctcagcttttcgacgccgagtctatagctgctgctcaccactgccctcggtgtctgtagtctgtccatggaatgctttcatactgcttgctactcgcagtgtcgtgctgtgcatgcctgccttcgaggcaacaaccaccgtgcatacattgtccgggtcgggctggtatcctttgctgctacttgctgatgctgataagaagaactgcagcttttatcaccccggccgaaaagtcgtctcttgactcgttcgcgctagcttcaaagatagagctaagcaggcgaggcctagaccgtccatgatggcgacaggagctcgacttcgagcgggcctccccagagatggtagccagatccggccattgagccccccctaaccgagcggatccaagatgctcctccgcagcaggaaatggtagcagcaaacggaacgggccaaccgcagctggtggtggacgaacacaagacgattcttgaagaggtccccagagaagaaaatggcaccctttctgccgccaattatgctggctgtcggccccaaattatggtacagcgcatacggaggctaaccttccattggcagcgcacagatcatccggggcggacctataagatgtcaagtgtgtacgccccaacaacccacagatgcggctcgacgctctccatctgcatgtctctttaattatctctatatatatggatagacgacaaccttctatctatgaattatatgtcatgtctctttaattatctctatatcaatgtctacctatgtgatataagataccgtagcaacgcacgtgcacctaattagtgaatttggaagtgtgactttataaaaaaaatgagttatatgttcaagataatgttagtagtcatactatttaaagtccttttactttcttatttggatgagtcttttttcacatatcttccttcttaatgtaccattcatggttctattgatagctcaaggtcatgagaatgttgccgctgagtactacaaacaacaggtggagatgttagagggtttttagtgagatggacgcatttacatatcgtgcttttcctacctgtaatgtccaaggtatgctatatatggactttctgtttgaacattagggaaggtaacttatgtggatgttaataatcaaattttcttcactatattttttcttctttttaatagtgacgacatcaatagatatctggccactttattgacctgcaggaagaacaggaaaaagttgtcaggagtgaatcattagccatatggctgtctaatatcgcaaatatggttctctttgctgcaaaagtgtatgcttcaaaacccaattggaaaagcgtatgcagccactgaaccagggaatgcaagttgggattgcttggctggtcatacgaggtttgatctgttctgggtttcatgtaggaatcaaggaactagctgaggtctccttccctcaagatgacaaacaaacagaaaaaactaccctcaaggtgacctaaacacaaagggagctacataataccctacaagactagaccagccgacccccttccatcctcagtgccctcctaccattggcggcatgggatctcggtgatggaagggcaggggcagcacaggatctactgcattttttacaacgcagtggcagacattggagacgggttcgtgtgggatgccgactcctagctctactgccacgccagacactcttcccatatgaactttttgtgaagctctatagcaaggttgagttgcacccttttggtcttcataaccttggtaacaggtaaaagtaagagtaggaaggtcaactggcatgcatacatgtgcttgctcattatggttttatgctattggtctgggcctttgtaagatcttaagtagaagggcaggcatggtgcaatggtgagagttgtctcattgagccaccaggtcgcgggtttgaattagcctctccgcatttcaggaggaaggcttgcctcggtttatctcttccccggaccccactcatgtggttgcctccggcactggatctgccttttgtaagatcttaggtgtatgctcctagaatatgtgtgatttacttccattaaagtatgctttgtgcatattaattagaggatgacgttttggacctagacaaaataaaagtcggacggccactgtcaagcattctccaaattcgttgcttattgtgacgtgtgtgtgcttgagttaacaactaataccatccccaactcatcctcatccatatagaattgcttgaaagcatgtgagtcttcctcaaatcacatgcacccaccatatgtattagtttatgggtgttaaaaagcatgagcctaaagattggattccatagaatggtcacatctggccattcaaataagtccataacttccttttgtgatgtttgcttttgttggagcttcatgtttgaattgatgtatgtatctgactttaggccaatttatgctgggaatgcactttgtactgtgaaatataccgacgaggatccttgcatgatgagtattagatcaacttcattttcccctactgctgatgctatgtctgaaacaaaggttgcacctatcacccaggttgatctctctttcctcagtgaaggtttgtttggttccttcaccatgttattttgttaagaatcagcagtgcttcagaactactcttatttgttttgttgctctaataattgcacaaaacttttactaattgaggatcactagatttattttcctattcacaactttctataacttttataatgttgaaacaggctgcaagggaaaaaatacccctcttacttgatttattattttggcacccgtgaatagtaccttttttcaaaccttagggaaatctacatgggtgaatctgacatcccaagacacaaagcggcatgatcttgcaaatgcatgtgtagtagtcacaggaggcagaggtttaagaagtgctgaaaattttaagttgttggagcagcttgcggagaaatttggtgcagcagcgggcgcgactagggctgctgttgaagcaggttatgttccaaatgaccttcaggagaaggctgcagcagcttgaatctcagctaatggaagcgaacagaatcaaagaggaaggcaacactggaagtatccgatggaaggagaacatattagaccaagagaatgaattacagaacataaaacaagagaacgacgacctgcagacaaaggaatcagcggcttctgagaagattaaggaactctcttcccagcttactaatgcaaaatatggcatgataaatagtaacaccaaggagataatgagaaggggggcactgaagaggacgatgaacctgttgtagtagttgccaaaatatgggagaacaacaagtttgttgactatgattcatctaaggagaaggagaatgatggtgactcacaggttgatttggaatcaaacaagggggatgcaggtcttgatagcaacgggttgcactcaactaaggagaacagtggcagggcatcaccaactaaacaacaccagcagtataagaagaagtctctgctgaagagattcggtggtctgctaaaaaagaaaagcgaaaattagcataaaactgtctgatgatattctttgttctatcatttgacatattttttgtaaaccctctcagagatgctgaaagccaacttactattgagagtactatgaaacctctcgcgcagtgtgaaataaatgacagaaatgaagtgtgtgttggtgttggtgctggtgctggagacactaacataaccggtggtattatccaattgtattggagttctattcttgaaaggtgcttggatacaaacgatcaaagcttgaaggaggcttgagtcaattgaatcatctgtaagtaatttagaagaaatattgtttttgttggtgaagcgagtttgttctttcctttgggctctatttatttatgaattgataacccaacaggattgtagtttgtagccatttagatttgaatccgagctatgactgagacgaatacaacatatgcattttgtagccatgtatatctgaatcagagctctgtgattgagatgaatatggttttatgtgccgtcgcaacacactgacattgtactatggtattataagtatcaatatgaagtatttctttg

SEQ ID NO: 71614 - DNA, 3014 bp, Zea Mays
ctcgtgatgcccgtcccgcctccccgctgtggcagccgccttcgcgtccgtcgatccctccgtgcacagatgcgccccaaatcgcgcctcccccaccgcgctccgtgaaatccgccctcctcaacctccccgccacccagaactccctcgcacctcatccttcgcgcgatgctcgccgatgtgccgccttcaaacatcgtcgtcgtcacctcctccccctttcctaggagggcatcctcgccgatgtgtcgccttccaacatcgacaccaccgcgtccccgcaccaccctcccccgtgtgcgtccctggccccctgagctcgcgcaggccggaggaccgcgctcgcccacctgaagattgctccctcccccaaggagctggcggcgacgcggctgcgtcaggagatttgggtccaacttcacatcttattcctcttcagttctcggcagctttggaattgctcagctcagcttttcgacgccgagtctatagctgctgctcaccactgccctcggtgtctgtagtctgtccatggaatgctttcatactgcttgctactcgcagtgtcgtgctgtgcatgcctgccttcgaggcaacaaccaccgtgcatacattgtccgggtcgggctggtatcctttgctgctacttgctgatgctgataagaagaactgcagcttttatcaccccggccgaaaagtcgtctcttgactcgttcgcgctagcttcaaagatagagctaagcaggcgaggcctagaccgtccatgatggcgacaggagctcgacttcgagcgggcctccccagagatgatgctcctccgcagcaggaaatggtagcagcaaacggaacgggccaaccgcagctggtggtggacgaacacaagacgattcttgaagaggtccccagagaagaaaatggcaccctttctgccgccaattatgctgctcaaggtcatgagaatgttgccgctgagtactacaaacaacaggaagaacaggaaaaagttgtcaggagtgaatcattagccatatggctgtctaatatcgcaaatatggttctctttgctgcaaaagtgtatgcttcaacttgttgtcatgatatatcttgtggtttactgccttttcaatgcaaacgccaaatccctatagaaacccaattggaaaagcgtatgcagccactggaatcaaggaactagctgaggtctccttccctcaagatgacaaacaaacagaaaaaactaccctcaagcacggtgcaccgccgttctgtatgtcgctggctatgctaattgtgcagccgacccccttccatcctcagtgccctcctaccattggcggcatgggatctcggtgatggaagggcaggggcagcacaggatctactgcattttttacaacgcagtggcagacattggagacgggttcgtgtgggatgccgactcctagctctactgccacgccagacactcttcccatatgaactttttgtgaagctctatagcaaggttgagttgcacccttttggtcttcataaccttggtaacaggccaatttatgctgggaatgcactttgtactgtgaaatataccgacgaggatccttgcatgatgagtattagatcaacttcattttcccctactgctgatgctatgtctgaaacaaaggttgcacctatcacccaggttgatctctctttcctcagtgaagggaaatctacatgggtgaatctgacatcccaagacacaaagcggcatgatcttgcaaatgcatgtgtagtagtcacaggaggcagaggtttaagaagtgctgaaaattttaagttgttggagcagcttgcggagaaatttggtgcagcagcgggcgcgactagggctgctgttgaagcaggttatgttccaaatgaccttcagagttgcaggagaaggctgcagcagcttgaatctcagctaatggaagcgaacagaatcaaagaggaaggcaacactggaagtatccgatggaaggagaacatattagaccaagagaatgaattacagaacataaaacaagagaacgacgacctgcagacaaaggaatcagcggcttctgagaagattaaggaactctcttcccagcttactaatgcaaaatatggcatgataaatagtaacaccaaggagataatgagaaggggggcactgaagaggacgatgaacctgttgtagtagttgccaaaatatgggagaacaacaagtttgttgactatgattcatctaaggagaaggagaatgatggtgactcacaggttgatttggaatcaaacaagggggatgcaggtcttgatagcaacgggttgcactcaactaaggagaacagtggcagggcatcaccaactaaacaacaccagcagtataagaagaagtctctgctgaagagattcggtggtctgctaaaaaagaaaagcgaaaattagcataaaactgtctgatgatattctttgttctatcatttgacatattttttgtaaaccctctcagagatgctgaaagccaacttactattgagagtactatgaaacctctcgcgcagtgtgaaataaatgacagaaatgaagtgtgtgttggtgttggtgctggtgctggagacactaacataaccggtggtattatccaattgtattggagttctattcttgaaaggtgcttggatacaaacgatcaaagcttgaaggaggcttgagtcaattgaatcatctgtaagtaatttagaagaaatattgtttttgttggtgaagcgagtttgttctttcctttgggctctatttatttatgaattgataacccaacaggattgtagtttgtagccatttagatttgaatccgagctatgactgagacgaatacaacatatgcattttgtagccatgtatatctgaatcagagctctgtgattgagatgaatatggttttatgtgccgtcgcaacacactgacattgtactatggtattataagtatcaatatgaagtatttctttg

SEQ ID NO: 71615 - DNA, 3484 bp, Zea Mays
ctcgtgatgcccgtcccgcctccccgctgtggcagccgccttcgcgtccgtcgatccctccgtgcacagatgcgccccaaatcgcgcctcccccaccgcgctccgtgaaatccgccctcctcaacctccccgccacccagaactccctcgcacctcatccttcgcgcgatgctcgccgatgtgccgccttcaaacatcgtcgtcgtcacctcctccccctttcctaggagggcatcctcgccgatgtgtcgccttccaacatcgacaccaccgcgtccccgcaccaccctcccccgtgtgcgtccctggccccctgagctcgcgcaggccggaggaccgcgctcgcccacctgaagattgctccctcccccaaggagctggcggcgacgcggctgcgtcaggagatttgggtccaacttcacatcttattcctcttcagttctcggcagctttggaattgctcagctcagcttttcgacgccgagtctatagctgctgctcaccactgccctcggtgtctgtagtctgtccatggaatgctttcatactgcttgctactcgcagtgtcgtgctgtgcatgcctgccttcgaggcaacaaccaccgtgcatacattgtccgggtcgggctggtatcctttgctgctacttgctgatgctgataagaagaactgcagcttttatcaccccggccgaaaagtcgtctcttgactcgttcgcgctagcttcaaagatagagctaagcaggcgaggcctagaccgtccatgatggcgacaggagctcgacttcgagcgggcctccccagagatggtagccagatccggccattgagccccccctaaccgagcggatccaagatgctcctccgcagcaggaaatggtagcagcaaacggaacgggccaaccgcagctggtggtggacgaacacaagacgattcttgaagaggtccccagagaagaaaatggcaccctttctgccgccaattatgctgctcaaggtcatgagaatgttgccgctgagtactacaaacaacaggaagaacaggaaaaagttgtcaggagtgaatcattagccatatggctgtctaatatcgcaaatatggttctctttgctgcaaaagtgtatgcttcaacttgttgtcatgatatatcttgtggtttactgccttttcaatgcaaacgccaaatccctatagaaacccaattggaaaagcgtatgcagccactgaaccagggaatgcaagttgggattgcttggctggtcatacgaggtttgatctgttctgggtttcatgtaggaatcaaggaactagctgaggtctccttccctcaagatgacaaacaaacagaaaaaactaccctcaaggtgacctaaacacaaagggagctacataataccctacaagactagaccagcacggtgcaccgccgttctgtatgtcgctggctatgctaattgtgcagccgacccccttccatcctcagtgccctcctaccattggcggcatgggatctcggtgatggaagggcaggggcagcacaggatctactgcattttttacaacgcagtggcagacattggagacgggttcgtgtgggatgccgactcctagctctactgccacgccagacactcttcccatatgaactttttgtgaagctctatagcaaggttgagttgcacccttttggtcttcataaccttggtaacaggccaatttatgctgggaatgcactttgtactgtgaaatataccgacgaggatccttgcatgatgagtattagatcaacttcattttcccctactgctgatgctatgtctgaaacaaaggttgcacctatcacccaggttgatctctctttcctcagtgaaggtttgtttggttccttcaccatgttattttgttaagaatcagcagtgcttcagaactactcttatttgttttgttgctctaataattgcacaaaacttttactaattgaggatcactagatttattttcctattcacaactttctataacttttataatgttgaaacaggctgcaagggaaaaaatacccctcttacttgatttattattttggcacccgtgaatagtaccttttttcaaaccttagggaaatctacatgggtgaatctgacatcccaagacacaaagcggcatgatcttgcaaatgcatgtgtagtagtcacaggaggcagaggtttaagaagtgctgaaaattttaagttgttggagcagcttgcggagaaatttggtgcagcagcgggcgcgactagggctgctgttgaagcaggttatgttccaaatgaccttcaggatcctcgccggtatatttttacaccatgcccacttttaagaaaatgaaaacacagagttgcaggagaaggctgcagcagcttgaatctcagctaatggaagcgaacagaatcaaagaggaaggcaacactggaagtatccgatggaaggagaacatattagaccaagagaatgaattacagaacataaaacaagagaacgacgacctgcagacaaaggaatcagcggcttctgagaagattaaggaactctcttcccagcttactaatgcaaaatatggcatgataaatagtaacaccaaggagataatgagaaggggggcactgaagaggacgatgaacctgttgtagtagttgccaaaatatgggagaacaacaagtttgttgactatgattcatctaaggagaaggagaatgatggtgactcacaggttgatttggaatcaaacaagggggatgcaggtcttgatagcaacgggttgcactcaactaaggagaacagtggcagggcatcaccaactaaacaacaccagcagtataagaagaagtctctgctgaagagattcggtggtctgctaaaaaagaaaagcgaaaattagcataaaactgtctgatgatattctttgttctatcatttgacatattttttgtaaaccctctcagagatgctgaaagccaacttactattgagagtactatgaaacctctcgcgcagtgtgaaataaatgacagaaatgaagtgtgtgttggtgttggtgctggtgctggagacactaacataaccggtggtattatccaattgtattggagttctattcttgaaaggtgcttggatacaaacgatcaaagcttgaaggaggcttgagtcaattgaatcatctgtaagtaatttagaagaaatattgtttttgttggtgaagcgagtttgttctttcctttgggctctatttatttatgaattgataacccaacaggattgtagtttgtagccatttagatttgaatccgagctatgactgagacgaatacaacatatgcattttgtagccatgtatatctgaatcagagctctgtgattgagatgaatatggttttatgtgccgtcgcaacacactgacattgtactatggtattataagtatcaatatgaagtatttctttg

SEQ ID NO: 71616 - DNA, 4047 bp, Zea Mays
ctcgtgatgcccgtcccgcctccccgctgtggcagccgccttcgcgtccgtcgatccctccgtgcacagatgcgccccaaatcgcgcctcccccaccgcgctccgtgaaatccgccctcctcaacctccccgccacccagaactccctcgcacctcatccttcgcgcgatgctcgccgatgtgccgccttcaaacatcgtcgtcgtcacctcctccccctttcctaggagggcatcctcgccgatgtgtcgccttccaacatcgacaccaccgcgtccccgcaccaccctcccccgtgtgcgtccctggccccctgagctcgcgcaggccggaggaccgcgctcgcccacctgaagattgctccctcccccaaggagctggcggcgacgcggctgcgtcaggagatttgggtccaacttcacatcttattcctcttcagttctcggcagctttggaattgctcagctcagcttttcgacgccgagtctatagctgctgctcaccactgccctcggtgtctgtagtctgtccatggaatgctttcatactgcttgctactcgcagtgtcgtgctgtgcatgcctgccttcgaggcaacaaccaccgtgcatacattgtccgggtcgggctggtatcctttgctgctacttgctgatgctgataagaagaactgcagcttttatcaccccggccgaaaagtcgtctcttgactcgttcgcgctagcttcaaagatagagctaagcaggcgaggcctagaccgtccatgatggcgacaggagctcgacttcgagcgggcctccccagagatggtagccagatccggccattgagccccccctaaccgagcggatccaagatgctcctccgcagcaggaaatggtagcagcaaacggaacgggccaaccgcagctggtggtggacgaacacaagacgattcttgaagaggtccccagagaagaaaatggcaccctttctgccgccaattatgctggctgtcggccccaaattatggtacagcgcatacggaggctaaccttccattggcagcgcacagatcatccggggcggacctataagatgtcaagtgtgtacgccccaacaacccacagatgcggctcgacgctctccatctgcatgtctctttaattatctctatatatatggatagacgacaaccttctatctatgaattatatgtcatgtctctttaattatctctatatcaatgtctacctatgtgatataagataccgtagcaacgcacgtgcacctaattagtgaatttggaagtgtgactttataaaaaaaatgagttatatgttcaagataatgttagtagtcatactatttaaagtccttttactttcttatttggatgagtcttttttcacatatcttccttcttaatgtaccattcatggttctattgatagctcaaggtcatgagaatgttgccgctgagtactacaaacaacaggtggagatgttagagggtttttagtgagatggacgcatttacatatcgtgcttttcctacctgtaatgtccaaggtatgctatatatggactttctgtttgaacattagggaaggtaacttatgtggatgttaataatcaaattttcttcactatattttttcttctttttaatagtgacgacatcaatagatatctggccactttattgacctgcaggaagaacaggaaaaagttgtcaggagtgaatcattagccatatggctgtctaatatcgcaaatatggttctctttgctgcaaaagtgtatgcttcaaaacccaattggaaaagcgtatgcagccactgggaatgcaagttgggattgcttggctggtcatacgaggaatcaaggaactagctgaggtctccttccctcaagatgacaaacaaacagaaaaaactaccctcaaggtgacctaaacacaaagggagctacataataccctacaagactagaccagcacggtgcaccgccgttctgtatgtcgctggctatgctaattgtgcagccgacccccttccatcctcagtgccctcctaccattggcggcatgggatctcggtgatggaagggcaggggcagcacaggatctactgcattttttacaacgcagtggcagacattggagacgggttcgtgtgggatgccgactcctagctctactgccacgccagacactcttcccatatgaactttttgtgaagctctatagcaaggttgagttgcacccttttggtcttcataaccttggtaacaggccaatttatgctgggaatgcactttgtactgtgaaatataccgacgaggatccttgcatgatgagtattagatcaacttcattttcccctactgctgatgctatgtctgaaacaaaggttgcacctatcacccaggttgatctctctttcctcagtgaaggtttgtttggttccttcaccatgttattttgttaagaatcagcagtgcttcagaactactcttatttgttttgttgctctaataattgcacaaaacttttactaattgaggatcactagatttattttcctattcacaactttctataacttttataatgttgaaacaggctgcaagggaaaaaatacccctcttacttgatttattattttggcacccgtgaatagtaccttttttcaaaccttagggaaatctacatgggtgaatctgacatcccaagacacaaagcggcatgatcttgcaaatgcatgtgtagtagtcacaggaggcagaggtttaagaagtgctgaaaattttaagttgttggagcagcttgcggagaaatttggtgcagcagcgggcgcgactagggctgctgttgaagcaggttatgttccaaatgaccttcaggatcctcgccggtatatttttacaccatgcccacttttaagaaaatgaaaacacagagttgcaggagaaggctgcagcagcttgaatctcagctaatggaagcgaacagaatcaaagaggaaggcaacactggaagtatccgatggaaggagaacatattagaccaagagaatgaattacagaacataaaacaagagaacgacgacctgcagacaaaggaatcagcggcttctgagaagattaaggaactctcttcccagcttactaatgcaaaatatggcatgataaatagtaacaccaaggagataatgagaaggggggcactgaagaggacgatgaacctgttgtagtagttgccaaaatatgggagaacaacaagtttgttgactatgattcatctaaggagaaggagaatgatggtgactcacaggttgatttggaatcaaacaagggggatgcaggtcttgatagcaacgggttgcactcaactaaggagaacagtggcagggcatcaccaactaaacaacaccagcagtataagaagaagtctctgctgaagagattcggtggtctgctaaaaaagaaaagcgaaaattagcataaaactgtctgatgatattctttgttctatcatttgacatattttttgtaaaccctctcagagatgctgaaagccaacttactattgagagtactatgaaacctctcgcgcagtgtgaaataaatgacagaaatgaagtgtgtgttggtgttggtgctggtgctggagacactaacataaccggtggtattatccaattgtattggagttctattcttgaaaggtgcttggatacaaacgatcaaagcttgaaggaggcttgagtcaattgaatcatctgtaagtaatttagaagaaatattgtttttgttggtgaagcgagtttgttctttcctttgggctctatttatttatgaattgataacccaacaggattgtagtttgtagccatttagatttgaatccgagctatgactgagacgaatacaacatatgcattttgtagccatgtatatctgaatcagagctctgtgattgagatgaatatggttttatgtgccgtcgcaacacactgacattgtactatggtattataagtatcaatatgaagtatttctttg

SEQ ID NO: 71617 - DNA, 3465 bp, Zea Mays
ctcgtgatgcccgtcccgcctccccgctgtggcagccgccttcgcgtccgtcgatccctccgtgcacagatgcgccccaaatcgcgcctcccccaccgcgctccgtgaaatccgccctcctcaacctccccgccacccagaactccctcgcacctcatccttcgcgcgatgctcgccgatgtgccgccttcaaacatcgtcgtcgtcacctcctccccctttcctaggagggcatcctcgccgatgtgtcgccttccaacatcgacaccaccgcgtccccgcaccaccctcccccgtgtgcgtccctggccccctgagctcgcgcaggccggaggaccgcgctcgcccacctgaagattgctccctcccccaaggagctggcggcgacgcggctgcgtcaggagatttgggtccaacttcacatcttattcctcttcagttctcggcagctttggaattgctcagctcagcttttcgacgccgagtctatagctgctgctcaccactgccctcggtgtctgtagtctgtccatggaatgctttcatactgcttgctactcgcagtgtcgtgctgtgcatgcctgccttcgaggcaacaaccaccgtgcatacattgtccgggtcgggctggtatcctttgctgctacttgctgatgctgataagaagaactgcagcttttatcaccccggccgaaaagtcgtctcttgactcgttcgcgctagcttcaaagatagagctaagcaggcgaggcctagaccgtccatgatggcgacaggagctcgacttcgagcgggcctccccagagatggtagccagatccggccattgagccccccctaaccgagcggatccaagatgctcctccgcagcaggaaatggtagcagcaaacggaacgggccaaccgcagctggtggtggacgaacacaagacgattcttgaagaggtccccagagaagaaaatggcaccctttctgccgccaattatgctggctgtcggccccaaattatggtacagcgcatacggaggctaaccttccattggcagcgcacagatcatccggggcggacctataagatgtcaagtgtgtacgccccaacaacccacagatgcggctcgacgctctccatctgcatgtctctttaattatctctatatatatggatagacgacaaccttctatctatgaattatatgtcatgtctctttaattatctctatatcaatgtctacctatgtgatataagataccgtagcaacgcacgtgcacctaattagtgaatttggaagtgtgactttataaaaaaaatgagttatatgttcaagataatgttagtagtcatactatttaaagtccttttactttcttatttggatgagtcttttttcacatatcttccttcttaatgtaccattcatggttctattgatagctcaaggtcatgagaatgttgccgctgagtactacaaacaacaggaagaacaggaaaaagttgtcaggagtgaatcattagccatatggctgtctaatatcgcaaatatggttctctttgctgcaaaagtgtatgcttcaaaacccaattggaaaagcgtatgcagccactgaaccagggaatgcaagttgggattgcttggctggtcatacgaggtttgatctgttctgggtttcatgtaggaatcaaggaactagctgaggtctccttccctcaagatgacaaacaaacagaaaaaactaccctcaaggtgacctaaacacaaagggagctacataataccctacaagactagaccagtgccctcctaccattggcggcatgggatctcggtgatggaagggcaggggcagcacaggatctactgcattttttacaacgcagtggcagacattggagacgggttcgtgtgggatgccgactcctagctctactgccacgccagacactcttcccatatgaactttttgtgaagctctatagcaaggttgagttgcacccttttggtcttcataaccttggtaacaggccaatttatgctgggaatgcactttgtactgtgaaatataccgacgaggatccttgcatgatgagtattagatcaacttcattttcccctactgctgatgctatgtctgaaacaaaggttgcacctatcacccagggaaatctacatgggtgaatctgacatcccaagacacaaagcggcatgatcttgcaaatgcatgtgtagtagtcacaggaggcagaggtttaagaagtgctgaaaattttaagttgttggagcagcttgcggagaaatttggtgcagcagcgggcgcgactagggctgctgttgaagcaggttatgttccaaatgaccttcagagttgcaggagaaggctgcagcagcttgaatctcagctaatggaagcgaacagaatcaaagaggaaggcaacactggaagtatccgatggaaggagaacatattagaccaagagaatgaattacagaacataaaacaagagaacgacgacctgcagacaaaggaatcagcggcttctgagaagattaaggaactctcttcccagcttactaatgcaaaatatggcatgataaatagtaacaccaaggagataatgagaaggggggcactgaagaggacgatgaacctgttgtagtagttgccaaaatatgggagaacaacaagtttgttgactatgattcatctaaggagaaggagaatgatggtgactcacaggttgatttggaatcaaacaagggggatgcaggtcttgatagcaacgggttgcactcaactaaggagaacagtggcagggcatcaccaactaaacaacaccagcagtataagaagaagtctctgctgaagagattcggtggtctgctaaaaaagaaaagcgaaaattagcataaaactgtctgatgatattctttgttctatcatttgacatattttttgtaaaccctctcagagatgctgaaagccaacttactattgagagtactatgaaacctctcgcgcagtgtgaaataaatgacagaaatgaagtgtgtgttggtgttggtgctggtgctggagacactaacataaccggtggtattatccaattgtattggagttctattcttgaaaggtgcttggatacaaacgatcaaagcttgaaggaggcttgagtcaattgaatcatctgtaagtaatttagaagaaatattgtttttgttggtgaagcgagtttgttctttcctttgggctctatttatttatgaattgataacccaacaggattgtagtttgtagccatttagatttgaatccgagctatgactgagacgaatacaacatatgcattttgtagccatgtatatctgaatcagagctctgtgattgagatgaatatggttttatgtgccgtcgcaacacactgacattgtactatggtattataagtatcaatatgaagtatttctttg

SEQ ID NO: 71618 - DNA, 3650 bp, Zea Mays
ctcgtgatgcccgtcccgcctccccgctgtggcagccgccttcgcgtccgtcgatccctccgtgcacagatgcgccccaaatcgcgcctcccccaccgcgctccgtgaaatccgccctcctcaacctccccgccacccagaactccctcgcacctcatccttcgcgcgatgctcgccgatgtgccgccttcaaacatcgtcgtcgtcacctcctccccctttcctaggagggcatcctcgccgatgtgtcgccttccaacatcgacaccaccgcgtccccgcaccaccctcccccgtgtgcgtccctggccccctgagctcgcgcaggccggaggaccgcgctcgcccacctgaagattgctccctcccccaaggagctggcggcgacgcggctgcgtcaggagatttgggtccaacttcacatcttattcctcttcagttctcggcagctttggaattgctcagctcagcttttcgacgccgagtctatagctgctgctcaccactgccctcggtgtctgtagtctgtccatggaatgctttcatactgcttgctactcgcagtgtcgtgctgtgcatgcctgccttcgaggcaacaaccaccgtgcatacattgtccgggtcgggctggtatcctttgctgctacttgctgatgctgataagaagaactgcagcttttatcaccccggccgaaaagtcgtctcttgactcgttcgcgctagcttcaaagatagagctaagcaggcgaggcctagaccgtccatgatggcgacaggagctcgacttcgagcgggcctccccagagatggtagccagatccggccattgagccccccctaaccgagcggatccaagatgctcctccgcagcaggaaatggtagcagcaaacggaacgggccaaccgcagctggtggtggacgaacacaagacgattcttgaagaggtccccagagaagaaaatggcaccctttctgccgccaattatgctggctgtcggccccaaattatggtacagcgcatacggaggctaaccttccattggcagcgcacagatcatccggggcggacctataagatgtcaagtgtgtacgccccaacaacccacagatgcggctcgacgctctccatctgcatgtctctttaattatctctatatatatggatagacgacaaccttctatctatgaattatatgtcatgtctctttaattatctctatatcaatgtctacctatgtgatataagataccgtagcaacgcacgtgcacctaattagtgaatttggaagtgtgactttataaaaaaaatgagttatatgttcaagataatgttagtagtcatactatttaaagtccttttactttcttatttggatgagtcttttttcacatatcttccttcttaatgtaccattcatggttctattgatagctcaaggtcatgagaatgttgccgctgagtactacaaacaacaggtggagatgttagagggtttttagtgagatggacgcatttacatatcgtgcttttcctacctgtaatgtccaagtgacgacatcaatagatatctggccactttattgacctgcaggaagaacaggaaaaagttgtcaggagtgaatcattagccatatggctgtctaatatcgcaaatatggttctctttgctgcaaaagtgtatgcttcaaaacccaattggaaaagcgtatgcagccactgaaccagggaatgcaagttgggattgcttggctggtcatacgaggtttgatctgttctgggtttcatgtaggaatcaaggaactagctgaggtctccttccctcaagatgacaaacaaacagaaaaaactaccctcaaggtgacctaaacacaaagggagctacataataccctacaagactagaccagcacggtgcaccgccgttctgtatgtcgctggctatgctaattgtgcagccgacccccttccatcctcagtgccctcctaccattggcggcatgggatctcggtgatggaagggcaggggcagcacaggatctactgcattttttacaacgcagtggcagacattggagacgggttcgtgtgggatgccgactcctagctctactgccacgccagacactcttcccatatgaactttttgtgaagctctatagcaaggttgagttgcacccttttggtcttcataaccttggtaacaggccaatttatgctgggaatgcactttgtactgtgaaatataccgacgaggatccttgcatgatgagtattagatcaacttcattttcccctactgctgatgctatgtctgaaacaaaggttgcacctatcacccagggaaatctacatgggtgaatctgacatcccaagacacaaagcggcatgatcttgcaaatgcatgtgtagtagtcacaggaggcagaggtttaagaagtgctgaaaattttaagttgttggagcagcttgcggagaaatttggtgcagcagcgggcgcgactagggctgctgttgaagcaggttatgttccaaatgaccttcagagttgcaggagaaggctgcagcagcttgaatctcagctaatggaagcgaacagaatcaaagaggaaggcaacactggaagtatccgatggaaggagaacatattagaccaagagaatgaattacagaacataaaacaagagaacgacgacctgcagacaaaggaatcagcggcttctgagaagattaaggaactctcttcccagcttactaatgcaaaatatggcatgataaatagtaacaccaaggagataatgagaaggggggcactgaagaggacgatgaacctgttgtagtagttgccaaaatatgggagaacaacaagtttgttgactatgattcatctaaggagaaggagaatgatggtgactcacaggttgatttggaatcaaacaagggggatgcaggtcttgatagcaacgggttgcactcaactaaggagaacagtggcagggcatcaccaactaaacaacaccagcagtataagaagaagtctctgctgaagagattcggtggtctgctaaaaaagaaaagcgaaaattagcataaaactgtctgatgatattctttgttctatcatttgacatattttttgtaaaccctctcagagatgctgaaagccaacttactattgagagtactatgaaacctctcgcgcagtgtgaaataaatgacagaaatgaagtgtgtgttggtgttggtgctggtgctggagacactaacataaccggtggtattatccaattgtattggagttctattcttgaaaggtgcttggatacaaacgatcaaagcttgaaggaggcttgagtcaattgaatcatctgtaagtaatttagaagaaatattgtttttgttggtgaagcgagtttgttctttcctttgggctctatttatttatgaattgataacccaacaggattgtagtttgtagccatttagatttgaatccgagctatgactgagacgaatacaacatatgcattttgtagccatgtatatctgaatcagagctctgtgattgagatgaatatggttttatgtgccgtcgcaacacactgacattgtactatggtattataagtatcaatatgaagtatttctttg

SEQ ID NO: 71619 - DNA, 3554 bp, Zea Mays
ctcgtgatgcccgtcccgcctccccgctgtggcagccgccttcgcgtccgtcgatccctccgtgcacagatgcgccccaaatcgcgcctcccccaccgcgctccgtgaaatccgccctcctcaacctccccgccacccagaactccctcgcacctcatccttcgcgcgatgctcgccgatgtgccgccttcaaacatcgtcgtcgtcacctcctccccctttcctaggagggcatcctcgccgatgtgtcgccttccaacatcgacaccaccgcgtccccgcaccaccctcccccgtgtgcgtccctggccccctgagctcgcgcaggccggaggaccgcgctcgcccacctgaagattgctccctcccccaaggagctggcggcgacgcggctgcgtcaggagatttgggtccaacttcacatcttattcctcttcagttctcggcagctttggaattgctcagctcagcttttcgacgccgagtctatagctgctgctcaccactgccctcggtgtctgtagtctgtccatggaatgctttcatactgcttgctactcgcagtgtcgtgctgtgcatgcctgccttcgaggcaacaaccaccgtgcatacattgtccgggtcgggctggtatcctttgctgctacttgctgatgctgataagaagaactgcagcttttatcaccccggccgaaaagtcgtctcttgactcgttcgcgctagcttcaaagatagagctaagcaggcgaggcctagaccgtccatgatggcgacaggagctcgacttcgagcgggcctccccagagatggtagccagatccggccattgagccccccctaaccgagcggatccaagatgctcctccgcagcaggaaatggtagcagcaaacggaacgggccaaccgcagctggtggtggacgaacacaagacgattcttgaagaggtccccagagaagaaaatggcaccctttctgccgccaattatgctggctgtcggccccaaattatggtacagcgcatacggaggctaaccttccattggcagcgcacagatcatccggggcggacctataagatgtcaagtgtgtacgccccaacaacccacagatgcggctcgacgctctccatctgcatgtctctttaattatctctatatatatggatagacgacaaccttctatctatgaattatatgtcatgtctctttaattatctctatatcaatgtctacctatgtgatataagataccgtagcaacgcacgtgcacctaattagtgaatttggaagtgtgactttataaaaaaaatgagttatatgttcaagataatgttagtagtcatactatttaaagtccttttactttcttatttggatgagtcttttttcacatatcttccttcttaatgtaccattcatggttctattgatagctcaaggtcatgagaatgttgccgctgagtactacaaacaacaggtggagatgttagagggtttttagtgagatggacgcatttacatatcgtgcttttcctacctgtaatgtccaagtgacgacatcaatagatatctggccactttattgacctgcaggaagaacaggaaaaagttgtcaggagtgaatcattagccatatggctgtctaatatcgcaaatatggttctctttgctgcaaaagtgtatgcttcaaaacccaattggaaaagcgtatgcagccactgaaccagggaatgcaagttgggattgcttggctggtcatacgaggtttgatctgttctgggtttcatgtaggaatcaaggaactagctgaggtctccttccctcaagatgacaaacaaacagaaaaaactaccctcaaggtgacctaaacacaaagggagctacataataccctacaagactagaccagtgccctcctaccattggcggcatgggatctcggtgatggaagggcaggggcagcacaggatctactgcattttttacaacgcagtggcagacattggagacgggttcgtgtgggatgccgactcctagctctactgccacgccaggccaatttatgctgggaatgcactttgtactgtgaaatataccgacgaggatccttgcatgatgagtattagatcaacttcattttcccctactgctgatgctatgtctgaaacaaaggttgcacctatcacccagggaaatctacatgggtgaatctgacatcccaagacacaaagcggcatgatcttgcaaatgcatgtgtagtagtcacaggaggcagaggtttaagaagtgctgaaaattttaagttgttggagcagcttgcggagaaatttggtgcagcagcgggcgcgactagggctgctgttgaagcaggttatgttccaaatgaccttcaggatcctcgccggtatatttttacaccatgcccacttttaagaaaatgaaaacacagagttgcaggagaaggctgcagcagcttgaatctcagctaatggaagcgaacagaatcaaagaggaaggcaacactggaagtatccgatggaaggagaacatattagaccaagagaatgaattacagaacataaaacaagagaacgacgacctgcagacaaaggaatcagcggcttctgagaagattaaggaactctcttcccagcttactaatgcaaaatatggcatgataaatagtaacaccaaggagataatgagaaggggggcactgaagaggacgatgaacctgttgtagtagttgccaaaatatgggagaacaacaagtttgttgactatgattcatctaaggagaaggagaatgatggtgactcacaggttgatttggaatcaaacaagggggatgcaggtcttgatagcaacgggttgcactcaactaaggagaacagtggcagggcatcaccaactaaacaacaccagcagtataagaagaagtctctgctgaagagattcggtggtctgctaaaaaagaaaagcgaaaattagcataaaactgtctgatgatattctttgttctatcatttgacatattttttgtaaaccctctcagagatgctgaaagccaacttactattgagagtactatgaaacctctcgcgcagtgtgaaataaatgacagaaatgaagtgtgtgttggtgttggtgctggtgctggagacactaacataaccggtggtattatccaattgtattggagttctattcttgaaaggtgcttggatacaaacgatcaaagcttgaaggaggcttgagtcaattgaatcatctgtaagtaatttagaagaaatattgtttttgttggtgaagcgagtttgttctttcctttgggctctatttatttatgaattgataacccaacaggattgtagtttgtagccatttagatttgaatccgagctatgactgagacgaatacaacatatgcattttgtagccatgtatatctgaatcagagctctgtgattgagatgaatatggttttatgtgccgtcgcaacacactgacattgtactatggtattataagtatcaatatgaagtatttctttg

SEQ ID NO: 71620 - DNA, 3069 bp, Zea Mays
ctcgtgatgcccgtcccgcctccccgctgtggcagccgccttcgcgtccgtcgatccctccgtgcacagatgcgccccaaatcgcgcctcccccaccgcgctccgtgaaatccgccctcctcaacctccccgccacccagaactccctcgcacctcatccttcgcgcgatgctcgccgatgtgccgccttcaaacatcgtcgtcgtcacctcctccccctttcctaggagggcatcctcgccgatgtgtcgccttccaacatcgacaccaccgcgtccccgcaccaccctcccccgtgtgcgtccctggccccctgagctcgcgcaggccggaggaccgcgctcgcccacctgaagattgctccctcccccaaggagctggcggcgacgcggctgcgtcaggagatttgggtccaacttcacatcttattcctcttcagttctcggcagctttggaattgctcagctcagcttttcgacgccgagtctatagctgctgctcaccactgccctcggtgtctgtagtctgtccatggaatgctttcatactgcttgctactcgcagtgtcgtgctgtgcatgcctgccttcgaggcaacaaccaccgtgcatacattgtccgggtcgggctggtatcctttgctgctacttgctgatgctgataagaagaactgcagcttttatcaccccggccgaaaagtcgtctcttgactcgttcgcgctagcttcaaagatagagctaagcaggcgaggcctagaccgtccatgatggcgacaggagctcgacttcgagcgggcctccccagagatgatgctcctccgcagcaggaaatggtagcagcaaacggaacgggccaaccgcagctggtggtggacgaacacaagacgattcttgaagaggtccccagagaagaaaatggcaccctttctgccgccaattatgctgctcaaggtcatgagaatgttgccgctgagtactacaaacaacaggaagaacaggaaaaagttgtcaggagtgaatcattagccatatggctgtctaatatcgcaaatatggttctctttgctgcaaaagtgtatgcttcaacttgttgtcatgatatatcttgtggtttactgccttttcaatgcaaacgccaaatccctatagaaacccaattggaaaagcgtatgcagccactgaaccagggaatgcaagttgggattgcttggctggtcatacgaggaatcaaggaactagctgaggtctccttccctcaagatgacaaacaaacagaaaaaactaccctcaaggtgacctaaacacaaagggagctacataataccctacaagactagaccagtgccctcctaccattggcggcatgggatctcggtgatggaagggcaggggcagcacaggatctactgcattttttacaacgcagtggcagacattggagacgggttcgtgtgggatgccgactcctagctctactgccacgccagacactcttcccatatgaactttttgtgaagctctatagcaaggttgagttgcacccttttggtcttcataaccttggtaacaggccaatttatgctgggaatgcactttgtactgtgaaatataccgacgaggatccttgcatgatgagtattagatcaacttcattttcccctactgctgatgctatgtctgaaacaaaggttgcacctatcacccagggaaatctacatgggtgaatctgacatcccaagacacaaagcggcatgatcttgcaaatgcatgtgtagtagtcacaggaggcagaggtttaagaagtgctgaaaattttaagttgttggagcagcttgcggagaaatttggtgcagcagcgggcgcgactagggctgctgttgaagcaggttatgttccaaatgaccttcaggatcctcgccggtatatttttacaccatgcccacttttaagaaaatgaaaacacagagttgcaggagaaggctgcagcagcttgaatctcagctaatggaagcgaacagaatcaaagaggaaggcaacactggaagtatccgatggaaggagaacatattagaccaagagaatgaattacagaacataaaacaagagaacgacgacctgcagacaaaggaatcagcggcttctgagaagattaaggaactctcttcccagcttactaatgcaaaatatggcatgataaatagtaacaccaaggagataatgagaaggggggcactgaagaggacgatgaacctgttgtagtagttgccaaaatatgggagaacaacaagtttgttgactatgattcatctaaggagaaggagaatgatggtgactcacaggttgatttggaatcaaacaagggggatgcaggtcttgatagcaacgggttgcactcaactaaggagaacagtggcagggcatcaccaactaaacaacaccagcagtataagaagaagtctctgctgaagagattcggtggtctgctaaaaaagaaaagcgaaaattagcataaaactgtctgatgatattctttgttctatcatttgacatattttttgtaaaccctctcagagatgctgaaagccaacttactattgagagtactatgaaacctctcgcgcagtgtgaaataaatgacagaaatgaagtgtgtgttggtgttggtgctggtgctggagacactaacataaccggtggtattatccaattgtattggagttctattcttgaaaggtgcttggatacaaacgatcaaagcttgaaggaggcttgagtcaattgaatcatctgtaagtaatttagaagaaatattgtttttgttggtgaagcgagtttgttctttcctttgggctctatttatttatgaattgataacccaacaggattgtagtttgtagccatttagatttgaatccgagctatgactgagacgaatacaacatatgcattttgtagccatgtatatctgaatcagagctctgtgattgagatgaatatggttttatgtgccgtcgcaacacactgacattgtactatggtattataagtatcaatatgaagtatttctttg

SEQ ID NO: 71621 - DNA, 2844 bp, Zea Mays
ctcgtgatgcccgtcccgcctccccgctgtggcagccgccttcgcgtccgtcgatccctccgtgcacagatgcgccccaaatcgcgcctcccccaccgcgctccgtgaaatccgccctcctcaacctccccgccacccagaactccctcgcacctcatccttcgcgcgatgctcgccgatgtgccgccttcaaacatcgtcgtcgtcacctcctccccctttcctaggagggcatcctcgccgatgtgtcgccttccaacatcgacaccaccgcgtccccgcaccaccctcccccgtgtgcgtccctggccccctgagctcgcgcaggccggaggaccgcgctcgcccacctgaagattgctccctcccccaaggagctggcggcgacgcggctgcgtcaggagatttgggtccaacttcacatcttattcctcttcagttctcggcagctttggaattgctcagctcagcttttcgacgccgagtctatagctgctgctcaccactgccctcggtgtctgtagtctgtccatggaatgctttcatactgcttgctactcgcagtgtcgtgctgtgcatgcctgccttcgaggcaacaaccaccgtgcatacattgtccgggtcgggctggtatcctttgctgctacttgctgatgctgataagaagaactgcagcttttatcaccccggccgaaaagtcgtctcttgactcgttcgcgctagcttcaaagatagagctaagcaggcgaggcctagaccgtccatgatggcgacaggagctcgacttcgagcgggcctccccagagatgatgctcctccgcagcaggaaatggtagcagcaaacggaacgggccaaccgcagctggtggtggacgaacacaagacgattcttgaagaggtccccagagaagaaaatggcaccctttctgccgccaattatgctgctcaaggtcatgagaatgttgccgctgagtactacaaacaacaggaagaacaggaaaaagttgtcaggagtgaatcattagccatatggctgtctaatatcgcaaatatggttctctttgctgcaaaagtgtatgcttcaaaacccaattggaaaagcgtatgcagccactggaatcaaggaactagctgaggtctccttccctcaagatgacaaacaaacagaaaaaactaccctcaaggtgacctaaacacaaagggagctacataataccctacaagactagaccagccgacccccttccatcctcagtgccctcctaccattggcggcatgggatctcggtgatggaagggcaggggcagcacaggatctactgcattttttacaacgcagtggcagacattggagacgggttcgtgtgggatgccgactcctagctctactgccacgccaggccaatttatgctgggaatgcactttgtactgtgaaatataccgacgaggatccttgcatgatgagtattagatcaacttcattttcccctactgctgatgctatgtctgaaacaaaggttgcacctatcacccagggaaatctacatgggtgaatctgacatcccaagacacaaagcggcatgatcttgcaaatgcatgtgtagtagtcacaggaggcagaggtttaagaagtgctgaaaattttaagttgttggagcagcttgcggagaaatttggtgcagcagcgggcgcgactagggctgctgttgaagcaggttatgttccaaatgaccttcagagttgcaggagaaggctgcagcagcttgaatctcagctaatggaagcgaacagaatcaaagaggaaggcaacactggaagtatccgatggaaggagaacatattagaccaagagaatgaattacagaacataaaacaagagaacgacgacctgcagacaaaggaatcagcggcttctgagaagattaaggaactctcttcccagcttactaatgcaaaatatggcatgataaatagtaacaccaaggagataatgagaaggggggcactgaagaggacgatgaacctgttgtagtagttgccaaaatatgggagaacaacaagtttgttgactatgattcatctaaggagaaggagaatgatggtgactcacaggttgatttggaatcaaacaagggggatgcaggtcttgatagcaacgggttgcactcaactaaggagaacagtggcagggcatcaccaactaaacaacaccagcagtataagaagaagtctctgctgaagagattcggtggtctgctaaaaaagaaaagcgaaaattagcataaaactgtctgatgatattctttgttctatcatttgacatattttttgtaaaccctctcagagatgctgaaagccaacttactattgagagtactatgaaacctctcgcgcagtgtgaaataaatgacagaaatgaagtgtgtgttggtgttggtgctggtgctggagacactaacataaccggtggtattatccaattgtattggagttctattcttgaaaggtgcttggatacaaacgatcaaagcttgaaggaggcttgagtcaattgaatcatctgtaagtaatttagaagaaatattgtttttgttggtgaagcgagtttgttctttcctttgggctctatttatttatgaattgataacccaacaggattgtagtttgtagccatttagatttgaatccgagctatgactgagacgaatacaacatatgcattttgtagccatgtatatctgaatcagagctctgtgattgagatgaatatggttttatgtgccgtcgcaacacactgacattgtactatggtattataagtatcaatatgaagtatttctttg

SEQ ID NO: 71622 - DNA, 3602 bp, Zea Mays
ctcgtgatgcccgtcccgcctccccgctgtggcagccgccttcgcgtccgtcgatccctccgtgcacagatgcgccccaaatcgcgcctcccccaccgcgctccgtgaaatccgccctcctcaacctccccgccacccagaactccctcgcacctcatccttcgcgcgatgctcgccgatgtgccgccttcaaacatcgtcgtcgtcacctcctccccctttcctaggagggcatcctcgccgatgtgtcgccttccaacatcgacaccaccgcgtccccgcaccaccctcccccgtgtgcgtccctggccccctgagctcgcgcaggccggaggaccgcgctcgcccacctgaagattgctccctcccccaaggagctggcggcgacgcggctgcgtcaggagatttgggtccaacttcacatcttattcctcttcagttctcggcagctttggaattgctcagctcagcttttcgacgccgagtctatagctgctgctcaccactgccctcggtgtctgtagtctgtccatggaatgctttcatactgcttgctactcgcagtgtcgtgctgtgcatgcctgccttcgaggcaacaaccaccgtgcatacattgtccgggtcgggctggtatcctttgctgctacttgctgatgctgataagaagaactgcagcttttatcaccccggccgaaaagtcgtctcttgactcgttcgcgctagcttcaaagatagagctaagcaggcgaggcctagaccgtccatgatggcgacaggagctcgacttcgagcgggcctccccagagatggtagccagatccggccattgagccccccctaaccgagcggatccaagatgctcctccgcagcaggaaatggtagcagcaaacggaacgggccaaccgcagctggtggtggacgaacacaagacgattcttgaagaggtccccagagaagaaaatggcaccctttctgccgccaattatgctggctgtcggccccaaattatggtacagcgcatacggaggctaaccttccattggcagcgcacagatcatccggggcggacctataagatgtcaagtgtgtacgccccaacaacccacagatgcggctcgacgctctccatctgcatgtctctttaattatctctatatatatggatagacgacaaccttctatctatgaattatatgtcatgtctctttaattatctctatatcaatgtctacctatgtgatataagataccgtagcaacgcacgtgcacctaattagtgaatttggaagtgtgactttataaaaaaaatgagttatatgttcaagataatgttagtagtcatactatttaaagtccttttactttcttatttggatgagtcttttttcacatatcttccttcttaatgtaccattcatggttctattgatagctcaaggtcatgagaatgttgccgctgagtactacaaacaacaggtggagatgttagagggtttttagtgagatggacgcatttacatatcgtgcttttcctacctgtaatgtccaagtgacgacatcaatagatatctggccactttattgacctgcaggaagaacaggaaaaagttgtcaggagtgaatcattagccatatggctgtctaatatcgcaaatatggttctctttgctgcaaaagtgtatgcttcaaaacccaattggaaaagcgtatgcagccactgaaccagggaatgcaagttgggattgcttggctggtcatacgaggtttgatctgttctgggtttcatgtaggaatcaaggaactagctgaggtctccttccctcaagatgacaaacaaacagaaaaaactaccctcaaggtgacctaaacacaaagggagctacataataccctacaagactagaccagccgacccccttccatcctcagtgccctcctaccattggcggcatgggatctcggtgatggaagggcaggggcagcacaggatctactgcattttttacaacgcagtggcagacattggagacgggttcgtgtgggatgccgactcctagctctactgccacgccagacactcttcccatatgaactttttgtgaagctctatagcaaggttgagttgcacccttttggtcttcataaccttggtaacaggccaatttatgctgggaatgcactttgtactgtgaaatataccgacgaggatccttgcatgatgagtattagatcaacttcattttcccctactgctgatgctatgtctgaaacaaaggttgcacctatcacccagggaaatctacatgggtgaatctgacatcccaagacacaaagcggcatgatcttgcaaatgcatgtgtagtagtcacaggaggcagaggtttaagaagtgctgaaaattttaagttgttggagcagcttgcggagaaatttggtgcagcagcgggcgcgactagggctgctgttgaagcaggttatgttccaaatgaccttcagagttgcaggagaaggctgcagcagcttgaatctcagctaatggaagcgaacagaatcaaagaggaaggcaacactggaagtatccgatggaaggagaacatattagaccaagagaatgaattacagaacataaaacaagagaacgacgacctgcagacaaaggaatcagcggcttctgagaagattaaggaactctcttcccagcttactaatgcaaaatatggcatgataaatagtaacaccaaggagataatgagaaggggggcactgaagaggacgatgaacctgttgtagtagttgccaaaatatgggagaacaacaagtttgttgactatgattcatctaaggagaaggagaatgatggtgactcacaggttgatttggaatcaaacaagggggatgcaggtcttgatagcaacgggttgcactcaactaaggagaacagtggcagggcatcaccaactaaacaacaccagcagtataagaagaagtctctgctgaagagattcggtggtctgctaaaaaagaaaagcgaaaattagcataaaactgtctgatgatattctttgttctatcatttgacatattttttgtaaaccctctcagagatgctgaaagccaacttactattgagagtactatgaaacctctcgcgcagtgtgaaataaatgacagaaatgaagtgtgtgttggtgttggtgctggtgctggagacactaacataaccggtggtattatccaattgtattggagttctattcttgaaaggtgcttggatacaaacgatcaaagcttgaaggaggcttgagtcaattgaatcatctgtaagtaatttagaagaaatattgtttttgttggtgaagcgagtttgttctttcctttgggctctatttatttatgaattgataacccaacaggattgtagtttgtagccatttagatttgaatccgagctatgactgagacgaatacaacatatgcattttgtagccatgtatatctgaatcagagctctgtgattgagatgaatatggttttatgtgccgtcgcaacacactgacattgtactatggtattataagtatcaatatgaagtatttctttg

SEQ ID NO: 71623 - DNA, 3771 bp, Zea Mays
ctcgtgatgcccgtcccgcctccccgctgtggcagccgccttcgcgtccgtcgatccctccgtgcacagatgcgccccaaatcgcgcctcccccaccgcgctccgtgaaatccgccctcctcaacctccccgccacccagaactccctcgcacctcatccttcgcgcgatgctcgccgatgtgccgccttcaaacatcgtcgtcgtcacctcctccccctttcctaggagggcatcctcgccgatgtgtcgccttccaacatcgacaccaccgcgtccccgcaccaccctcccccgtgtgcgtccctggccccctgagctcgcgcaggccggaggaccgcgctcgcccacctgaagattgctccctcccccaaggagctggcggcgacgcggctgcgtcaggagatttgggtccaacttcacatcttattcctcttcagttctcggcagctttggaattgctcagctcagcttttcgacgccgagtctatagctgctgctcaccactgccctcggtgtctgtagtctgtccatggaatgctttcatactgcttgctactcgcagtgtcgtgctgtgcatgcctgccttcgaggcaacaaccaccgtgcatacattgtccgggtcgggctggtatcctttgctgctacttgctgatgctgataagaagaactgcagcttttatcaccccggccgaaaagtcgtctcttgactcgttcgcgctagcttcaaagatagagctaagcaggcgaggcctagaccgtccatgatggcgacaggagctcgacttcgagcgggcctccccagagatggtagccagatccggccattgagccccccctaaccgagcggatccaagatgctcctccgcagcaggaaatggtagcagcaaacggaacgggccaaccgcagctggtggtggacgaacacaagacgattcttgaagaggtccccagagaagaaaatggcaccctttctgccgccaattatgctggctgtcggccccaaattatggtacagcgcatacggaggctaaccttccattggcagcgcacagatcatccggggcggacctataagatgtcaagtgtgtacgccccaacaacccacagatgcggctcgacgctctccatctgcatgtctctttaattatctctatatatatggatagacgacaaccttctatctatgaattatatgtcatgtctctttaattatctctatatcaatgtctacctatgtgatataagataccgtagcaacgcacgtgcacctaattagtgaatttggaagtgtgactttataaaaaaaatgagttatatgttcaagataatgttagtagtcatactatttaaagtccttttactttcttatttggatgagtcttttttcacatatcttccttcttaatgtaccattcatggttctattgatagctcaaggtcatgagaatgttgccgctgagtactacaaacaacaggtggagatgttagagggtttttagtgagatggacgcatttacatatcgtgcttttcctacctgtaatgtccaaggtatgctatatatggactttctgtttgaacattagggaaggtaacttatgtggatgttaataatcaaattttcttcactatattttttcttctttttaatagtgacgacatcaatagatatctggccactttattgacctgcaggaagaacaggaaaaagttgtcaggagtgaatcattagccatatggctgtctaatatcgcaaatatggttctctttgctgcaaaagtgtatgcttcaaaacccaattggaaaagcgtatgcagccactgggaatgcaagttgggattgcttggctggtcatacgaggtttgatctgttctgggtttcatgtaggaatcaaggaactagctgaggtctccttccctcaagatgacaaacaaacagaaaaaactaccctcaaggtgacctaaacacaaagggagctacataataccctacaagactagaccagcacggtgcaccgccgttctgtatgtcgctggctatgctaattgtgcagccgacccccttccatcctcagtgccctcctaccattggcggcatgggatctcggtgatggaagggcaggggcagcacaggatctactgcattttttacaacgcagtggcagacattggagacgggttcgtgtgggatgccgactcctagctctactgccacgccagacactcttcccatatgaactttttgtgaagctctatagcaaggttgagttgcacccttttggtcttcataaccttggtaacaggccaatttatgctgggaatgcactttgtactgtgaaatataccgacgaggatccttgcatgatgagtattagatcaacttcattttcccctactgctgatgctatgtctgaaacaaaggttgcacctatcacccaggttgatctctctttcctcagtgaagggaaatctacatgggtgaatctgacatcccaagacacaaagcggcatgatcttgcaaatgcatgtgtagtagtcacaggaggcagaggtttaagaagtgctgaaaattttaagttgttggagcagcttgcggagaaatttggtgcagcagcgggcgcgactagggctgctgttgaagcaggttatgttccaaatgaccttcagagttgcaggagaaggctgcagcagcttgaatctcagctaatggaagcgaacagaatcaaagaggaaggcaacactggaagtatccgatggaaggagaacatattagaccaagagaatgaattacagaacataaaacaagagaacgacgacctgcagacaaaggaatcagcggcttctgagaagattaaggaactctcttcccagcttactaatgcaaaatatggcatgataaatagtaacaccaaggagataatgagaaggggggcactgaagaggacgatgaacctgttgtagtagttgccaaaatatgggagaacaacaagtttgttgactatgattcatctaaggagaaggagaatgatggtgactcacaggttgatttggaatcaaacaagggggatgcaggtcttgatagcaacgggttgcactcaactaaggagaacagtggcagggcatcaccaactaaacaacaccagcagtataagaagaagtctctgctgaagagattcggtggtctgctaaaaaagaaaagcgaaaattagcataaaactgtctgatgatattctttgttctatcatttgacatattttttgtaaaccctctcagagatgctgaaagccaacttactattgagagtactatgaaacctctcgcgcagtgtgaaataaatgacagaaatgaagtgtgtgttggtgttggtgctggtgctggagacactaacataaccggtggtattatccaattgtattggagttctattcttgaaaggtgcttggatacaaacgatcaaagcttgaaggaggcttgagtcaattgaatcatctgtaagtaatttagaagaaatattgtttttgttggtgaagcgagtttgttctttcctttgggctctatttatttatgaattgataacccaacaggattgtagtttgtagccatttagatttgaatccgagctatgactgagacgaatacaacatatgcattttgtagccatgtatatctgaatcagagctctgtgattgagatgaatatggttttatgtgccgtcgcaacacactgacattgtactatggtattataagtatcaatatgaagtatttctttg

SEQ ID NO: 71624 - DNA, 3346 bp, Zea Mays
ctcgtgatgcccgtcccgcctccccgctgtggcagccgccttcgcgtccgtcgatccctccgtgcacagatgcgccccaaatcgcgcctcccccaccgcgctccgtgaaatccgccctcctcaacctccccgccacccagaactccctcgcacctcatccttcgcgcgatgctcgccgatgtgccgccttcaaacatcgtcgtcgtcacctcctccccctttcctaggagggcatcctcgccgatgtgtcgccttccaacatcgacaccaccgcgtccccgcaccaccctcccccgtgtgcgtccctggccccctgagctcgcgcaggccggaggaccgcgctcgcccacctgaagattgctccctcccccaaggagctggcggcgacgcggctgcgtcaggagatttgggtccaacttcacatcttattcctcttcagttctcggcagctttggaattgctcagctcagcttttcgacgccgagtctatagctgctgctcaccactgccctcggtgtctgtagtctgtccatggaatgctttcatactgcttgctactcgcagtgtcgtgctgtgcatgcctgccttcgaggcaacaaccaccgtgcatacattgtccgggtcgggctggtatcctttgctgctacttgctgatgctgataagaagaactgcagcttttatcaccccggccgaaaagtcgtctcttgactcgttcgcgctagcttcaaagatagagctaagcaggcgaggcctagaccgtccatgatggcgacaggagctcgacttcgagcgggcctccccagagatgatgctcctccgcagcaggaaatggtagcagcaaacggaacgggccaaccgcagctggtggtggacgaacacaagacgattcttgaagaggtccccagagaagaaaatggcaccctttctgccgccaattatgctgctcaaggtcatgagaatgttgccgctgagtactacaaacaacaggaagaacaggaaaaagttgtcaggagtgaatcattagccatatggctgtctaatatcgcaaatatggttctctttgctgcaaaagtgtatgcttcaaaacccaattggaaaagcgtatgcagccactgaaccagggaatgcaagttgggattgcttggctggtcatacgaggaatcaaggaactagctgaggtctccttccctcaagatgacaaacaaacagaaaaaactaccctcaaggtgacctaaacacaaagggagctacataataccctacaagactagaccagcacggtgcaccgccgttctgtatgtcgctggctatgctaattgtgcagccgacccccttccatcctcagtgccctcctaccattggcggcatgggatctcggtgatggaagggcaggggcagcacaggatctactgcattttttacaacgcagtggcagacattggagacgggttcgtgtgggatgccgactcctagctctactgccacgccagacactcttcccatatgaactttttgtgaagctctatagcaaggttgagttgcacccttttggtcttcataaccttggtaacaggccaatttatgctgggaatgcactttgtactgtgaaatataccgacgaggatccttgcatgatgagtattagatcaacttcattttcccctactgctgatgctatgtctgaaacaaaggttgcacctatcacccaggttgatctctctttcctcagtgaaggtttgtttggttccttcaccatgttattttgttaagaatcagcagtgcttcagaactactcttatttgttttgttgctctaataattgcacaaaacttttactaattgaggatcactagatttattttcctattcacaactttctataacttttataatgttgaaacaggctgcaagggaaaaaatacccctcttacttgatttattattttggcacccgtgaatagtaccttttttcaaaccttagggaaatctacatgggtgaatctgacatcccaagacacaaagcggcatgatcttgcaaatgcatgtgtagtagtcacaggaggcagaggtttaagaagtgctgaaaattttaagttgttggagcagcttgcggagaaatttggtgcagcagcgggcgcgactagggctgctgttgaagcaggttatgttccaaatgaccttcaggatcctcgccggtatatttttacaccatgcccacttttaagaaaatgaaaacacagagttgcaggagaaggctgcagcagcttgaatctcagctaatggaagcgaacagaatcaaagaggaaggcaacactggaagtatccgatggaaggagaacatattagaccaagagaatgaattacagaacataaaacaagagaacgacgacctgcagacaaaggaatcagcggcttctgagaagattaaggaactctcttcccagcttactaatgcaaaatatggcatgataaatagtaacaccaaggagataatgagaaggggggcactgaagaggacgatgaacctgttgtagtagttgccaaaatatgggagaacaacaagtttgttgactatgattcatctaaggagaaggagaatgatggtgactcacaggttgatttggaatcaaacaagggggatgcaggtcttgatagcaacgggttgcactcaactaaggagaacagtggcagggcatcaccaactaaacaacaccagcagtataagaagaagtctctgctgaagagattcggtggtctgctaaaaaagaaaagcgaaaattagcataaaactgtctgatgatattctttgttctatcatttgacatattttttgtaaaccctctcagagatgctgaaagccaacttactattgagagtactatgaaacctctcgcgcagtgtgaaataaatgacagaaatgaagtgtgtgttggtgttggtgctggtgctggagacactaacataaccggtggtattatccaattgtattggagttctattcttgaaaggtgcttggatacaaacgatcaaagcttgaaggaggcttgagtcaattgaatcatctgtaagtaatttagaagaaatattgtttttgttggtgaagcgagtttgttctttcctttgggctctatttatttatgaattgataacccaacaggattgtagtttgtagccatttagatttgaatccgagctatgactgagacgaatacaacatatgcattttgtagccatgtatatctgaatcagagctctgtgattgagatgaatatggttttatgtgccgtcgcaacacactgacattgtactatggtattataagtatcaatatgaagtatttctttg

SEQ ID NO: 71625 - DNA, 3961 bp, Zea Mays
ctcgtgatgcccgtcccgcctccccgctgtggcagccgccttcgcgtccgtcgatccctccgtgcacagatgcgccccaaatcgcgcctcccccaccgcgctccgtgaaatccgccctcctcaacctccccgccacccagaactccctcgcacctcatccttcgcgcgatgctcgccgatgtgccgccttcaaacatcgtcgtcgtcacctcctccccctttcctaggagggcatcctcgccgatgtgtcgccttccaacatcgacaccaccgcgtccccgcaccaccctcccccgtgtgcgtccctggccccctgagctcgcgcaggccggaggaccgcgctcgcccacctgaagattgctccctcccccaaggagctggcggcgacgcggctgcgtcaggagatttgggtccaacttcacatcttattcctcttcagttctcggcagctttggaattgctcagctcagcttttcgacgccgagtctatagctgctgctcaccactgccctcggtgtctgtagtctgtccatggaatgctttcatactgcttgctactcgcagtgtcgtgctgtgcatgcctgccttcgaggcaacaaccaccgtgcatacattgtccgggtcgggctgcttcaaagatagagctaagcaggcgaggcctagaccgtccatgatggcgacaggagctcgacttcgagcgggcctccccagagatggtagccagatccggccattgagccccccctaaccgagcggatccaagatgctcctccgcagcaggaaatggtagcagcaaacggaacgggccaaccgcagctggtggtggacgaacacaagacgattcttgaagaggtccccagagaagaaaatggcaccctttctgccgccaattatgctggtaatggcagctggtggtgctctgtctaatgccttgcctgttgtctgttctgatgcctgttgtctgttctaatgcctgttctctgtgaactgtctttgtctgtttcggtggaggctgtcggccccaaattatggtacagcgcatacggaggctaaccttccattggcagcgcacagatcatccggggcggacctataagatgtcaagtgtgtacgccccaacaacccacagatgcggctcgacgctctccatctgcatgtctctttaattatctctatatatatggatagacgacaaccttctatctatgaattatatgtcatgtctctttaattatctctatatcaatgtctacctatgtgatataagataccgtagcaacgcacgtgcacctaattagtgaatttggaagtgtgactttataaaaaaaatgagttatatgttcaagataatgttagtagtcatactatttaaagtccttttactttcttatttggatgagtcttttttcacatatcttccttcttaatgtaccattcatggttctattgatagctcaaggtcatgagaatgttgccgctgagtactacaaacaacaggtggagatgttagagggtttttagtgagatggacgcatttacatatcgtgcttttcctacctgtaatgtccaaggtatgctatatatggactttctgtttgaacattagggaaggtaacttatgtggatgttaataatcaaattttcttcactatattttttcttctttttaatagtgacgacatcaatagatatctggccactttattgacctgcaggaagaacaggaaaaagttgtcaggagtgaatcattagccatatggctgtctaatatcgcaaatatggttctctttgctgcaaaagtgtatgcttcaaaacccaattggaaaagcgtatgcagccactgaaccagggaatgcaagttgggattgcttggctggtcatacgaggaatcaaggaactagctgaggtctccttccctcaagatgacaaacaaacagaaaaaactaccctcaaggtgacctaaacacaaagggagctacataataccctacaagactagaccagccgacccccttccatcctcagtgccctcctaccattggcggcatgggatctcggtgatggaagggcaggggcagcacaggatctactgcattttttacaacgcagtggcagacattggagacgggttcgtgtgggatgccgactcctagctctactgccacgccagacactcttcccatatgaactttttgtgaagctctatagcaaggttgagttgcacccttttggtcttcataaccttggtaacaggccaatttatgctgggaatgcactttgtactgtgaaatataccgacgaggatccttgcatgatgagtattagatcaacttcattttcccctactgctgatgctatgtctgaaacaaaggttgcacctatcacccaggttgatctctctttcctcagtgaaggtttgtttggttccttcaccatgttattttgttaagaatcagcagtgcttcagaactactcttatttgttttgttgctctaataattgcacaaaacttttactaattgaggatcactagatttattttcctattcacaactttctataacttttataatgttgaaacaggctgcaagggaaaaaatacccctcttacttgatttattattttggcacccgtgaatagtaccttttttcaaaccttagggaaatctacatgggtgaatctgacatcccaagacacaaagcggcatgatcttgcaaatgcatgtgtagtagtcacaggaggcagaggtttaagaagtgctgaaaattttaagttgttggagcagcttgcggagaaatttggtgcagcagcgggcgcgactagggctgctgttgaagcaggttatgttccaaatgaccttcaggagaaggctgcagcagcttgaatctcagctaatggaagcgaacagaatcaaagaggaaggcaacactggaagtatccgatggaaggagaacatattagaccaagagaatgaattacagaacataaaacaagagaacgacgacctgcagacaaaggaatcagcggcttctgagaagattaaggaactctcttcccagcttactaatgcaaaatatggcatgataaatagtaacaccaaggagataatgagaaggggggcactgaagaggacgatgaacctgttgtagtagttgccaaaatatgggagaacaacaagtttgttgactatgattcatctaaggagaaggagaatgatggtgactcacaggttgatttggaatcaaacaagggggatgcaggtcttgatagcaacgggttgcactcaactaaggagaacagtggcagggcatcaccaactaaacaacaccagcagtataagaagaagtctctgctgaagagattcggtggtctgctaaaaaagaaaagcgaaaattagcataaaactgtctgatgatattctttgttctatcatttgacatattttttgtaaaccctctcagagatgctgaaagccaacttactattgagagtactatgaaacctctcgcgcagtgtgaaataaatgacagaaatgaagtgtgtgttggtgttggtgctggtgctggagacactaacataaccggtggtattatccaattgtattggagttctattcttgaaaggtgcttggatacaaacgatcaaagcttgaaggaggcttgagtcaattgaatcatctgtaagtaatttagaagaaatattgtttttgttggtgaagcgagtttgttctttcctttgggctctatttatttatgaattgataacccaacaggattgtagtttgtagccatttagatttgaatccgagctatgactgagacgaatacaacatatgcattttgtagccatgtatatctgaatcagagctctgtgattgagatgaatatggttttatgtgccgtcgcaacacactgacattgtactatggtattataagtatcaatatgaagtatttctttg

SEQ ID NO: 71626 - DNA, 3978 bp, Zea Mays
ctcgtgatgcccgtcccgcctccccgctgtggcagccgccttcgcgtccgtcgatccctccgtgcacagatgcgccccaaatcgcgcctcccccaccgcgctccgtgaaatccgccctcctcaacctccccgccacccagaactccctcgcacctcatccttcgcgcgatgctcgccgatgtgccgccttcaaacatcgtcgtcgtcacctcctccccctttcctaggagggcatcctcgccgatgtgtcgccttccaacatcgacaccaccgcgtccccgcaccaccctcccccgtgtgcgtccctggccccctgagctcgcgcaggccggaggaccgcgctcgcccacctgaagattgctccctcccccaaggagctggcggcgacgcggctgcgtcaggagatttgggtccaacttcacatcttattcctcttcagttctcggcagctttggaattgctcagctcagcttttcgacgccgagtctatagctgctgctcaccactgccctcggtgtctgtagtctgtccatggaatgctttcatactgcttgctactcgcagtgtcgtgctgtgcatgcctgccttcgaggcaacaaccaccgtgcatacattgtccgggtcgggctggtatcctttgctgctacttgctgatgctgataagaagaactgcagcttttatcaccccggccgaaaagtcgtctcttgactcgttcgcgctagcttcaaagatagagctaagcaggcgaggcctagaccgtccatgatggcgacaggagctcgacttcgagcgggcctccccagagatgatgctcctccgcagcaggaaatggtagcagcaaacggaacgggccaaccgcagctggtggtggacgaacacaagacgattcttgaagaggtccccagagaagaaaatggcaccctttctgccgccaattatgctgctcaaggtcatgagaatgttgccgctgagtactacaaacaacaggaagaacaggaaaaagttgtcaggagtgaatcattagccatatggctgtctaatatcgcaaatatggttctctttgctgcaaaagtgtatgcttcaacttgttgtcatgatatatcttgtggtttactgccttttcaatgcaaacgccaaatccctatagaaacccaattggaaaagcgtatgcagccactggaatcaaggaactagctgaggtctccttccctcaagatgacaaacaaacagaaaaaactaccctcaaggtgacctaaacacaaagggagctacataataccctacaagactagaccagcacggtgcaccgccgttctgtatgtcgctggctatgctaattgtgcagccgacccccttccatcctcagtgccctcctaccattggcggcatgggatctcggtgatggaagggcaggggcagcacaggatctactgcattttttacaacgcagtggcagacattggagacgggttcgtgtgggatgccgactcctagctctactgccacgccagacactcttcccatatgaactttttgtgaagctctatagcaaggttgagttgcacccttttggtcttcataaccttggtaacaggtaaaagtaagagtaggaaggtcaactggcatgcatacatgtgcttgctcattatggttttatgctattggtctgggcctttgtaagatcttaagtagaagggcaggcatggtgcaatggtgagagttgtctcattgagccaccaggtcgcgggtttgaattagcctctccgcatttcaggaggaaggcttgcctcggtttatctcttccccggaccccactcatgtggttgcctccggcactggatctgccttttgtaagatcttaggtgtatgctcctagaatatgtgtgatttacttccattaaagtatgctttgtgcatattaattagaggatgacgttttggacctagacaaaataaaagtcggacggccactgtcaagcattctccaaattcgttgcttattgtgacgtgtgtgtgcttgagttaacaactaataccatccccaactcatcctcatccatatagaattgcttgaaagcatgtgagtcttcctcaaatcacatgcacccaccatatgtattagtttatgggtgttaaaaagcatgagcctaaagattggattccatagaatggtcacatctggccattcaaataagtccataacttccttttgtgatgtttgcttttgttggagcttcatgtttgaattgatgtatgtatctgactttaggccaatttatgctgggaatgcactttgtactgtgaaatataccgacgaggatccttgcatgatgagtattagatcaacttcattttcccctactgctgatgctatgtctgaaacaaaggttgcacctatcacccaggttgatctctctttcctcagtgaaggtttgtttggttccttcaccatgttattttgttaagaatcagcagtgcttcagaactactcttatttgttttgttgctctaataattgcacaaaacttttactaattgaggatcactagatttattttcctattcacaactttctataacttttataatgttgaaacaggctgcaagggaaaaaatacccctcttacttgatttattattttggcacccgtgaatagtaccttttttcaaaccttagggaaatctacatgggtgaatctgacatcccaagacacaaagcggcatgatcttgcaaatgcatgtgtagtagtcacaggaggcagaggtttaagaagtgctgaaaattttaagttgttggagcagcttgcggagaaatttggtgcagcagcgggcgcgactagggctgctgttgaagcaggttatgttccaaatgaccttcaggagaaggctgcagcagcttgaatctcagctaatggaagcgaacagaatcaaagaggaaggcaacactggaagtatccgatggaaggagaacatattagaccaagagaatgaattacagaacataaaacaagagaacgacgacctgcagacaaaggaatcagcggcttctgagaagattaaggaactctcttcccagcttactaatgcaaaatatggcatgataaatagtaacaccaaggagataatgagaaggggggcactgaagaggacgatgaacctgttgtagtagttgccaaaatatgggagaacaacaagtttgttgactatgattcatctaaggagaaggagaatgatggtgactcacaggttgatttggaatcaaacaagggggatgcaggtcttgatagcaacgggttgcactcaactaaggagaacagtggcagggcatcaccaactaaacaacaccagcagtataagaagaagtctctgctgaagagattcggtggtctgctaaaaaagaaaagcgaaaattagcataaaactgtctgatgatattctttgttctatcatttgacatattttttgtaaaccctctcagagatgctgaaagccaacttactattgagagtactatgaaacctctcgcgcagtgtgaaataaatgacagaaatgaagtgtgtgttggtgttggtgctggtgctggagacactaacataaccggtggtattatccaattgtattggagttctattcttgaaaggtgcttggatacaaacgatcaaagcttgaaggaggcttgagtcaattgaatcatctgtaagtaatttagaagaaatattgtttttgttggtgaagcgagtttgttctttcctttgggctctatttatttatgaattgataacccaacaggattgtagtttgtagccatttagatttgaatccgagctatgactgagacgaatacaacatatgcattttgtagccatgtatatctgaatcagagctctgtgattgagatgaatatggttttatgtgccgtcgcaacacactgacattgtactatggtattataagtatcaatatgaagtatttctttg

SEQ ID NO: 71627 - DNA, 4393 bp, Zea Mays
ctcgtgatgcccgtcccgcctccccgctgtggcagccgccttcgcgtccgtcgatccctccgtgcacagatgcgccccaaatcgcgcctcccccaccgcgctccgtgaaatccgccctcctcaacctccccgccacccagaactccctcgcacctcatccttcgcgcgatgctcgccgatgtgccgccttcaaacatcgtcgtcgtcacctcctccccctttcctaggagggcatcctcgccgatgtgtcgccttccaacatcgacaccaccgcgtccccgcaccaccctcccccgtgtgcgtccctggccccctgagctcgcgcaggccggaggaccgcgctcgcccacctgaagattgctccctcccccaaggagctggcggcgacgcggctgcgtcaggagatttgggtccaacttcacatcttattcctcttcagttctcggcagctttggaattgctcagctcagcttttcgacgccgagtctatagctgctgctcaccactgccctcggtgtctgtagtctgtccatggaatgctttcatactgcttgctactcgcagtgtcgtgctgtgcatgcctgccttcgaggcaacaaccaccgtgcatacattgtccgggtcgggctggtatcctttgctgctacttgctgatgctgataagaagaactgcagcttttatcaccccggccgaaaagtcgtctcttgactcgttcgcgctagcttcaaagatagagctaagcaggcgaggcctagaccgtccatgatggcgacaggagctcgacttcgagcgggcctccccagagatgatgctcctccgcagcaggaaatggtagcagcaaacggaacgggccaaccgcagctggtggtggacgaacacaagacgattcttgaagaggtccccagagaagaaaatggcaccctttctgccgccaattatgctgctcaaggtcatgagaatgttgccgctgagtactacaaacaacaggaagaacaggaaaaagttgtcaggagtgaatcattagccatatggctgtctaatatcgcaaatatggttctctttgctgcaaaagtgtatgcttcaacttgttgtcatgatatatcttgtggtttactgccttttcaatgcaaacgccaaatccctatagaaacccaattggaaaagcgtatgcagccactgaaccagggaatgcaagttgggattgcttggctggtcatacgaggtttgatctgttctgggtttcatgtaggaatcaaggaactagctgaggtctccttccctcaagatgacaaacaaacagaaaaaactaccctcaagcgttccgctgattgggcaccgcagacggtctgtggttgtggatgggattatcgttttggcagaaagctggttgaagctcgtgatgaactaatgaaaggaaggtttgccgcttgcatgcgacctgtcccccctttctgttcaaaggcgttcgacaccccaccaggccgaggatgccgtgatctcctgtgcagcgcggacaatgcatgcaaccaacaccgtgggtgtgtgggtgttatagccattggattatcggattgctgctatgccgtgttttggtgtcaaattaaaactgtctttcttgcataaaaacagcttgccggttctaactcaacggggtgaaccacgtatatattctcgtgtaaggagggtgaataaactaattccctatttggatcctcctgtccacgaagccaggcaacaaagtcattaatgtcagcaccactgatcatcatctaactacattagtttacaggggttcgaaaaattttataggggtgagctgaccccaataagaacatgtagctccacccctgctcctagctaactgtttggcagtggctaacaattagtcgacaaatattaagctgacaaacaatttactgggacttgttttaattattgtctaatagacgtataaaattaaagtatagtagatagtttgttttatccctgcaagacaaacaatagtagcatatttttctttctcttctatctgctaatagttttcttttcttcagacactcttcccatatgaactttttgtgaagctctatagcaaggttgagttgcacccttttggtcttcataaccttggtaacaggtaaaagtaagagtaggaaggtcaactggcatgcatacatgtgcttgctcattatggttttatgctattggtctgggcctttgtaagatcttaagtagaagggcaggcatggtgcaatggtgagagttgtctcattgagccaccaggtcgcgggtttgaattagcctctccgcatttcaggaggaaggcttgcctcggtttatctcttccccggaccccactcatgtggttgcctccggcactggatctgccttttgtaagatcttaggtgtatgctcctagaatatgtgtgatttacttccattaaagtatgctttgtgcatattaattagaggatgacgttttggacctagacaaaataaaagtcggacggccactgtcaagcattctccaaattcgttgcttattgtgacgtgtgtgtgcttgagttaacaactaataccatccccaactcatcctcatccatatagaattgcttgaaagcatgtgagtcttcctcaaatcacatgcacccaccatatgtattagtttatgggtgttaaaaagcatgagcctaaagattggattccatagaatggtcacatctggccattcaaataagtccataacttccttttgtgatgtttgcttttgttggagcttcatgtttgaattgatgtatgtatctgactttaggccaatttatgctgggaatgcactttgtactgtgaaatataccgacgaggatccttgcatgatgagtattagatcaacttcattttcccctactgctgatgctatgtctgaaacaaaggttgcacctatcacccagggaaatctacatgggtgaatctgacatcccaagacacaaagcggcatgatcttgcaaatgcatgtgtagtagtcacaggaggcagaggtttaagaagtgctgaaaattttaagttgttggagcagcttgcggagaaatttggtgcagcagcgggcgcgactagggctgctgttgaagcaggttatgttccaaatgaccttcaggtaagcttgttagtctaccgtgagttctgtatgatctagctaattgatagttgtaatgccttcttattacaccatgcaaggatcctcgccggtatatttttacaccatgcccacttttaagaaaatgaaaacacagagttgcaggagaaggctgcagcagcttgaatctcagctaatggaagcgaacagaatcaaagaggaaggcaacactggaagtatccgatggaaggagaacatattagaccaagagaatgaattacagaacataaaacaagagaacgacgacctgcagacaaaggaatcagcggcttctgagaagattaaggaactctcttcccagcttactaatgcaaaatatggcatgataaatagtaacaccaaggagataatgagaaggggggcactgaagaggacgatgaacctgttgtagtagttgccaaaatatgggagaacaacaagtttgttgactatgattcatctaaggagaaggagaatgatggtgactcacaggttgatttggaatcaaacaagggggatgcaggtcttgatagcaacgggttgcactcaactaaggagaacagtggcagggcatcaccaactaaacaacaccagcagtataagaagaagtctctgctgaagagattcggtggtctgctaaaaaagaaaagcgaaaattagcataaaactgtctgatgatattctttgttctatcatttgacatattttttgtaaaccctctcagagatgctgaaagccaacttactattgagagtactatgaaacctctcgcgcagtgtgaaataaatgacagaaatgaagtgtgtgttggtgttggtgctggtgctggagacactaacataaccggtggtattatccaattgtattggagttctattcttgaaaggtgcttggatacaaacgatcaaagcttgaaggaggcttgagtcaattgaatcatctgtaagtaatttagaagaaatattgtttttgttggtgaagcgagtttgttctttcctttgggctctatttatttatgaattgataacccaacaggattgtagtttgtagccatttagatttgaatccgagctatgactgagacgaatacaacatatgcattttgtagccatgtatatctgaatcagagctctgtgattgagatgaatatggttttatgtgccgtcgcaacacactgacattgtactatggtattataagtatcaatatgaagtatttctttg

SEQ ID NO: 71628 - DNA, 2040 bp, Zea Mays
gggaatgcaagttgggattgcttggctggtcatacgagaggaatcaaggaactagctgaggtctccttccctcaagatgacaaacaaacagaaaaaactaccctcaaggtgacctaaacacaaagggagctacataataccctacaagactagaccagccgacccccttccatcctcagtgccctcctaccattggcggcatgggatctcggtgatggaagggcaggggcagcacaggatctactgcattttttacaacgcagtggcagacattggagacgggttcgtgtgggatgccgactcctagctctactgccacgccaggccaatttatgctgggaatgcactttgtactgtgaaatataccgacgaggatccttgcatgatgagtattagatcaacttcattttcccctactgctgatgctatgtctgaaacaaaggttgcacctatcacccaggttgatctctctttcctcagtgaaggtttgtttggttccttcaccatgttattttgttaagaatcagcagtgcttcagaactactcttatttgttttgttgctctaataattgcacaaaacttttactaattgaggatcactagatttattttcctattcacaactttctataacttttataatgttgaaacaggctgcaagggaaaaaatacccctcttacttgatttattattttggcacccgtgaatagtaccttttttcaaaccttagggaaatctacatgggtgaatctgacatcccaagacacaaagcggcatgatcttgcaaatgcatgtgtagtagtcacaggaggcagaggtttaagaagtgctgaaaattttaagttgttggagcagcttgcggagaaatttggtgcagcagcgggcgcgactagggctgctgttgaagcaggttatgttccaaatgaccttcagagttgcaggagaaggctgcagcagcttgaatctcagctaatggaagcgaacagaatcaaagaggaaggcaacactggaagtatccgatggaaggagaacatattagaccaagagaatgaattacagaacataaaacaagagaacgacgacctgcagacaaaggaatcagcggcttctgagaagattaaggaactctcttcccagcttactaatgcaaaatatggcatgataaatagtaacaccaaggagataatgagaaggggggcactgaagaggacgatgaacctgttgtagtagttgccaaaatatgggagaacaacaagtttgttgactatgattcatctaaggagaaggagaatgatggtgactcacaggttgatttggaatcaaacaagggggatgcaggtcttgatagcaacgggttgcactcaactaaggagaacagtggcagggcatcaccaactaaacaacaccagcagtataagaagaagtctctgctgaagagattcggtggtctgctaaaaaagaaaagcgaaaattagcataaaactgtctgatgatattctttgttctatcatttgacatattttttgtaaaccctctcagagatgctgaaagccaacttactattgagagtactatgaaacctctcgcgcagtgtgaaataaatgacagaaatgaagtgtgtgttggtgttggtgctggtgctggagacactaacataaccggtggtattatccaattgtattggagttctattcttgaaaggtgcttggatacaaacgatcaaagcttgaaggaggcttgagtcaattgaatcatctgtaagtaatttagaagaaatattgtttttgttggtgaagcgagtttgttctttcctttgggctctatttatttatgaattgataacccaacaggattgtagtttgtagccatttagatttgaatccgagctatgactgagacgaatacaacatatgcattttgtagccatgtatatctgaatcagagctctgtgattgagatgaatatggttttatgtgccgtcgcaacacactgacattgtactatggtattataagtatcaatatgaagtatttctttg

SEQ ID NO: 71629 - DNA, 1828 bp, Zea Mays
gggaatgcaagttgggattgcttggctggtcatacgaggaatcaaggaactagctgaggtctccttccctcaagatgacaaacaaacagaaaaaactaccctcaaggtgacctaaacacaaagggagctacataataccctacaagactagaccagtgccctcctaccattggcggcatgggatctcggtgatggaagggcaggggcagcacaggatctactgcattttttacaacgcagtggcagacattggagacgggttcgtgtgggatgccgactcctagctctactgccacgccagacactcttcccatatgaactttttgtgaagctctatagcaaggttgagttgcacccttttggtcttcataaccttggtaacaggccaatttatgctgggaatgcactttgtactgtgaaatataccgacgaggatccttgcatgatgagtattagatcaacttcattttcccctactgctgatgctatgtctgaaacaaaggttgcacctatcacccagggaaatctacatgggtgaatctgacatcccaagacacaaagcggcatgatcttgcaaatgcatgtgtagtagtcacaggaggcagaggtttaagaagtgctgaaaattttaagttgttggagcagcttgcggagaaatttggtgcagcagcgggcgcgactagggctgctgttgaagcaggttatgttccaaatgaccttcagagttgcaggagaaggctgcagcagcttgaatctcagctaatggaagcgaacagaatcaaagaggaaggcaacactggaagtatccgatggaaggagaacatattagaccaagagaatgaattacagaacataaaacaagagaacgacgacctgcagacaaaggaatcagcggcttctgagaagattaaggaactctcttcccagcttactaatgcaaaatatggcatgataaatagtaacaccaaggagataatgagaaggggggcactgaagaggacgatgaacctgttgtagtagttgccaaaatatgggagaacaacaagtttgttgactatgattcatctaaggagaaggagaatgatggtgactcacaggttgatttggaatcaaacaagggggatgcaggtcttgatagcaacgggttgcactcaactaaggagaacagtggcagggcatcaccaactaaacaacaccagcagtataagaagaagtctctgctgaagagattcggtggtctgctaaaaaagaaaagcgaaaattagcataaaactgtctgatgatattctttgttctatcatttgacatattttttgtaaaccctctcagagatgctgaaagccaacttactattgagagtactatgaaacctctcgcgcagtgtgaaataaatgacagaaatgaagtgtgtgttggtgttggtgctggtgctggagacactaacataaccggtggtattatccaattgtattggagttctattcttgaaaggtgcttggatacaaacgatcaaagcttgaaggaggcttgagtcaattgaatcatctgtaagtaatttagaagaaatattgtttttgttggtgaagcgagtttgttctttcctttgggctctatttatttatgaattgataacccaacaggattgtagtttgtagccatttagatttgaatccgagctatgactgagacgaatacaacatatgcattttgtagccatgtatatctgaatcagagctctgtgattgagatgaatatggttttatgtgccgtcgcaacacactgacattgtactatggtattataagtatcaatatgaagtatttctttg

SEQ ID NO: 71630 - DNA, 2597 bp, Zea Mays
aagtcattaatgtcagcaccactgatcatcatctaactacattagtttacaggggttcgaaaaattttataggggtgagctgaccccaataagaacatgtagctccacccctgctcctagctaactgtttggcagtggctaacaattagtcgacaaatattaagctgacaaacaatttactgggacttgttttaattattgtctaatagacgtataaaattaaagtatagtagatagtttgttttatccctgcaagacaaacaatagtagcatatttttctttctcttctatctgctaatagttttcttttcttcagacactcttcccatatgaactttttgtgaagctctatagcaaggttgagttgcacccttttggtcttcataaccttggtaacaggtaaaagtaagagtaggaaggtcaactggcatgcatacatgtgcttgctcattatggttttatgctattggtctgggcctttgtaagatcttaagtagaagggcaggcatggtgcaatggtgagagttgtctcattgagccaccaggtcgcgggtttgaattagcctctccgcatttcaggaggaaggcttgcctcggtttatctcttccccggaccccactcatgtggttgcctccggcactggatctgccttttgtaagatcttaggtgtatgctcctagaatatgtgtgatttacttccattaaagtatgctttgtgcatattaattagaggatgacgttttggacctagacaaaataaaagtcggacggccactgtcaagcattctccaaattcgttgcttattgtgacgtgtgtgtgcttgagttaacaactaataccatccccaactcatcctcatccatatagaattgcttgaaagcatgtgagtcttcctcaaatcacatgcacccaccatatgtattagtttatgggtgttaaaaagcatgagcctaaagattggattccatagaatggtcacatctggccattcaaataagtccataacttccttttgtgatgtttgcttttgttggagcttcatgtttgaattgatgtatgtatctgactttaggccaatttatgctgggaatgcactttgtactgtgaaatataccgacgaggatccttgcatgatgagtattagatcaacttcattttcccctactgctgatgctatgtctgaaacaaaggttgcacctatcacccaggctgcaagggaaaaaatacccctcttacttgatttattattttggcacccgtgaatagtaccttttttcaaaccttagggaaatctacatgggtgaatctgacatcccaagacacaaagcggcatgatcttgcaaatgcatgtgtagtagtcacaggaggcagaggtttaagaagtgctgaaaattttaagttgttggagcagcttgcggagaaatttggtgcagcagcgggcgcgactagggctgctgttgaagcaggttatgttccaaatgaccttcagagttgcaggagaaggctgcagcagcttgaatctcagctaatggaagcgaacagaatcaaagaggaaggcaacactggaagtatccgatggaaggagaacatattagaccaagagaatgaattacagaacataaaacaagagaacgacgacctgcagacaaaggaatcagcggcttctgagaagattaaggaactctcttcccagcttactaatgcaaaatatggcatgataaatagtaacaccaaggagataatgagaaggggggcactgaagaggacgatgaacctgttgtagtagttgccaaaatatgggagaacaacaagtttgttgactatgattcatctaaggagaaggagaatgatggtgactcacaggttgatttggaatcaaacaagggggatgcaggtcttgatagcaacgggttgcactcaactaaggagaacagtggcagggcatcaccaactaaacaacaccagcagtataagaagaagtctctgctgaagagattcggtggtctgctaaaaaagaaaagcgaaaattagcataaaactgtctgatgatattctttgttctatcatttgacatattttttgtaaaccctctcagagatgctgaaagccaacttactattgagagtactatgaaacctctcgcgcagtgtgaaataaatgacagaaatgaagtgtgtgttggtgttggtgctggtgctggagacactaacataaccggtggtattatccaattgtattggagttctattcttgaaaggtgcttggatacaaacgatcaaagcttgaaggaggcttgagtcaattgaatcatctgtaagtaatttagaagaaatattgtttttgttggtgaagcgagtttgttctttcctttgggctctatttatttatgaattgataacccaacaggattgtagtttgtagccatttagatttgaatccgagctatgactgagacgaatacaacatatgcattttgtagccatgtatatctgaatcagagctctgtgattgagatgaatatggttttatgtgccgtcgcaacacactgacattgtactatggtattataagtatcaatatgaagtatttctttg

SEQ ID NO: 71631 - DNA, 1678 bp, Zea Mays
caactggcatgcatacatgtgcttgctcattatggttttatgctattggtctgggcctttgtaagatcttaagtagaagggcaggcatggtgcaatggtgagagttgtctcattgagccaccaggtcgcgggtttgaattagcctctccgcatttcaggaggaaggcttgcctcggtttatctcttccccggaccccactcatgtggttgcctccggcactggatctgccttttgccaatttatgctgggaatgcactttgtactgtgaaatataccgacgaggatccttgcatgatgagtattagatcaacttcattttcccctactgctgatgctatgtctgaaacaaaggttgcacctatcacccagggaaatctacatgggtgaatctgacatcccaagacacaaagcggcatgatcttgcaaatgcatgtgtagtagtcacaggaggcagaggtttaagaagtgctgaaaattttaagttgttggagcagcttgcggagaaatttggtgcagcagcgggcgcgactagggctgctgttgaagcaggttatgttccaaatgaccttcagagttgcaggagaaggctgcagcagcttgaatctcagctaatggaagcgaacagaatcaaagaggaaggcaacactggaagtatccgatggaaggagaacatattagaccaagagaatgaattacagaacataaaacaagagaacgacgacctgcagacaaaggaatcagcggcttctgagaagattaaggaactctcttcccagcttactaatgcaaaatatggcatgataaatagtaacaccaaggagataatgagaaggggggcactgaagaggacgatgaacctgttgtagtagttgccaaaatatgggagaacaacaagtttgttgactatgattcatctaaggagaaggagaatgatggtgactcacaggttgatttggaatcaaacaagggggatgcaggtcttgatagcaacgggttgcactcaactaaggagaacagtggcagggcatcaccaactaaacaacaccagcagtataagaagaagtctctgctgaagagattcggtggtctgctaaaaaagaaaagcgaaaattagcataaaactgtctgatgatattctttgttctatcatttgacatattttttgtaaaccctctcagagatgctgaaagccaacttactattgagagtactatgaaacctctcgcgcagtgtgaaataaatgacagaaatgaagtgtgtgttggtgttggtgctggtgctggagacactaacataaccggtggtattatccaattgtattggagttctattcttgaaaggtgcttggatacaaacgatcaaagcttgaaggaggcttgagtcaattgaatcatctgtaagtaatttagaagaaatattgtttttgttggtgaagcgagtttgttctttcctttgggctctatttatttatgaattgataacccaacaggattgtagtttgtagccatttagatttgaatccgagctatgactgagacgaatacaacatatgcattttgtagccatgtatatctgaatcagagctctgtgattgagatgaatatggttttatgtgccgtcgcaacacactgacattgtactatggtattataagtatcaatatgaagtatttctttg

SEQ ID NO: 71632 - DNA, 2117 bp, Zea Mays
caactggcatgcatacatgtgcttgctcattatggttttatgctattggtctgggcctttgtaagatcttaagtagaagggcaggcatggtgcaatggtgagagttgtctcattgagccaccaggtcgcgggtttgaattagcctctccgcatttcaggaggaaggcttgcctcggtttatctcttccccggaccccactcatgtggttgcctccggcactggatctgccttttgtaagatcttaggtgtatgctcctagaatatgtgtgatttacttccattaaagtatgctttgtgcatattaattagaggatgacgttttggacctagacaaaataaaagtcggacggccactgtcaagcattctccaaattcgttgcttattgtgacgtgtgtgtgcttgagttaacaactaataccatccccaactcatcctcatccatatagaattgcttgaaagcatgtgagtcttcctcaaatcacatgcacccaccatatgtattagtttatgggtgttaaaaagcatgagcctaaagattggattccatagaatggtcacatctggccattcaaataagtccataacttccttttgtgatgtttgcttttgttggagcttcatgtttgaattgatgtatgtatctgactttaggccaatttatgctgggaatgcactttgtactgtgaaatataccgacgaggatccttgcatgatgagtattagatcaacttcattttcccctactgctgatgctatgtctgaaacaaaggttgcacctatcacccagtaccttttttcaaaccttagggaaatctacatgggtgaatctgacatcccaagacacaaagcggcatgatcttgcaaatgcatgtgtagtagtcacaggaggcagaggtttaagaagtgctgaaaattttaagttgttggagcagcttgcggagaaatttggtgcagcagcgggcgcgactagggctgctgttgaagcaggttatgttccaaatgaccttcagagttgcaggagaaggctgcagcagcttgaatctcagctaatggaagcgaacagaatcaaagaggaaggcaacactggaagtatccgatggaaggagaacatattagaccaagagaatgaattacagaacataaaacaagagaacgacgacctgcagacaaaggaatcagcggcttctgagaagattaaggaactctcttcccagcttactaatgcaaaatatggcatgataaatagtaacaccaaggagataatgagaaggggggcactgaagaggacgatgaacctgttgtagtagttgccaaaatatgggagaacaacaagtttgttgactatgattcatctaaggagaaggagaatgatggtgactcacaggttgatttggaatcaaacaagggggatgcaggtcttgatagcaacgggttgcactcaactaaggagaacagtggcagggcatcaccaactaaacaacaccagcagtataagaagaagtctctgctgaagagattcggtggtctgctaaaaaagaaaagcgaaaattagcataaaactgtctgatgatattctttgttctatcatttgacatattttttgtaaaccctctcagagatgctgaaagccaacttactattgagagtactatgaaacctctcgcgcagtgtgaaataaatgacagaaatgaagtgtgtgttggtgttggtgctggtgctggagacactaacataaccggtggtattatccaattgtattggagttctattcttgaaaggtgcttggatacaaacgatcaaagcttgaaggaggcttgagtcaattgaatcatctgtaagtaatttagaagaaatattgtttttgttggtgaagcgagtttgttctttcctttgggctctatttatttatgaattgataacccaacaggattgtagtttgtagccatttagatttgaatccgagctatgactgagacgaatacaacatatgcattttgtagccatgtatatctgaatcagagctctgtgattgagatgaatatggttttatgtgccgtcgcaacacactgacattgtactatggtattataagtatcaatatgaagtatttctttg

SEQ ID NO: 71633 - DNA, 4284 bp, Zea Mays
ctcaagtggtggccggagcacggagctgtttcgtttccgctcgcaggcaggcacagcgccaagcggcgaccgagagtccgagacccattcccatccacgcgaccacgctgccgttctctccccttcctccccgtcgcttccattcccgtccctcacaatctcacccccgccagccgagccccaaccctaacgaaatttacacctgcttcgtcggcgtgagcggtcttaggcgccgggcgtcgctgcggtccagcggtgtcggatccgggtcccgcgccgttaggtcgaggtttcttcggcgacggtgcagccgctggatgttagtctggcagatcggggccgaggtaatttccacgaacttagggggcaccttttcgcgttggtgctcaaaatggagaatttcggtgccgttcgggcaggtagctcctgatgaattgtgagttttaataggtgctaccttctcatctgttatcctagtgatctgtaatctttgcatatgattcaagtgtgatgtagtattggttttacctgatattgtgttagttcctgccacaaattcgtcaggtagatttaatttaccatcggctctttcgtgatttatcagttaaatatcgaaacatttagttacttatcgacgggggaaaaattacacggagaataattgttgcttgaaggcaatataatcatgacctgtcgaattgcgcatcgtattgtattctggctttgctttaattggataccgatcaataaaatactatacaggctagtttgggaaccccattttcccagagatttccattttcccaagggaaattagttcatttttccttgggaaaatagaaatcgcttagaaaatggaattctcaaactagctctacttgttccatcctgccatggttttgcacagtgcttattcggcagtaagaatagttgcgatatgctattttgttgtttggggtgaaggatctggcctttgagtgaactttggttttggaatatcttgttgctggtctacctaacagttgctttcttcctccacacattttcatccgactgtagttagccagcttccctaactttgtgccttcaattataaacaaacatctacttttgattatttttagctttcttattgtgaataagtgaagtggttgctttatagatgttgggggctgtttggtttgtggctaaacctgccacactttgcctaaggttagtcgttcgaattgaataactaaccttaggcataaaagttaggcaaagtgtggcaagttagtcatcaaaccaaacagacccttgatgttcccacctcttaagtatttagggatgtatgagaaatgcaaatgtactaaaaacatggtactagtgttcttccatttgctacaacatttgttttctccatacacttctgcctacccaaataaattcaaatacagcagaaacacgtagtattttgtttttttatatcctaaattcctaatttggacttatggccccctatctgatcattcttgtcttgttggactcattagtttatctttctccttttgtgacttcgtcacgttccattgcctctctccagtcccttcagtagtccaacccctgcaatatgctgcccaattcgttgtggattgcatttgtagtactccctgcattctaaattataggacgtcttggcttttctagatacatagcttttattatttatctagacatagtgtatctagaaaaacgaagatgtcttataatttggaacctagggaatagattcctaaaggctacaagattatcatgtgcatttctattcgacaaataataataattccaatcatactggttcttttgatgatcttgttgtggatgccccttagcttcctctttgggggtgttttcttctgtctatgtggtacccctagctccctctgtaggcttagagtgcacatgtctatactacatactatcgtgtttaactttatactaagtttttgctcatttctttattgaagacgaccttattattgttattgtatccctgtacagctaggcagtgttgggttgtaaaatttgtatcgcgtgaatgaactcagagcatctcaatgttaaaactgtaaaaggggcagacctggtgccagaggctcccacatgagtgggttctagggaagggataatccgaagcaagcctcccccctgcaaatgcagagatgtggctttgaacccgtgacctggtgactcagtgagacacctctcaccactgcaacgggcgtgtccttcctcagcgttaaaactgagcatattaattcccctgcttaagcaatatgggagctaattgctgcgttgctgcaaaggagaggacacagccgtgcatcactcctatagaagtatcgacatacaggaatgtgaggcgctcgccatcatggaacattcgatgggacaatcgcacacatatagaagacataatggatattcctactctgttctccaaccatagtagtggaagcattcatcctgatacaaagagtggttccattgctccaactgaagggttctctaatggaaatagccttggaactagcccttccaatgtgttccatggagcaaagtggcacaaatctgataaaaaaatggaagcacgcaaggttacaaagtctgattctcgagctgatcgctccacagcaagtaactcttctcctgagacaaagctttccaggaaatcactggacatatcaagtgttgcttcagatttgaagacttcagtgtctgttccttcaacgccacccttagtatccagagcagatccgtcatcctccaaggggcattctcaacctacagattcagatttgatgaagaaagcatggcggtcaccagggtatcaattatacagacaggtttcggacagtaaaattccatctctcagatctctcaatgagataaggtctcctgaaggaaggcctccctcttccatgttatcagcctgcagcaacgacttgtcagcagcaggatcctatggtgagtcatccgatggttggtcaatgcgcacattttctgaaatggtctcaacatcccaaagagagaggtggtcacttgacagtgagctcttgggatccatttctagtaaaatgacaagatcaagtgcttcgagttctactacacgcccccctgaccaagacgtgtgcaagctgtgtttaaagctgctaaaggagagatcgacatggaacgcgcaggagctggctgttgttgctgttttgttgtgtggacatgcataccatgctgactgtctggacagcataactacagaagctgacaaatatgatcctccatgccctgtgtgcacgcacggtgagaaattttcagtgaagctatttgggaagctggaatcaaagatcaagaacaagataccaaaaaatgtgtcagttgatattaatctagatgggaatagtagtaataagcaccagaagaaaggtagaagagagcccaggttaggtacaagttcaagcatgaaggtcccatttagtcgtccatttttgaggagacatttctccattggatctcgaccacctcggtcggtctcagaaactgattccacaagaaagaagggattctgggcaagacactgggagagagtagaatagaatccaattgtcgttaggaaggatctttaagaagaggtgaactcctcagcatgcaagctagtggaggtgaactccccagtatacaagggctgccgagcaaccaacatatttggaagtttctctcagccatcgtattctgatactggtgcagagcgcacaacaaggtttcttataccatgcgaggcagggtcgttgtaggccccgcttgcatctaagtaatagtagtatcgatctaacagaaacggtgtggccttcctggatttaaggcccaatgctgggttataagattacacaaccagcatgctagattatttactgtacccgcagtttttttaattattggctaaggtatttgttggtggttgatggaatgcgtttaatttgaaggctttagtggtactgtagaacttttcaatcagattggctgaactgatcatccttgcgttcacatatactaaatatagacgcacttatagggtgtttggtttgaggagtgagttagtctcatctttttattccgtattttttgtttggtttgtggaatagaatgagctgattcatcatcaacttatttctcatagttagttaatactaatataataattctcatagttagttaatactaataatgattctcatagttagttaaaactaa

SEQ ID NO: 71634 - DNA, 4297 bp, Zea Mays
gagcacggagctgtttcgtttccgctcgcaggcaggcacagcgccaagcggcgaccgagagtccgagacccattcccatccacgcgaccacgctgccgttctctccccttcctccccgtcgcttccattcccgtccctcacaatctcacccccgccagccgagccccaaccctaacgaaatttacacctgcttcgtcggcgtgagcggtcttaggcgccgggcgtcgctgcggtccagcggtgtcggatccgggtcccgcgccgttaggtcgaggtttcttcggcgacggtgcagccgctggatgttagtctggcagatcggggccgaggtaatttccacgaacttagggggcaccttttcgcgttggtgctcaaaatggagaatttcggtgccgttcgggcaggtagctcctgatgaattgtgagttttaataggtgctaccttctcatctgttatcctagtgatctgtaatctttgcatatgattcaagtgtgatgtagtattggttttacctgatattgtgttagttcctgccacaaattcgtcaggtagatttaatttaccatcggctctttcgtgatttatcagttaaatatcgaaacatttagttacttatcgacgggggaaaaattacacggagaataattgttgcttgaaggcaatataatcatgacctgtcgaattgcgcatcgtattgtattctggctttgctttaattggataccgatcaataaaatactatacaggctagtttgggaaccccattttcccagagatttccattttcccaagggaaattagttcatttttccttgggaaaatagaaatcgcttagaaaatggaattctcaaactagctctacttgttccatcctgccatggttttgcacagtgcttattcggcagtaagaatagttgcgatatgctattttgttgtttggggtgaaggatctggcctttgagtgaactttggttttggaatatcttgttgctggtctacctaacagttgctttcttcctccacacattttcatccgactgtagttagccagcttccctaactttgtgccttcaattataaacaaacatctacttttgattatttttagctttcttattgtgaataagtgaagtggttgctttatagatgttgggggctgtttggtttgtggctaaacctgccacactttgcctaaggttagtcgttcgaattgaataactaaccttaggcataaaagttaggcaaagtgtggcaagttagtcatcaaaccaaacagacccttgatgttcccacctcttaagtatttagggatgtatgagaaatgcaaatgtactaaaaacatggtactagtgttcttccatttgctacaacatttgttttctccatacacttctgcctacccaaataaattcaaatacagcagaaacacgtagtattttgtttttttatatcctaaattcctaatttggacttatggccccctatctgatcattcttgtcttgttggactcattagtttatctttctccttttgtgacttcgtcacgttccattgcctctctccagtcccttcagtagtccaacccctgcaatatgctgcccaattcgttgtggattgcatttgtagtactccctgcattctaaattataggacgtcttggcttttctagatacatagcttttattatttatctagacatagtgtatctagaaaaacgaagatgtcttataatttggaacctagggaatagattcctaaaggctacaagattatcatgtgcatttctattcgacaaataataataattccaatcatactggttcttttgatgatcttgttgtggatgccccttagcttcctctttgggggtgttttcttctgtctatgtggtacccctagctccctctgtaggcttagagtgcacatgtctatactacatactatcgtgtttaactttatactaagtttttgctcatttctttattgaagacgaccttattattgttattgtatccctgtacagctaggcagtgttgggttgtaaaatttgtatcgcgtgaatgaactcagagcatctcaatgttaaaactgtaaaaggggcagacctggtgccagaggctcccacatgagtgggttctagggaagggataatccgaagcaagcctcccccctgcaaatgcagagatgtggctttgaacccgtgacctggtgactcagtgagacacctctcaccactgcaacgggcgtgtccttcctcagcgttaaaactgagcatattaattcccctgcttaagcaatatgggagctaattgctgcgttgctgcaaaggagaggacacagccgtgcatcactcctatagaagtatcgacatacaggaatgtgaggcgctcgccatcatggaacattcgatgggacaatcgcacacatatagaagacataatggatattcctactctgttctccaaccatagtagtggaagcattcatcctgatacaaagagtggttccattgctccaactgaagggttctctaatggaaatagccttggaactagcccttccaatgtgttccatggagcaaagtggcacaaatctgataaaaaaatggaagcacgcaaggttacaaagtctgattctcgagctgatcgctccacagcaagtaactcttctcctgagacaaagctttccaggaaatcactggacatatcaagtgttgcttcagatttgaagacttcagtgtctgttccttcaacgccacccttagtatccagagcagatccgtcatcctccaaggggcattctcaacctacagattcagatttgatgaagaaagcatggcggtcaccagggtatcaattatacagacaggtttcggacagtaaaattccatctctcagatctctcaatgagataaggtctcctgaaggaaggcctccctcttccatgttatcagcctgcagcaacgacttgtcagcagcaggatcctatggtgagtcatccgatggttggtcaatgcgcacattttctgaaatggtctcaacatcccaaagagagaggtggtcacttgacagtgagctcttgggatccatttctagtaaaatgacaagatcaagtgcttcgagttctactacacgcccccctgaccaagacgtgtgcaagctgtgtttaaagctgctaaaggagagatcgacatggaacgcgcaggagctggctgttgttgctgttttgttgtgtggacatgcataccatgctgactgtctggacagcataactacagaagctgacaaatatgatcctccatgccctgtgtgcacgcacggtgagaaattttcagtgaagctatttgggaagctggaatcaaagatcaagaacaagataccaaaaaatgtgtcagttgatattaatctagatgggaatagtagtaataagcaccagaagaaaggtagaagagagcccaggttaggtacaagttcaagcatgaaggtcccatttagtcgtccatttttgaggagacatttctccattggatctcgaccacctcggtcggtctcagaaactgattccacaagaaagaagggattctgggcaagacactgggagagagtagaatagaatccaattgtcgttaggtgggttggtctcaattattatgttttggaaggatctttaagaagaggtgaactcctcagcatgcaagctagtggaggtgaactccccagtatacaagggctgccgagcaaccaacatatttggaagtttctctcagccatcgtattctgatactggtgcagagcgcacaacaaggtttcttataccatgcgaggcagggtcgttgtaggccccgcttgcatctaagtaatagtagtatcgatctaacagaaacggtgtggccttcctggatttaaggcccaatgctgggttataagattacacaaccagcatgctagattatttactgtacccgcagtttttttaattattggctaaggtatttgttggtggttgatggaatgcgtttaatttgaaggctttagtggtactgtagaacttttcaatcagattggctgaactgatcatccttgcgttcacatatactaaatatagacgcacttatagggtgtttggtttgaggagtgagttagtctcatctttttattccgtattttttgtttggtttgtggaatagaatgagctgattcatcatcaacttatttctcatagttagttaatactaatataataattctcatagttagttaatactaataatgattctcatagttagttaaaactaa

SEQ ID NO: 71635 - DNA, 4907 bp, Zea Mays
gtattttaacaaattgttcatggggagaatggggatacaatctttcatttggatgtctattttgatgacaccaacatgcactttgtgcatagggtctaagaatcagaggttatagaggcattgaaaagggtgggtgaagatgcctagctataatatagctaatcaagttgttcaaccatatcttttggtctaacaagatgcatgacaagtggagaagtatattggtaccgatctacaagaacaagggagatattcaaagttgtactaattatcgtggaattaagttgttgagccacactatgaatctatggagattattatcgagcatcgtctgagaggataacgcggatacctatgaaccaatttggtttcatgtctgaaaggtcaaccatagaagtcattttcttaataagacaagtgatggagcgcaatatatggagcaagaaggacctacacatggttttcattgacttggagaaggcttatgacagatatcaaggaacactatgtcgtggactttggacaaatataaagttccaacgaagtacgttgcacttattaaggacatgtacaataatattgtgactgttcgaacatgtgatggtgacacaagtggcttctttcttagaataggactagctttgagcccttactttttttttgttgatggataaggtcacaagagacgtacaaggggatattctttggtgtatgttttttatagatgatgtagtgctagttgatgaaagtggacaagagtaaataggaaactagagttgtggcggaagactctagagtccaaagcttttagactcaatagaactaaaattaaatatatgagatgtgacttcagcacagctacacatagaattaaacagggtggatgaagtggtgtcaggaatctggtgttctatatgacaagagggtatcacagaagctaaaaggcaagttttatatgatgacgattatacctgttatgttgtatgatgcagaatgttggcctagaaaaagccgacatatacatcagataagtattgcaaaaatgcgtatgttgctttggatttatggctattcaagaaatgattgagtctagaacgatgatatacatgataggctaggggtatgaagatcttttccaacatcggttgagatggtttggacatatccaacgatgacctacagaggcaccaatgtgtagtgggattctaaggcacgataacaatgagaagagaggtaaggaaaggctggagttgatatgggaagcagtaaaaggagacttaaaaggatgaaatatacctaaaaatttagtcttgaataggagtacatggaaaacaggtatccatgtgtctaaaccttgacttgtggttttctgttggatttcaactctaccctaccccaacttgcttgagactggaaggctttgttgttgactagatatgtaaaaaaacattagcaatatttgtatctttaaatactagttatgtactatagtctataaatatcaatattttcttgtattatttggtcaaagctgagtatgtttgacttttcgggaagtaagaacaacagttaaaaagggatggagggagtgactagaagaaaatgaacattcagtgtatgttacaactttctaataatgttcatacaggaagctcacacttgatagacttgtcatgtgaagtgttcacaccaatattaagtatttgaactactcttttgttcaatttgcgaaagggcctctagccgagttggttaggtggtctgagtagcactcctcaggtcctgggttcgactcccccgtgggagcgaatttcaggctgtggttaaaaaaaaccatctcgtctggcccacgccgaagcacaggtctaaggatcagcctcggtcgtggtcgtggtcgttctcacatgggcttcgatgccgctgtgcatgggtggggcaggggtttgggggttttctcgacctgtgtgagaatgtcttattcttaatacaatactcgggggctgtcttacccccgcatgtcgagttttttttttgttcaatttggtcaaacatagctatgttttaaattgggctgacttcaggttgtataggaaccaacttcaactatccatatataattattggataaattaaaaggatactttcactgaagtcactagaatatgttatttaattatatttattgattttgtactgtttttttggacttatggatttgttgaatacggtccaggtcctgttacaattgcagatagagaagcagaagaagcaatggtgtcagttatactgaagagcttccctactcatgccatttttggcgaggagaatggttggagatgtgcagagaattctgctgattttgtttgggttttggatccaatagatggaacgaaaagtttcataactggcaagcctctttttgggacgcttatagcacttttgcacaatgggaagccggttattggtgtcattgaccagccaatcttgcgagaaagatggattggggtggatggaaaacaaacaactttgaacggacaagaaatatctgttcgctcttatatacaacaagcccacatctctttgaagcagatgctgaagatgcatttattcgtgtaaggaataaggtgaaagtcccactttatggctgtgattgttatgcttatgctcttctggcttctggttttgtggatattgttgttgaatctggtttgaagccatatgatttcctctcgctggtacctgtcattgaaggagctggagggtcaataactgattggagaggggacaagctccattggcctgttactgcagaatcacggcccacaagttttaacgtggtagcagctggggatgcccgtgtccacaaagaggcccttgatgcgttgcggtggcgctagcgtgctctttagataagcattatactaataaccaactatttagacatttacatgtgatatttgtatgaacaataataagctttacctgtatgcttgttggttggcctcaacctttgcactaataatagatagcttggttgtaaactaccaagcagtggcttgctgtttgcatcaagcagatattatgtcttgggaatgctaaatgtgtgaggtcttaccttagtgtgagctgcccttgcacccagcaattcagctgcgctgttagtgcttggggatgcttaatcgagtgtttgattgttgttgcttccatggctttctgggtgctgcaccatagctgaattgcgaactatgatttccagccttgaactttggaccgaagtctagggtcagtctgggctttaggcgatgacgttttctggcttcagatgcctaaggttcattgagccatgtctccaatcatccaacggttataaaagaatatgtataaggatgcatatgtcacatgaagaccacgataaggctatcttttttgttttattaatgattgtgataaatgtgctgtttctagctatagttttgctcttcgataatagctagacagccttctccccgattttactcacatatgacgattgatggtgcagtcactacggttagaagccgtcaacaatcatgcagccacggtcgaaattgtctctacgactaatggcagaaattttcgtcttggacaggtagagatggtcattaactagtaaagtgcgcgcgccttgcgtgcgtgggaaacaatttagaactttcgtattgaagatgttttatgttagttgtttaaaggagttgagcagacatatataattactaggtgtgtgtccgtgcgtcgcaacggaaatatataataccattgataatttatgtatgttggggatgagcatcaacacatatgtgaccggatattcttcttctttcttggggatctggagaaaagcctgttcggaagccaaacatgttaagacctgatcatgtgctgcccttgtgtctctgatcatcatcagcacactgttcgacgctgcttgtatgagtcttgttaatttgcatgcctcatgcatagtctctcaaccatcaattcactatggtatacagaatccgtgtgacagacattatcaaattcacataaattattttaaagagtcaatatagagttttatatgatagagaaatacatgtggattaaaaaatgctaaacaaaagatctaaaatataacagtttgatcaagttgcataagatgtacaatttttccaactgcttctgcatttggaagtccacctttctatgttatctttgctatttctgacttaatagaatccaaatagtattgaacactaagaaaaatacaaaacgagatggagttgtgttgactgaaaaacatatgtatgtagcatttggaataaaaatatatactttaagtatttaagtaccagataatgccagacaagggattaatgccacagagcaaagtataaaatccatgactagatatttcataaattattaatctttatttttgcataattttagattttttatcgtttaaatgtgggagaggagagagaggtgaatggaatagtagagataagatatataagaaatagggatctgcaccaagaacataaacacaaattaattagcatattcttgccccctcaagttaaaatcatgcatcaatagtacgacaacaatacaaatccgatgtgcatactacataacaggaatgtaggcattaattaaaaaagtaattgctagtattagtagtaccttctagggttgagtcttcctcaacacccttgtatgcccagtggcatgatgcaatgatgttctcagacgcatatctttaagcagtgtatgtgtctctgctttgtcatacaaattaaaaactatcaaaaagtatttatacaaaattgtaatagatatagatacgtagatagtatctttaagcagtgtacatatgtagatac

SEQ ID NO: 71636 - DNA, 1472 bp, Zea Mays
ctttatttacttcccttcagaaatggcatctataaagcgcccatatcaaacagcaagcacatcgctgtcccagcagcagcgcctgcgcctgtgctctctcctcttcttcctcaaccctcgccgcaacaggagagctctcgatcagcgccgcccggcccacctcgcccgcggcctaacattaggctcggggactacggtgcagccaaggatgacttgccgatctatcgtcgatcaacgagcgacgcctctgatgtctgatctcgacatctatcgtcgtcagaccatcatcatctatcggcaagttgttcttggctacaccgtggctcctgctcctgatgtaaggctttgtcgtctgcggcgacacgtacttttttttcccctatcgtcgtctgatgatgatgatcgagctgagggtaatttaaggaaggtcaatcacatcaaatcaaggtaacatataatataggactagtagtaggagtttacgtacgattattcattctacagcatctgttcttcttctaagcaatcacgtaacgtacacctgctagctagtatagtgtcctgatttatttagcaactagtacgtatgtactatatataacaagacgagagaagtgacaggaaatctatagcagtgataggataaagctcttgcagattatgcgtgtgtgtggcactgctgctgccagccagtgccaaggccgccatgcatgcacaaatccgtcgtctccaacttcttgcagctgagccagcggctcaacatagcagaggagattgaaggcgacgaatgagaagagagcacatgatgcaagggaatgggagacggctagagtcgagaaacagatgttggagaatcttgttgatcgtctcaagggaaagattggatgtgccgtgaactatctcgcagatgaggcacgtgcaagatacgttcaggaaaaatggcaacggtggagctgatggaggaggaggacacatcaaggttgagtgagcttatcgctcttgctaaggcaggattacatggggaagaggaggaggacacatcaatgttgagtgagctcatcgcactagctgaggcaggattacgtgctcaagaggaggacgagtttatgtctcaggccgccgaagaggtagaggccacttattacaagcagaagtgcgatgaaactaaggctgaggatcagctattctcccgagctgcagatgaagcagaagccaattattataagagaaacgcggaaaagtgtcatactggacaatgcattaagtggaacgaggttgtcgttgaggattgcacgacgaatgactctgaagatgagttacttatagattgtgattctgattgaacaagctagtagtgtgttatgtagtactttcatatccaaaatgttttagaaccctaatgtttcagattcgtaacgtttctattgcattgtcatgtttttccaattcacaaaaaaattcgcaagagtttc

SEQ ID NO: 71637 - DNA, 1262 bp, Zea Mays
ctttatttacttcccttcagaaatggcatctataaagcgcccatatcaaacagcaagcacatcgctgtcccagcagcagcgcctgcgcctgtgctctctcctcttcttcctcaaccctcgccgcaacaggagagctctcgatcagcgccgcccggcccacctcgcccgcggcctaacattaggctcggggactacggtgcagccaaggatgacttgccgatctatcgtcgatcaacgagcgacgcctctgatgtctgatctcgacatctatcgtcgtcagaccatcatcatctatcggcaagttgttcttggctacaccgtggctcctgctcctgatgtaaggctttgtcgtctgcggcgacacgtacttttttttcccctatcgtcgtctgatgatgatgatcgagctgagggtaatttaaggaaggtcaatcacatcaaatcaagattatgcgtgtgtgtggcactgctgctgccagccagtgccaaggccgccatgcatgcacaaatccgtcgtctccaacttcttgcagctgagccagcggctcaacatagcagaggagattgaaggcgacgaatgagaagagagcacatgatgcaagggaatgggagacggctagagtcgagaaacagatgttggagaatcttgttgatcgtctcaagggaaagattggatgtgccgtgaactatctcgcagatgaggcacgtgcaagatacgttcaggaaaaatggcaacggtggagctgatggaggaggaggacacatcaaggttgagtgagcttatcgctcttgctaaggcaggattacatggggaagaggaggaggacacatcaatgttgagtgagctcatcgcactagctgaggcaggattacgtgctcaagaggaggacgagtttatgtctcaggccgccgaagaggtagaggccacttattacaagcagaagtgcgatgaaactaaggctgaggatcagctattctcccgagctgcagatgaagcagaagccaattattataagagaaacgcggaaaagtgtcatactggacaatgcattaagtggaacgaggttgtcgttgaggattgcacgacgaatgactctgaagatgagttacttatagattgtgattctgattgaacaagctagtagtgtgttatgtagtactttcatatccaaaatgttttagaaccctaatgtttcagattcgtaacgtttctattgcattgtcatgtttttccaattcacaaaaaaattcgcaagagtttc

SEQ ID NO: 71638 - DNA, 1102 bp, Zea Mays
aagcacatcgctgtcccagcagcagcgcctgcgcctgtgctctctcctcttcttcctcaaccctcgccgcaacaggagagctctcgatcagcgccgcccggcccacctcgcccgcggcctaacattaggctcggggactacggtgcagccaaggatgacttgccgatctatcgtcgatcaacgagcgacgcctctgatgtctgatctcgacatctatcgtcgtcagaccatcatcatctatcggcaagttgttcttggctacaccgtggctcctgctcctgatgtaaggctttgtcgtctgcggcgacacgtacttttttttcccctatcgtcgtctgatgatgatgatcgagctgagggtaatttaaggaaggtcaatcacatcaaatcaagagcagaggagattgaaggcgacgaatgagaagagagcacatgatgcaagggaatgggagacggctagagtcgagaaacagatgttggagaatcttgttgatcgtctcaagggaaagattggatgtgccgtgaactatctcgcagatgaggcacgtgcaagatacgttcaggaaaaatggcaacggtggagctgatggaggaggaggacacatcaaggttgagtgagcttatcgctcttgctaaggcaggattacatggggaagaggaggaggacacatcaatgttgagtgagctcatcgcactagctgaggcaggattacgtgctcaagaggaggacgagtttatgtctcaggccgccgaagaggtagaggccacttattacaagcagaagtgcgatgaaactaaggctgaggatcagctattctcccgagctgcagatgaagcagaagccaattattataagagaaacgcggaaaagtgtcatactggacaatgcattaagtggaacgaggttgtcgttgaggattgcacgacgaatgactctgaagatgagttacttatagattgtgattctgattgaacaagctagtagtgtgttatgtagtactttcatatccaaaatgttttagaaccctaatgtttcagattcgtaacgtttctattgcattgtcatgtttttccaattcacaaaaaaattcgcaagagtttc

SEQ ID NO: 71639 - DNA, 1408 bp, Zea Mays
catcgctgtcccagcagcagcgcctgcgcctgtgctctctcctcttcttcctcaaccctcgccgcaacaggagagctctcgatcagcgccgcccggcccacctcgcccgcggcctaacattaggctcggggactacggtgcagccaaggatgacttgccgatctatcgtcgatcaacgagcgacgcctctgatgtctgatctcgacatctatcgtcgtcagaccatcatcatctatcggcaagttgttcttggctacaccgtggctcctgctcctgatgtaaggctttgtcgtctgcggcgacacgtacttttttttcccctatcgtcgtctgatgatgatgatcgagctgagggtaatttaaggaaggtcaatcacatcaaatcaaggtaacatataatataggactagtagtaggagtttacgtacgattattcattctacagcatctgttcttcttctaagcaatcacgtaacgtacacctgctagctagtatagtgtcctgatttatttagcaactagtacgtatgtactatatataacaagacgagagaagtgacaggaaatctatagcagtgataggataaagctcttgcagattatgcgtgtgtgtggcactgctgctgccagccagtgccaaggccgccatgcatgcacaaatccgtcgtctccaacttcttgcagctgagccagcggctcaacataggagattgaaggcgacgaatgagaagagagcacatgatgcaagggaatgggagacggctagagtcgagaaacagatgttggagaatcttgttgatcgtctcaagggaaagattggatgtgccgtgaactatctcgcagatgaggcacgtgcaagatacgttcaggaaaaatggcaacggtggagctgatggaggaggaggacacatcaaggttgagtgagcttatcgctcttgctaaggcaggattacatggggaagaggaggaggacacatcaatgttgagtgagctcatcgcactagctgaggcaggattacgtgctcaagaggaggacgagtttatgtctcaggccgccgaagaggtagaggccacttattacaagcagaagtgcgatgaaactaaggctgaggatcagctattctcccgagctgcagatgaagcagaagccaattattataagagaaacgcggaaaagtgtcatactggacaatgcattaagtggaacgaggttgtcgttgaggattgcacgacgaatgactctgaagatgagttacttatagattgtgattctgattgaacaagctagtagtgtgttatgtagtactttcatatccaaaatgttttagaaccctaatgtttcagattcgtaacgtttctattgcattgtcatgtttttccaattcacaaaaaaattcgcaagagtttc

SEQ ID NO: 71640 - DNA, 2597 bp, Zea Mays
agcagcgcctgcgcctgtgctctctcctcttcttcctcaaccctcgccgcaacaggagagctctcgatcagcgccgcccggcccacctcgcccgcggcctaacattaggctcggggactacggtgcagccaaggatgacttgccgatctatcgtcgatcaacgagcgacgcctctgatgtctgatctcgacatctatcgtcgtcagaccatcatcatctatcggcaagttgttcttggctacaccgtggctcctgctcctgatgtaaggctttgtcgtctgcggcgacacgtacttttttttcccctatcgtcgtctgatgatgatgatcgagctgagggtaatttaaggaaggtcaatcacatcaaatcaagattatgcgtgtgtgtggcactgctgctgccagccagtgccaaggccgccatgcatgcacaaatccgtcgtctccaacttcttgcagctgagccagcggctcaacatgtaacactctgccctatcccccccccccccccccccccaaaaaaaaaacttggaactctgcaaaagaggattcaatttatctggtccaactgcacttccagtttgtttccttttttttgccatttgattcagtttttgccacatgacgcttgaataatgcatgttttgggccgtgttattattgcgttacactaagttagctgaaccaagagggaaaaggtgtttttaggcgtttacatcgtcaggtagtacaaagtgtagaacaattgtgctctatatcttgtactcttctcgatgtcagcacgaaccggccgatttatatatgtacgtaaatatacacgcatacatacatataaatttagttaaacttaaaacaccttggccctttaattaagaaagatataataatttataatttaaaatggaggaagtagctcatgacgacatgaatatattcacataacatcgtcgtataattttaaaatctacatataatactgaccccttattaaatcttaaatttctttttatattaaacataaaataatatgcttcgataaagcttattacatgggactatgatgatatccaatatattaaaaaaaacagagttaaatgtatgatcgagacctgaacttgttaagggatactacttatatttatgaattttaaaaacatatttctagagtggcgtatcacagtggccggtatagtctaaaaatggatcagtgatgcactatttttatattttttataagtttaaggatgcatgtgacgccacttaacaagtttaagaatctaaaaatacattttcaaaattcgtgaatctagacaacatacctttacaaattcaaatgccaccggtgcatctaactcaaaaaactataacatcaacggagggagtagaagcaaatacagccgtatgcccagcatgtatgcagcatccattcaccgtgcccggcagatggagatggcacaccaccaccgccctcgccccgggtttgtttgggcaccgctgtacccttcgtacggaacacacggcggtcccctctctgatccgctttgtctgtttatcaggccgggctttgacgtgtgatatactggctaaagatgacaacaagtacccataagtagtgtatgaatatggattaaatactctatctattaatattttattagacaaaaacattcatctaatgggtatacggtattagaactttttgttcttacctacacccgttaatccgtgggtataaaatacccaatataaacttgacaaaaaccataaactctagtacaaaataaataaaaccctatatatataatctctttctactatagaagtccacggactgtcgtgctccggttcaacttgatcacaacctcgtccaatcaactgtgtaactataatttccgagcacattttatagttgtttcttgtgcaactatgtaattagacattatttctacatatctgaacataatcctaaccatgcagtttaatttttccagtctagtgtgtctataatgttcagtaaccggtatttttttacagttcagtatattttttgaataattcttaccgatatgatataagtctaatctttgtggctcgggtgacaaaagcttgtaatcgtttatgttgttttagtttatattttacgctctgatctactcgaaccagaaacagacgcattggacgcgtgtcgacctagcccgcaaaacgtgtgtggggtatgcctgctcggggctagccttgagcttccattaccttctccctatatatatatatatatataattaaaatataataaatagtggtatgtacctgtatgaatccaatagaaacatatctccagcgagaaaatcccttcaacatcatccatacttatatcaatctcttcaatgctatcaaattgaaattttaaacccttgaatgtcatcgtcgttagtttgaaactgttactttcatttaaaattccttcaatgccatcaaaatctatattgatcccttcaatgccactaaaaatttatcggtgttcggactcgtggtcctaaccaactagtgaagtgatgccgtgttccccgaatccagatggcgatgcgagttgacataag

SEQ ID NO: 71641 - DNA, 1163 bp, Zea Mays
gcagcgcctgcgcctgtgctctctcctcttcttcctcaaccctcgccgcaacaggagagctctcgatcagcgccgcccggcccacctcgcccgcggcctaacattaggctcggggactacggtgcagccaaggatgacttgccgatctatcgtcgatcaacgagcgacgcctctgatgtctgatctcgacatctatcgtcgtcagaccatcatcatctatcggcaagttgttcttggctacaccgtggctcctgctcctgatgtaaggctttgtcgtctgcggcgacacgtacttttttttcccctatcgtcgtctgatgatgatgatcgagctgagggtaatttaaggaaggtcaatcacatcaaatcaagaggagattgaaggcgacgaatgagaagagagcacatgatgcaagggaatgggagacggctagagtcgagaaacagatgttggagaatcttgttgatcgtctcaagggaagtgagtgagaaaaatgacatgatagttttgttggtacaatttatttatcctgactttgcaaactaatttatctcattacatttgcagagattggatgtgccgtgaactatctcgcagatgaggcacgtgcaagatacgttcaggaaaaatggcaacggtggagctgatggaggaggaggacacatcaaggttgagtgagcttatcgctcttgctaaggcaggattacatggggaagaggaggaggacacatcaatgttgagtgagctcatcgcactagctgaggcaggattacgtgctcaagaggaggacgagtttatgtctcaggccgccgaagaggtagaggccacttattacaagcagaagtgcgatgaaactaaggctgaggatcagctattctcccgagctgcagatgaagcagaagccaattattataagagaaacgcggaaaagtgtcatactggacaatgcattaagtggaacgaggttgtcgttgaggattgcacgacgaatgactctgaagatgagttacttatagattgtgattctgattgaacaagctagtagtgtgttatgtagtactttcatatccaaaatgttttagaaccctaatgtttcagattcgtaacgtttctattgcattgtcatgtttttccaattcacaaaaaaattcgcaagagtttc

SEQ ID NO: 71642 - DNA, 922 bp, Zea Mays
ataatatttatctttatatctctgaataaatttattataaaaatgtattctataaatagcctaaatagacttattttatattatgaacgtttatacttttatataaatctctactactctataagactctaacgtagaccatccgtgcgccatggttctgccctctcacatgttctgcaaaatcaatgagttttaacagcccgatgcgtgcagagcagaggagattgaaggcgacgaatgagaagagagcacatgatgcaagggaatgggagacggctagagtcgagaaacagatgttggagaatcttgttgatcgtctcaagggaaagattggatgtgccgtgaactatctcgcagatgaggcacgtgcaagatacgttcaggaaaaatggcaacggtggagctgatggaggaggaggacacatcaaggttgagtgagcttatcgctcttgctaaggcaggattacatggggaagaggaggaggacacatcaatgttgagtgagctcatcgcactagctgaggcaggattacgtgctcaagaggaggacgagtttatgtctcaggccgccgaagaggtagaggccacttattacaagcagaagtgcgatgaaactaaggctgaggatcagctattctcccgagctgcagatgaagcagaagccaattattataagagaaacgcggaaaagtgtcatactggacaatgcattaagtggaacgaggttgtcgttgaggattgcacgacgaatgactctgaagatgagttacttatagattgtgattctgattgaacaagctagtagtgtgttatgtagtactttcatatccaaaatgttttagaaccctaatgtttcagattcgtaacgtttctattgcattgtcatgtttttccaattcacaaaaaaattcgcaagagtttc

SEQ ID NO: 71643 - DNA, 2385 bp, Zea Mays
ttcaccatttttttgaatttgaaatttaaaacaagtccgaaaattcggatttcggtaaaaaccggtcaattcctcttttttcgctggtgaccgaaaaatcaaaccaaaacggtttgttctgatcggaccccagatccagattactgctaaataaaaagcatgtgaaggccttcctccccctcccagtcgcccttcaacttgccagccgatcccttcgcgtttgtctccgcggttccgacgctccgcactccgctcccctctcccaagcaaacacagccgagtccacgcacgcctcccatcattcctcaaccgcctcgccggagcaaggggagtagcggaggatggagattgaccaggcggtgcgcgggtgcagcgaccgccgcatgcgcaccaagtacagcaacgccgtctacgtcgtccagcgggccttcgcgctctacccatttgaggaagttgccttcagctttaatggtgggaaggattcaactgtgctcctgcatttgattcgagctggttactacctttacaagaaggactctggtgatgtagcccaaacagatgctgttaaaaactgtccactgcgtactatctatttcgaaagcccttgtgctttccctgaaatcaattcattcacttatgagattgtctcaacgtaagagttgtctaagatgtgtctaactttacccttagtctatccgctatttaaggaagggcaggcctggtgcggtggcgagctgtctcactgaatcatcaggttatgggttcgaaacaacctccgtattttcggagggaaggcttgcttcggtttatcgctatcctagatcacactcatttatgggttacctctggaaaccatccattcagatttcaagtctggtctagaaggccttctgaaggagaagcccaccaaagcaattttcattggcacaagaattggtgatccaaatgcggttggtcaagaacagttctctcctagttcacctggctggcctccttttatgagggtgaatccaatcttggattggtcatacagggatgtttggtcttttctaataacatgtaaggtcaaatactgcagcctttatgatcaagggtatacttccattgggagcatacacgatactgttccaaatgcactccttagtgattcatcatctgagaaaagttttagaccagcatacatgctaactgatggaaggcttgaaagagctggtagaacaaaaaagattaatcctaaagtagaaatgaattctgctgcaagcaatggcatcaacgatactgagggaggacggatgatctcacgggcggcatcaatcattgtagtcggtgatgaaattttgtttggtacaactgaggataacttaggagcagccttgtgcaagaagcttcatgcaattggctggcgggtttctcatgtagcagttgttcgcaatgagattgattctgttgctgaagaagttgaacgttgtaaatctactgatgacatgacgtttctttggctggtgtcgcgaaagcatttggagttcgtctggctcctgatgaagaatttgaagattaccttagtcaactcatgggaaacaattacactggtgaccgaaatgagatggcacagttgccagaaggtattacagaattactgcatcacaaaacgctaccattgccattgatcaaatgtagaaatgtcattgctcttgctgcaaccaatatggatgaactagacaccgagtgggattgtcttctaggtacccaggagagtggtctaatgccatcaaaaccttttgtgtcaaagcatctcagcactacactttcagatgttcaaattgcttcagtccttgcaaaactgtgcttagagttttctgatgtttacatagggtgtcatcggatatcaagagctggtcctttggttgtgaatcttactggaaaggataaccagagggtagatgcggctgccgagaagctgacaagcagctttgaaggacaattttcccaacttaacagttgcaaataagctgtcagagacacccctctatttttgccaaattctttccgcctgaagctctgagattgtgcaggactgatgatggtgctcaactgctctaaaccgacgaccaaaataaaccacggagctggtactactttgaagctacaaattttatttagggaacataggaattttgtactaggaattggtaactgggttctagcataatgtagctttgcagctaatattttgacattattatacgttccaaattatttcatttatactataatttatagcataactttactgctcgatcatgatgtcttcagttgtttgacctttttgctacttgttcgagcatagctttgcagtgcttggtgatgcaaacattgatgctgaaa

SEQ ID NO: 71644 - DNA, 2294 bp, Zea Mays
cccagatccagattactgctaaataaaaagcatgtgaaggccttcctccccctcccagtcgcccttcaacttgccagccgatcccttcgcgtttgtctccgcggttccgacgctccgcactccgctcccctctcccaagcaaacacagccgagtccacgcacgcctcccatcattcctcaaccgcctcgccggagcaaggggagtagcggaggatggagattgaccaggcggtgcgcgggtgcagcgaccgccgcatgcgcaccaagtacagcaacgccgtctacgtcgtccagcgggccttcgcgctctacccatttgaggaagttgccttcagctttaatggtgggaaggattcaactgtgctcctgcatttgattcgagctggttactacctttacaagaaggactctggtgatgtagcccaaacagatgctgttaaaaactgtccactgcgtactatctatttcgaaagcccttgtgctttccctgaaatcaattcattcacttatgagattgtctcaacgtaagagttgtctaagatgtgtctaactttacccttagtctatccgctatttaaggaagggcaggcctggtgcggtggcgagctgtctcactgaatcatcaggttatgggttcgaaacaacctccgtattttcggagggaaggcttgcttcggtttatcgctatcctagatcacactcatttatgggttacctctggaaaccatccattcagatttcaagtctggtctagaaggccttctgaaggagaagcccaccaaagcaattttcattggcacaagaattggtgatccaaatgcggttggtcaagaacagttctctcctagttcacctggctggcctccttttatgagggtgaatccaatcttggattggtcatacagggatgtttggtcttttctaataacatgtaaggtcaaatactgcagcctttatgatcaagggtatacttccattgggagcatacacgatactgttccaaatgcactccttagtgattcatcatctgagaaaagttttagaccagcatacatgctaactgatggaaggcttgaaagagctggtagaacaaaaaagattaatcctaaagtagaaatgaattctgctgcaagcaatggcatcaacgatactgagggaggacggatgatctcacgggcggcatcaatcattgtagtcggtgatgaaattttgtttggtacaactgaggataacttaggagcagccttgtgcaagaagcttcatgcaattggctggcgggtttctcatgtagcagttgttcgcaatgagattgattctgttgctgaagaagttgaacgttgtaaatctactgatgacatggtgtttatttttggtggactcgggccgctacattcagacgtttctttggctggtgtcgcgaaagcatttggagttcgtctggctcctgatgaagaatttgaagattaccttagtcaactcatgggaaacaattacactggtgaccgaaatgagatggcacagttgccagaaggtattacagaattactgcatcacaaaacgctaccattgccattgatcaaatgtagaaatgtcattgctcttgctgcaaccaatatggatgaactagacaccgagtgggattgtcttctaggtacccaggagagtggtctaatgccatcaaaaccttttgtgtcaaagcatctcagcactacactttcagatgttcaaattgcttcagtccttgcaaaactgtgcttagagttttctgatgtttacatagggtgtcatcggatatcaagagctggtcctttggttgtgaatcttactggaaaggataaccagagggtagatgcggctgccgagaagctgacaagcagctttgaaggacaattttcccaacttaacagttgcaaataagctgtcagagacacccctctatttttgccaaattctttccgcctgaagctctgagattgtgcaggactgatgatggtgctcaactgctctaaaccgacgaccaaaataaaccacggagctggtactactttgaagctacaaattttatttagggaacataggaattttgtactaggaattggtaactgggttctagcataatgtagctttgcagctaatattttgacattattatacgttccaaattatttcatttatactataatttatagcataactttactgctcgatcatgatgtcttcagttgtttgacctttttgctacttgttcgagcatagctttgcagtgcttggtgatgcaaacattgatgctgaaa

SEQ ID NO: 71645 - DNA, 1987 bp, Zea Mays
ctgctaaataaaaagcatgtgaaggccttcctccccctcccagtcgcccttcaacttgccagccgatcccttcgcgtttgtctccgcggttccgacgctccgcactccgctcccctctcccaagcaaacacagccgagtccacgcacgcctcccatcattcctcaaccgcctcgccggagcaaggggagtagcggaggatggagattgaccaggcggtgcgcgggtgcagcgaccgccgcatgcgcaccaagtacagcaacgccgtctacgtcgtccagcgggccttcgcgctctacccatttgaggaagttgccttcagctttaatggtgggaaggattcaactgtgctcctgcatttgattcgagctggttactacctttacaagaaggactctgttatgggttacctctggaaaccatccattcagatttcaagtctggtctagaaggccttctgaaggagaagcccaccaaagcaattttcattggcacaagaattggtgatccaaatgcggttggtcaagaacagttctctcctagttcacctggctggcctccttttatgagggtgaatccaatcttggattggtcatacagggatgtttggtcttttctaataacatgtaaggtcaaatactgcagcctttatgatcaagggtatacttccattgggagcatacacgatactgttccaaatgcactccttagtgattcatcatctgagaaaagttttagaccagcatacatgctaactgatggaaggcttgaaagagctggtagaacaaaaaagattaatcctaaagtagaaatgaattctgctgcaagcaatggcatcaacgatactgagggaggacggatgatctcacgggcggcatcaatcattgtagtcggtgatgaaattttgtttggtacaactgaggataacttaggagcagccttgtgcaagaagcttcatgcaattggctggcgggtttctcatgtagcagttgttcgcaatgagattgattctgttgctgaagaagttgaacgttgtaaatctactgatgacatggtgtttatttttggtggactcgggccgctacattcagacgtttctttggctggtgtcgcgaaagcatttggagttcgtctggctcctgatgaagaatttgaagattaccttagtcaactcatgggaaacaattacactggtgaccgaaatgagatggcacagttgccagaaggtattacagaattactgcatcacaaaacgctaccattgccattgatcaaatgtagaaatgtcattgctcttgctgcaaccaatatggatgaactagacaccgagtgggattgtcttctaggtacccaggagagtggtctaatgccatcaaaaccttttgtgtcaaagcatctcagcactacactttcagatgttcaaattgcttcagtccttgcaaaactgtgcttagagttttctgatgtttacatagggtgtcatcggatatcaagagctggtcctttggttgtgaatcttactggaaaggataaccagagggtagatgcggctgccgagaagctgacaagcagctttgaaggacaattttcccaacttaacagttgcaaataagctgtcagagacacccctctatttttgccaaattctttccgcctgaagctctgagattgtgcaggactgatgatggtgctcaactgctctaaaccgacgaccaaaataaaccacggagctggtactactttgaagctacaaattttatttagggaacataggaattttgtactaggaattggtaactgggttctagcataatgtagctttgcagctaatattttgacattattatacgttccaaattatttcatttatactataatttatagcataactttactgctcgatcatgatgtcttcagttgtttgacctttttgctacttgttcgagcatagctttgcagtgcttggtgatgcaaacattgatgctgaaa

SEQ ID NO: 71646 - DNA, 2175 bp, Zea Mays
cttcctccccctcccagtcgcccttcaacttgccagccgatcccttcgcgtttgtctccgcggttccgacgctccgcactccgctcccctctcccaagcaaacacagccgagtccacgcacgcctcccatcattcctcaaccgcctcgccggagcaaggggagtagcggaggatggagattgaccaggcggtgcgcgggtgcagcgaccgccgcatgcgcaccaagtacagcaacgccgtctacgtcgtccagcgggccttcgcgctctacccatttgaggaagttgccttcagctttaatggtgggaaggattcaactgtgctcctgcatttgattcgagctggttactacctttacaagaaggactctggtgatgtagcccaaacagatgctgttaaaaactgtccactgcgtactatctatttcgaaagcccttgtgctttccctgaaatcaattcattcacttatgagattgtctcaacgtaagagttgtctaagatgtgtctaactttacccttagtctatccgctatttaaggaagggcaggcctggtgcggtggcgagctgtctcactgaatcatcagttatgggttacctctggaaaccatccattcagatttcaagtctggtctagaaggccttctgaaggagaagcccaccaaagcaattttcattggcacaagaattggtgatccaaatgcggttggtcaagaacagttctctcctagttcacctggctggcctccttttatgagggtgaatccaatcttggattggtcatacagggatgtttggtcttttctaataacatgtaaggtcaaatactgcagcctttatgatcaagggtatacttccattgggagcatacacgatactgttccaaatgcactccttagtgattcatcatctgagaaaagttttagaccagcatacatgctaactgatggaaggcttgaaagagctggtagaacaaaaaagattaatcctaaagtagaaatgaattctgctgcaagcaatggcatcaacgatactgagggaggacggatgatctcacgggcggcatcaatcattgtagtcggtgatgaaattttgtttggtacaactgaggataacttaggagcagccttgtgcaagaagcttcatgcaattggctggcgggtttctcatgtagcagttgttcgcaatgagattgattctgttgctgaagaagttgaacgttgtaaatctactgatgacatggtgtttatttttggtggactcgggccgctacattcagacgtttctttggctggtgtcgcgaaagcatttggagttcgtctggctcctgatgaagaatttgaagattaccttagtcaactcatgggaaacaattacactggtgaccgaaatgagatggcacagttgccagaaggtattacagaattactgcatcacaaaacgctaccattgccattgatcaaatgtagaaatgtcattgctcttgctgcaaccaatatggatgaactagacaccgagtgggattgtcttctaggtacccaggagagtggtctaatgccatcaaaaccttttgtgtcaaagcatctcagcactacactttcagatgttcaaattgcttcagtccttgcaaaactgtgcttagagttttctgatgtttacatagggtgtcatcggatatcaagagctggtcctttggttgtgaatcttactggaaaggataaccagagggtagatgcggctgccgagaagctgacaagcagctttgaaggacaattttcccaacttaacagttgcaaataagctgtcagagacacccctctatttttgccaaattctttccgcctgaagctctgagattgtgcaggactgatgatggtgctcaactgctctaaaccgacgaccaaaataaaccacggagctggtactactttgaagctacaaattttatttagggaacataggaattttgtactaggaattggtaactgggttctagcataatgtagctttgcagctaatattttgacattattatacgttccaaattatttcatttatactataatttatagcataactttactgctcgatcatgatgtcttcagttgtttgacctttttgctacttgttcgagcatagctttgcagtgcttggtgatgcaaacattgatgctgaaa

SEQ ID NO: 71647 - DNA, 2248 bp, Zea Mays
ctcccagtcgcccttcaacttgccagccgatcccttcgcgtttgtctccgcggttccgacgctccgcactccgctcccctctcccaagcaaacacagccgagtccacgcacgcctcccatcattcctcaaccgcctcgccggagcaaggggagtagcggaggatggagattgaccaggcggtgcgcgggtgcagcgaccgccgcatgcgcaccaagtacagcaacgccgtctacgtcgtccagcgggccttcgcgctctacccatttgaggaagttgccttcagctttaatggtgggaaggattcaactgtgctcctgcatttgattcgagctggttactacctttacaagaaggactctggtgatgtagcccaaacagatgctgttaaaaactgtccactgcgtactatctatttcgaaagcccttgtgctttccctgaaatcaattcattcacttatgagattgtctcaacgtaagagttgtctaagatgtgtctaactttacccttagtctatccgctatttaaggaagggcaggcctggtgcggtggcgagctgtctcactgaatcatcaggttatgggttcgaaacaacctccgtattttcggagggaaggcttgcttcggtttatcgctatcctagatcacactcatttatgggttacctctggaaaccatccattcagatttcaagtctggtctagaaggccttctgaaggagaagcccaccaaagcaattttcattggcacaagaattggtgatccaaatgcggttggtcaagaacagttctctcctagttcacctggctggcctccttttatgagggtgaatccaatcttggattggtcatacagggatgtttggtcttttctaataacatgtaaggtcaaatactgcagcctttatgatcaagggtatacttccattgggagcatacacgatactgttccaaatgcactccttagtgattcatcatctgagaaaagttttagaccagcatacatgctaactgatggaaggcttgaaagagctggtagaacaaaaaagattaatcctaaagtagaaatgaattctgctgcaagcaatggcatcaacgatactgagggaggacggatgatctcacgggcggcatcaatcattgtagtcggtgatgaaattttgtttggtacaactgaggataacttaggagcagccttgtgcaagaagcttcatgcaattggctggcgggtttctcatgtagcagttgttcgcaatgagattgattctgttgctgaagaagttgaacgttgtaaatctactgatgacatggtgtttatttttggtggactcgggccgctacattcagacgtttctttggctggtgtcgcgaaagcatttggagttcgtctgcgtaggctcctgatgaagaatttgaagattaccttagtcaactcatgggaaacaattacactggtgaccgaaatgagatggcacagttgccagaaggtattacagaattactgcatcacaaaacgctaccattgccattgatcaaatgtagaaatgtcattgctcttgctgcaaccaatatggatgaactagacaccgagtgggattgtcttctaggtacccaggagagtggtctaatgccatcaaaaccttttgtgtcaaagcatctcagcactacactttcagatgttcaaattgcttcagtccttgcaaaactgtgcttagagttttctgatgtttacatagggtgtcatcggatatcaagagctggtcctttggttgtgaatcttactggaaaggataaccagagggtagatgcggctgccgagaagctgacaagcagctttgaaggacaattttcccaacttaacagttgcaaataagctgtcagagacacccctctatttttgccaaattctttccgcctgaagctctgagattgtgcaggactgatgatggtgctcaactgctctaaaccgacgaccaaaataaaccacggagctggtactactttgaagctacaaattttatttagggaacataggaattttgtactaggaattggtaactgggttctagcataatgtagctttgcagctaatattttgacattattatacgttccaaattatttcatttatactataatttatagcataactttactgctcgatcatgatgtcttcagttgtttgacctttttgctacttgttcgagcatagctttgcagtgcttggtgatgcaaacattgatgctgaaa

SEQ ID NO: 71648 - DNA, 2226 bp, Zea Mays
ctcccagtcgcccttcaacttgccagccgatcccttcgcgtttgtctccgcggttccgacgctccgcactccgctcccctctcccaagcaaacacagccgagtccacgcacgcctcccatcattcctcaaccgcctcgccggagcaaggggagtagcggaggatggagattgaccaggcggtgcgcgggtgcagcgaccgccgcatgcgcaccaagtacagcaacgccgtctacgtcgtccagcgggccttcgcgctctacccatttgaggaagttgccttcagctttaatggtgctcctgcatttgattcgagctggttactacctttacaagaaggactctggtgatgtagcccaaacagatgctgttaaaaactgtccactgcgtactatctatttcgaaagcccttgtgctttccctgaaatcaattcattcacttatgagattgtctcaacgtaagagttgtctaagatgtgtctaactttacccttagtctatccgctatttaaggaagggcaggcctggtgcggtggcgagctgtctcactgaatcatcaggttatgggttcgaaacaacctccgtattttcggagggaaggcttgcttcggtttatcgctatcctagatcacactcatttatgggttacctctggaaaccatccattcagatttcaagtctggtctagaaggccttctgaaggagaagcccaccaaagcaattttcattggcacaagaattggtgatccaaatgcggttggtcaagaacagttctctcctagttcacctggctggcctccttttatgagggtgaatccaatcttggattggtcatacagggatgtttggtcttttctaataacatgtaaggtcaaatactgcagcctttatgatcaagggtatacttccattgggagcatacacgatactgttccaaatgcactccttagtgattcatcatctgagaaaagttttagaccagcatacatgctaactgatggaaggcttgaaagagctggtagaacaaaaaagattaatcctaaagtagaaatgaattctgctgcaagcaatggcatcaacgatactgagggaggacggatgatctcacgggcggcatcaatcattgtagtcggtgatgaaattttgtttggtacaactgaggataacttaggagcagccttgtgcaagaagcttcatgcaattggctggcgggtttctcatgtagcagttgttcgcaatgagattgattctgttgctgaagaagttgaacgttgtaaatctactgatgacatggtgtttatttttggtggactcgggccgctacattcagacgtttctttggctggtgtcgcgaaagcatttggagttcgtctggctcctgatgaagaatttgaagattaccttagtcaactcatgggaaacaattacactggtgaccgaaatgagatggcacagttgccagaaggtattacagaattactgcatcacaaaacgctaccattgccattgatcaaatgtagaaatgtcattgctcttgctgcaaccaatatggatgaactagacaccgagtgggattgtcttctaggtacccaggagagtggtctaatgccatcaaaaccttttgtgtcaaagcatctcagcactacactttcagatgttcaaattgcttcagtccttgcaaaactgtgcttagagttttctgatgtttacatagggtgtcatcggatatcaagagctggtcctttggttgtgaatcttactggaaaggataaccagagggtagatgcggctgccgagaagctgacaagcagctttgaaggacaattttcccaacttaacagttgcaaataagctgtcagagacacccctctatttttgccaaattctttccgcctgaagctctgagattgtgcaggactgatgatggtgctcaactgctctaaaccgacgaccaaaataaaccacggagctggtactactttgaagctacaaattttatttagggaacataggaattttgtactaggaattggtaactgggttctagcataatgtagctttgcagctaatattttgacattattatacgttccaaattatttcatttatactataatttatagcataactttactgctcgatcatgatgtcttcagttgtttgacctttttgctacttgttcgagcatagctttgcagtgcttggtgatgcaaacattgatgctgaaa

SEQ ID NO: 71649 - DNA, 1989 bp, Zea Mays
atcctcccctgcagcaacgacatattgatttgaggaagttgccttcagctttaatggtgctcctgcatttgattcgagctggttactacctttacaagaaggactctggtgatgtagcccaaacagatgctgttaaaaactgtccactgcgtactatctatttcgaaagcccttgtgctttccctgaaatcaattcattcacttatgagattgtctcaacgtaagagttgtctaagatgtgtctaactttacccttagtctatccgctatttaaggaagggcaggcctggtgcggtggcgagctgtctcactgaatcatcaggttatgggttcgaaacaacctccgtattttcggagggaaggcttgcttcggtttatcgctatcctagatcacactcatttatgggttacctctggaaaccatccattcagatttcaagtctggtctagaaggccttctgaaggagaagcccaccaaagcaattttcattggcacaagaattggtgatccaaatgcggttggtcaagaacagttctctcctagttcacctggctggcctccttttatgagggtgaatccaatcttggattggtcatacagggatgtttggtcttttctaataacatgtaaggtcaaatactgcagcctttatgatcaagggtatacttccattgggagcatacacgatactgttccaaatgcactccttagtgattcatcatctgagaaaagttttagaccagcatacatgctaactgatggaaggcttgaaagagctggtagaacaaaaaagattaatcctaaagtagaaatgaattctgctgcaagcaatggcatcaacgatactgagggaggacggatgatctcacgggcggcatcaatcattgtagtcggtgatgaaatttttttggtacaactgaggataacttaggagcagccttgtgcaagaagcttcatgcaattggctggcgggtttctcatgtagcagttgttcgcaatgagattgattctgttgctgaagaagttgaacgttgtaaatctactgatgacatggtgtttatttttggtggactcgggccgctacattcagacgtttctttggctggtgtcgcgaaagcatttggagttcgtctggctcctgatgaagaatttgaagattaccttagtcaactcatgggaaacaattacactggtgaccgaaatgagatggcacagttgccagaaggtattacagaattactgcatcacaaaacgctaccattgccattgatcaaatgtagaaatgtcattgctcttgctgcaaccaatatggatgaactagacaccgagtgggattgtcttctaggtacccaggagagtggtctaatgccatcaaaaccttttgtgtcaaagcatctcagcactacactttcagatgttcaaattgcttcagtccttgcaaaactgtgcttagagttttctgatgtttacatagggtgtcatcggatatcaagagctggtcctttggttgtgaatcttactggaaaggataaccagagggtagatgcggctgccgagaagctgacaagcagctttgaaggacaattttcccaacttaacagttgcaaataagctgtcagagacacccctctatttttgccaaattctttccgcctgaagctctgagattgtgcaggactgatgatggtgctcaactgctctaaaccgacgaccaaaataaaccacggagctggtactactttgaagctacaaattttatttagggaacataggaattttgtactaggaattggtaactgggttctagcataatgtagctttgcagctaatattttgacattattatacgttccaaattatttcatttatactataatttatagcataactttactgctcgatcatgatgtcttcagttgtttgacctttttgctacttgttcgagcatagctttgcagtgcttggtgatgcaaacattgatgctgaaa

SEQ ID NO: 71650 - DNA, 1845 bp, Zea Mays
ggatctatactatctatgggtaatcgattctgcaatgcaaacaggatttgaggaagttgccttcagctttaatggtgggaaggattcaactgtgctcctgcatttgattcgagctggttactacctttacaagaaggactctggtgatgtagcccaaacagatgctgttaaaaactgtccactgcgtactatctatttcgaaagcccttgtgctttccctgaaatcaattcattcacttatgagattgtctcaacttatgggttacctctggaaaccatccattcagatttcaagtctggtctagaaggccttctgaaggagaagcccaccaaagcaattttcattggcacaagaattggtgatccaaatgcggttggtcaagaacagttctctcctagttcacctggctggcctccttttatgagggtgaatccaatcttggattggtcatacagggatgtttggtcttttctaataacatgtaaggtcaaatactgcagcctttatgatcaagggtatacttccattgggagcatacacgatactgttccaaatgcactccttagtgattcatcatctgagaaaagttttagaccagcatacatgctaactgatggaaggcttgaaagagctggtagaacaaaaaagattaatcctaaagtagaaatgaattctgctgcaagcaatggcatcaacgatactgagggaggacggatgatctcacgggcggcatcaatcattgtagtcggtgatgaaattttgtttggtacaactgaggataacttaggagcagccttgtgcaagaagcttcatgcaattggctggcgggtttctcatgtagcagttgttcgcaatgagattgattctgttgctgaagaagttgaacgttgtaaatctactgatgacatggtgtttatttttggtggactcgggccgctacattcagacgtttctttggctggtgtcgcgaaagcatttggagttcgtctggctcctgatgaagaatttgaagattaccttagtcaactcatgggaaacaattacactggtgaccgaaatgagatggcacagttgccagaaggtattacagaattactgcatcacaaaacgctaccattgccattgatcaaatgtagaaatgtcattgctcttgctgcaaccaatatggatgaactagacaccgagtgggattgtcttctaggtacccaggagagtggtctaatgccatcaaaaccttttgtgtcaaagcatctcagcactacactttcagatgttcaaattgcttcagtccttgcaaaactgtgcttagagttttctgatgtttacatagggtgtcatcggatatcaagagctggtcctttggttgtgaatcttactggaaaggataaccagagggtagatgcggctgccgagaagctgacaagcagctttgaaggacaattttcccaacttaacagttgcaaataagctgtcagagacacccctctatttttgccaaattctttccgcctgaagctctgagattgtgcaggactgatgatggtgctcaactgctctaaaccgacgaccaaaataaaccacggagctggtactactttgaagctacaaattttatttagggaacataggaattttgtactaggaattggtaactgggttctagcataatgtagctttgcagctaatattttgacattattatacgttccaaattatttcatttatactataatttatagcataactttactgctcgatcatgatgtcttcagttgtttgacctttttgctacttgttcgagcatagctttgcagtgcttggtgatgcaaacattgatgctgaaa

SEQ ID NO: 71651 - DNA, 1578 bp, Zea Mays
agccttcagcactggatttcaagtctggtctagaaggccttctgaaggagaagcccaccaaagcaattttcattggcacaagaattggtgatccaaatgcggttggtcaagaacagttctctcctagttcacctggctggcctccttttatgagggtgaatccaatcttggattggtcatacagggatgtttggtcttttctaataacatgtaaggtcaaatactgcagcctttatgatcaagggtatacttccattgggagcatacacgatactgttccaaatgcactccttagtgattcatcatctgagaaaagttttagaccagcatacatgctaactgatggaaggcttgaaagagctggtagaacaaaaaagattaatcctaaagtagaaatgaattctgctgcaagcaatggcatcaacgatactgagggaggacggatgatctcacgggcggcatcaatcattgtagtcggtgatgaaattttgtttggtacaactgaggataacttaggagcagccttgtgcaagaagcttcatgcaattggctggcgggtttctcatgtagcagttgttcgcaatgagattgattctgttgctgaagaagttgaacgttgtaaatctactgatgacatggtgtttatttttggtggactcgggccgctacattcagacgtttctttggctggtgtcgcgaaagcatttggagttcgtctgcgtaggctcctgatgaagaatttgaagattaccttagtcaactcatgggaaacaattacactggtgaccgaaatgagatggcacagttgccagaaggtattacagaattactgcatcacaaaacgctaccattgccattgatcaaatgtagaaatgtcattgctcttgctgcaaccaatatggatgaactagacaccgagtgggattgtcttctaggtacccaggagagtggtctaatgccatcaaaaccttttgtgtcaaagcatctcagcactacactttcagatgttcaaattgcttcagtccttgcaaaactgtgcttagagttttctgatgtttacatagggtgtcatcggatatcaagagctggtcctttggttgtgaatcttactggaaaggataaccagagggtagatgcggctgccgagaagctgacaagcagctttgaaggacaattttcccaacttaacagttgcaaataagctgtcagagacacccctctatttttgccaaattctttccgcctgaagctctgagattgtgcaggactgatgatggtgctcaactgctctaaaccgacgaccaaaataaaccacggagctggtactactttgaagctacaaattttatttagggaacataggaattttgtactaggaattggtaactgggttctagcataatgtagctttgcagctaatattttgacattattatacgttccaaattatttcatttatactataatttatagcataactttactgctcgatcatgatgtcttcagttgtttgacctttttgctacttgttcgagcatagctttgcagtgcttggtgatgcaaacattgatgctgaaa

SEQ ID NO: 71652 - DNA, 1562 bp, Zea Mays
ctggatttcaagtctggtctagaaggccttctgaaggagaagcccaccaaagcaattttcattggcacaagaattggtgatccaaatgcggttggtcaagaacagttctctcctagttcacctggctggcctccttttatgagggtgaatccaatcttggattggtcatacagggatgtttggtcttttctaataacatgtaaggtcaaatactgcagcctttatgatcaagggtatacttccattgggagcatacacgatactgttccaaatgcactccttagtgattcatcatctgagaaaagttttagaccagcatacatgctaactgatggaaggcttgaaagagctggtagaacaaaaaagattaatcctaaagtagaaatgaattctgctgcaagcaatggcatcaacgatactgagggaggacggatgatctcacgggcggcatcaatcattgtagtcggtgatgaaattttgtttggtacaactgaggataacttaggagcagccttgtgcaagaagcttcatgcaattggctggcgggtttctcatgtagcagttgttcgcaatgagattgattctgttgctgaagaagttgaacgttgtaaatctactgatgacatggtgtttatttttggtggactcgggccgctacattcagacgtttctttggctggtgtcgcgaaagcatttggagttcgtctggctcctgatgaagaatttgaagattaccttagtcaactcatgggaaacaattacactggtgaccgaaatgagatggcacagttgccagaaggtattacagaattactgcatcacaaaacgctaccattgccattgatcaaatgtagaaatgtcattgctcttgctgcaaccaatatggatgaactagacaccgagtgggattgtcttctaggtacccaggagagtggtctaatgccatcaaaaccttttgtgtcaaagcatctcagcactacactttcagatgttcaaattgcttcagtccttgcaaaactgtgcttagagttttctgatgtttacatagggtgtcatcggatatcaagagctggtcctttggttgtgaatcttactggaaaggataaccagagggtagatgcggctgccgagaagctgacaagcagctttgaaggacaattttcccaacttaacagttgcaaataagctgtcagagacacccctctatttttgccaaattctttccgcctgaagctctgagattgtgcaggactgatgatggtgctcaactgctctaaaccgacgaccaaaataaaccacggagctggtactactttgaagctacaaattttatttagggaacataggaattttgtactaggaattggtaactgggttctagcataatgtagctttgcagctaatattttgacattattatacgttccaaattatttcatttatactataatttatagcataactttactgctcgatcatgatgtcttcagttgtttgacctttttgctacttgttcgagcatagctttgcagtgcttggtgatgcaaacattgatgctgaaa

SEQ ID NO: 71653 - DNA, 4884 bp, Zea Mays
atgaaaaaacgcaacgaaaccaacgaagcacaaataataggattttcaaaaaggaaaaagattagcaggaggactggaggagcgcctccgcacgggcacgggccggcagcccggcacgaagcggaaaacttgaaaactagccgagcgaactgccgtctcaattcaaaatcccgtcaactctcacccccatatccctccccgtcttccttccccccatttctcccacagacttcggcctcccgaatctcgaaccctaacctcatcggcgacgaggggagccccgcctccgcctcctgcttctctgttatgaacaacttccatgtctacgaggccattggccgcggcaagcactcgacggtgtataaggggcggaagaagaagaccatcgagtacttcgctgttaagagcgttgacaagtcgcagcgctccaaggtcctcaacgaggttcgaatgctccattccttagaccatgccaatgtcctgaaattttactcttggtatgagacctccgcacatttctggttagtgttggagtattgcgttggtggagacctgaagggcttgcttgaacaggataagaagcttcctgaaaattctatacatgacctggcttacaatcttgtcaaagctcttcagttcttgcattcccaaggaattatatattgcgatctgaagccatcaaatattctgcttgatgaatttggatgcatgaagctttgtgattttggattagcaaggcgcttaaaagacatcgagaaaactaatcctggagatgtgccacaacccatgaggggaacaccatgctatatggctcctgagttatttcgagaggcaggagtccactcatatgcttctgatttctgggcacttgggtgtgttttgtatgaatgctatacaggaaggcccccttttgtaggcagagaatttacacagttggtcaaatctataattttggatcctacaccgcctttatctgataattcatcaaggtccttccaaaatctgattgattgtttactcatgaaagatccagcagaaagattacagtggtctgaattgtgtgaccacaacttctggaaaaccagtatcccaatgatttctttacctcctcagcctgcttttgacaacatgattgaactttctgctacaccatatctagctgagagaaatggtgacaaaccttccagacagctgacaccacccaagcaccgtgaatatagtggccttcggaggaaggatgaaaattctactaagccatccatgacacctgttaaaaatgtgcaaagtgtcaagaaaaattgtggaaaaccaaaagctgagggtttcaaaggtgtaaatatcctcagaatgtctcgcattgctaaattgaatttgcaaagggaaagggacaaggagaactacaggcgtcctcccacagaaacaactgagaatgagactgaagttaatatagataataatgacatggaacttgattttggtgaaaatccagaggctgatgcacctgatgacacatatggatcggataatcctggatctgcaggaaatgaaaagcctcaaagcactgatgctaatgaagagaattgtatggcaaatcaggttgatatgcttacagatgagggttcagttaagcctgatatcatggtgaaaactgagcagaattcttgttcagataacctggatgtggaggctactccacctagtagcacgcgaaaagcacaacgtgcaaaggtaactccatgtcctggaactggttctgagccatctaacatctttgaagcattctggcatccaacagatcttgcagttaaaccagttatgcctagtaggaaagcagataaagctgtggacatggtccccacacttccttttgaagcacttacagcaagtgattatattaagttaccactggaacagatgaatgcattcaacagtcagatacttcagagtttaagtggaacctatcaggtttcagaaaaacaaaatactatcagatacctggagatgttaagcatgaattcagatgctgcgaacaaaataactaatggaccaattatgctgctactaataaaaatgcttcgactgtcaaaaacttcagtcttgcgtgtccaaattgcctcacttatggggttgctgatacgatattccactgctcttgatgtggagctggcaagttcaggaatttttaatgcactatcagatgggttaagggataaacatgataaactcaggcgattctgtatggcaacactaggagagttattattctatatttctacccagtctgatcaagataccaaggaaataaatacccaagaataccctttgaaggataacaggttcctagtgctgtaattgcactggtgtcatctatcttgcgaaagggagaagatgatctagctcagctatatgccttacggacagtcgataatatatgtagccaaggaactgaatggacatcccgttttgcatctcaggatgcgattggacatctgtgctacatctataaagcaactggaaagcaggagagtacgaggctcattgcaggatcttgtttggcccgtctctctcgcttcagtccatcatgcattcatttaatattggaaaagatatcattcaaggatatagcatgcacacttatcaagggaaatacacgtgaacagcagattagtcttaatattctcaattcggcattagttaatagtcacactgtgacaagcatgaaccggtatattctttcattatcagatgacaaacaattggtccccgggctcatttctctaatagaacagggaactgatgttctacgtgggaagacccttttgtttgttgctctgctttgcaagaatagtcgaaggtggcttcctcatttcttttgcaatgcaaaattaatctcagctgttgatagactgggaaaagagaaggagggttttattcatcaatgtacagaagcatttgtgcagttggttgcttccttggtccctggtattcttgacactgtctccagtgatatacaacaggttatggttggcaaacgccatggacctgttactgctttagctgggcgagctcatccaaagagcacaattcatctgttccctgttattcttcatcttctgggaagtgcatccttcaagcatagagttgtgacaggccatgtattgcttcagttggcaaatcttattaagattttggaggcaccgtttcaggctagggatgatttccaaatgacattgttgcgagttcttgaggctgctacagaggagccttctgttatacttaatgaacacacagtattcatgagtcgtatcattccaagcttatctgtcttatacaagggcaataaagatggtgatgccagatttctttgtttgaagatactcgcagatgttatgattgtgatcttcagtgattcttcattaacttctgacgaacaaacaataactgatctgaaatcaatctctcagaggcattttctaccactgtacccttcttttgcagaggatgaagatcccatacccatatatgcacaaaaactgctagtaatgctaatggaacatggttgtgtaaaagtctctgatattctgcacaaagcaacagtatcccagtgctttgaatttttgctaggagatctttcaaatgcaaatgtaagcaatgtcaagctttgctttgccctggtatctgcacctgagatggacacctatattctttctcagcttcaagttgttagaagaatagggaacctactcgagtttgttgctgcaaaagacatggacgattttcttgaaccaaccctggaactttgcagagcttttattattcgtggcactggcagcaacagaagtgtcgccctctccaaaaacccggcacttcttcttgacagtgccttcagcatgagtattgctgttgatcaacaaacttgtgtcatggatatatgtgacttcggtggcaacatgggtatttttcttgagctagttggcaattcagatccgcagataagtgatttagcatcagattgtgtagtgttgttgctcaaggcagcacctcgagaggctacagtgggcttgttgacaagtcttcctaaattaagcactgtcatggacttgctgaagcatgacagccaccgatgtctgattcgcttattatatggcctagccttctcatgcagacaatacttagcccagggaatgatcctgtcaatatcagtgccagctttgatgcgagttgaagcacttgtttcagttttcaagggctccaatgatagccttcttgctgatgctgcttcttatttgagcgccgaactgcagcgcttacctcgctgtggttgaaggtgcaacttggccaaggaggcaggttggctgctattgttcaaggatgcgcatgtattccttcatccttcgtgcaccatgtacatgatgagctgagcaagtgagcaggacgtcatcaagtgaaggtactttacatcagtggctgatctcagttgcctcaatggccaagtgacactttccgctcgtagatgtgcagggtgcgagggtgttttatgctatcatttatgtgcatttcggggctgctgtatatggcgcttttgaacaataccttgaaggtggctagaagcaaaagaacacttcgttcccccgccaattttggttggcaattacctcagtttcatgtaattctgtagtacctgtaattttattgagaatactgtagtccaatttcatgtgtacatttataaattcctgtgaagttccatgtagctgttaaagagttccccatagctcctgaatctttggtactattgtgtatttttttttactttttacaatagtgataacgtggcccatttcgaagcattttcctatcttattttgcgcaaattcgtggtaa

SEQ ID NO: 71654 - DNA, 4760 bp, Zea Mays
atgaaaaaacgcaacgaaaccaacgaagcacaaataataggattttcaaaaaggaaaaagattagcaggaggactggaggagcgcctccgcacgggcacgggccggcagcccggcacgaagcggaaaacttgaaaactagccgagcgaactgccgtctcaattcaaaatcccgtcaactctcacccccatatccctccccgtcttccttccccccatttctcccacagacttcggcctcccgaatctcgaaccctaacctcatcggcgacgaggggagccccgcctccgcctcctgcttctctgttatgaacaacttccatgtctacgaggccattggccgcggcaagcactcggtatgagacctccgcacatttctggttagtgttggagtattgcgttggtggagacctgaagggcttgcttgaacaggataagaagcttcctgaaaattctatacatgacctggcttacaatcttgtcaaagctcttcagttcttgcattcccaaggaattatatattgcgatctgaagccatcaaatattctgcttgatgaatttggatgcatgaagctttgtgattttggattagcaaggcgcttaaaagacatcgagaaaactaatcctggagatgtgccacaacccatgaggggaacaccatgctatatggctcctgagttatttcgagaggcaggagtccactcatatgcttctgatttctgggcacttgggtgtgttttgtatgaatgctatacaggaaggcccccttttgtaggcagagaatttacacagttggtcaaatctataattttggatcctacaccgcctttatctgataattcatcaaggtccttccaaaatctgattgattgtttactcatgaaagatccagcagaaagattacagtggtctgaattgtgtgaccacaacttctggaaaaccagtatcccaatgatttctttacctcctcagcctgcttttgacaacatgattgaactttctgctacaccatatctagctgagagaaatggtgacaaaccttccagacagctgacaccacccaagcaccgtgaatatagtggccttcggaggaaggatgaaaattctactaagccatccatgacacctgttaaaaatgtgcaaagtgtcaagaaaaattgtggaaaaccaaaagctgagggtttcaaaggtgtaaatatcctcagaatgtctcgcattgctaaattgaatttgcaaagggaaagggacaaggagaactacaggcgtcctcccacagaaacaactgagaatgagactgaagttaatatagataataatgacatggaacttgattttggtgaaaatccagaggctgatgcacctgatgacacatatggatcggataatcctggatctgcaggaaatgaaaagcctcaaagcactgatgctaatgaagagaattgtatggcaaatcaggttgatatgcttacagatgagggttcagttaagcctgatatcatggtgaaaactgagcagaattcttgttcagataacctggatgtggaggctactccacctagtagcacgcgaaaagcacaacgtgcaaaggtaactccatgtcctggaactggttctgagccatctaacatctttgaagcattctggcatccaacagatcttgcagttaaaccagttatgcctagtaggaaagcagataaagctgtggacatggtccccacacttccttttgaagcacttacagcaagtgattatattaagttaccactggaacagatgaatgcattcaacagtcagatacttcagagtttaagtggaacctatcaggtttcagaaaaacaaaatactatcagatacctggagatgttaagcatgaattcagatgctgcgaacaaaataactaatggaccaattatgctgctactaataaaaatgcttcgactgtcaaaaacttcagtcttgcgtgtccaaattgcctcacttatggggttgctgatacgatattccactgctcttgatgtggagctggcaagttcaggaatttttaatgcactatcagatgggttaagggataaacatgataaactcaggcgattctgtatggcaacactaggagagttattattctatatttctacccagtctgatcaagataccaaggaaataaatacccaagaataccctttgaaggataacaggtctgcaacatcttggcaggttcctagtgctgtaattgcactggtgtcatctatcttgcgaaagggagaagatgatctagctcagctatatgccttacggacagtcgataatatatgtagccaaggaactgaatggacatcccgttttgcatctcaggatgcgattggacatctgtgctacatctataaagcaactggaaagcaggagagtacgaggctcattgcaggatcttgtttggcccgtctctctcgcttcagtccatcatgcattcatttaatattggaaaagatatcattcaaggatatagcatgcacacttatcaagggaaatacacgtgaacagcagattagtcttaatattctcaattcggcattagttaatagtcacactgtgacaagcatgaaccggtatattctttcattatcagatgacaaacaattggtccccgggctcatttctctaatagaacagggaactgatgttctacgtgggaagacccttttgtttgttgctctgctttgcaagaatagtcgaaggtggcttcctcatttcttttgcaatgcaaaattaatctcagctgttgatagactgggaaaagagaaggagggttttattcatcaatgtacagaagcatttgtgcagttggttgcttccttggtccctggtattcttgacactgtctccagtgatatacaacaggttatggttggcaaacgccatggacctgttactgctttagctgggcgagctcatccaaagagcacaattcatctgttccctgttattcttcatcttctgggaagtgcatccttcaagcatagagttgtgacaggccatgtattgcttcagttggcaaatcttattaagattttggaggcaccgtttcaggctagggatgatttccaaatgacattgttgcgagttcttgaggctgctacagaggagccttctgttatacttaatgaacacacagtattcatgagtcgtatcattccaagcttatctgtcttatacaagggcaataaagatggtgatgccagatttctttgtttgaagatactcgcagatgttatgattgtgatcttcagtgattcttcattaacttctgacgaacaaacaataactgatctgaaatcaatctctcagaggcattttctaccactgtacccttcttttgcagaggatgaagatcccatacccatatatgcacaaaaactgctagtaatgctaatggaacatggttgtgtaaaagtctctgatattctgcacaaagcaacagtatcccagtgctttgaatttttgctaggagatctttcaaatgcaaatgtaagcaatgtcaagctttgctttgccctggtatctgcacctgagatggacacctatattctttctcagcttcaagttgttagaagaatagggaacctactcgagtttgttgctgcaaaagacatggacgattttcttgaaccaaccctggaactttgcagagcttttattattcgtggcactggcagcaacagaagtgtcgccctctccaaaaacccggcacttcttcttgacagtgccttcagcatgagtattgctgttgatcaacaaacttgtgtcatggatatatgtgacttcggtggcaacatgggtatttttcttgagctagttggcaattcagatccgcagataagtgatttagcatcagattgtgtagtgttgttgctcaaggcagcacctcgagaggctacagtgggcttgttgacaagtcttcctaaattaagcactgtcatggacttgctgaagcatgacagccaccgatgtctgattcgcttattatatggcctagccttctcatgcagacaatacttagcccagggaatgatcctgtcaatatcagtgccagctttgatgcgagttgaagcacttgtttcagttttcaagggctccaatgatagccttcttgctgatgctgcttcttatttgagcgccgaactgcagcgcttacctcgctgtggttgaaggtgcaacttggccaaggaggcaggttggctgctattgttcaaggatgcgcatgtattccttcatccttcgtgcaccatgtacatgatgagctgagcaagtgagcaggacgtcatcaagtgaaggtactttacatcagtggctgatctcagttgcctcaatggccaagtgacactttccgctcgtagatgtgcagggtgcgagggtgttttatgctatcatttatgtgcatttcggggctgctgtatatggcgcttttgaacaataccttgaaggtggctagaagcaaaagaacacttcgttcccccgccaattttggttggcaattacctcagtttcatgtaattctgtagtacctgtaattttattgagaatactgtagtccaatttcatgtgtacatttataaattcctgtgaagttccatgtagctgttaaagagttccccatagctcctgaatctttggtactattgtgtatttttttttactttttacaatagtgataacgtggcccatttcgaagcattttcctatcttattttgcgcaaattcgtggtaa

SEQ ID NO: 71655 - DNA, 4832 bp, Zea Mays
atgaaaaaacgcaacgaaaccaacgaagcacaaataataggattttcaaaaaggaaaaagattagcaggaggactggaggagcgcctccgcacgggcacgggccggcagcccggcacgaagcggaaaacttgaaaactagccgagcgaactgccgtctcaattcaaaatcccgtcaactctcacccccatatccctccccgtcttccttccccccatttctcccacagacttcggcctcccgaatctcgaaccctaacctcatcggcgacgaggggagccccgcctccgcctcctgcttctctgttatgaacaacttccatgtctacgaggccattggccgcggcaagcactcgacggtgtataaggggcggaagaagaagaccatcgagtacttcgctgttaagagcgttgacaagtcgcagcgctccaaggtcctcaacgaggttcgaatgctccattccttagaccatgccaatgtcctgaaattttactcttggtatgagacctccgcacatttctggttagtgttggagtattgcgttggtggagacctgaagggcttgcttgaacaggataagaagcttcctgaaaattctatacatgacctggcttacaatcttgtcaaagctcttcagttcttgcattcccaaggaattatatattgcgatctgaagccatcaaatattctgcttgatgaatttggatgcatgaagctttgtgattttggattagcaaggcgcttaaaagacatcgagaaaactaatcctggagatgtgccacaacccatgaggggaacaccatgctatatggctcctgagttatttcgagaggcaggagtccactcatatgcttctgatttctgggcacttgggtgtgttttgtatgaatgctatacaggaaggcccccttttgtaggcagagaatttacacagttggtcaaatctataattttggatcctacaccgcctttatctgataattcatcaaggtccttccaaaatctgattgattgtttactcatgaaagatccagcagaaagattacagtggtctgaattgtgtgaccacaacttctggaaaaccagtatcccaatgatttctttacctcctcagcctgcttttgacaacatgattgaactttctgctacaccatatctagctgagagaaatggtgacaaaccttccagacagctgacaccacccaagcaccgtgaatatagtggccttcggaggaaggatgaaaattctactaagccatccatgacacctgttaaaaatgtgcaaagtgtcaagaaaaattgtggaaaaccaaaagctgagggtttcaaaggtgtaaatatcctcagaatgtctcgcattgctaaattgaatttgcaaagggaaagggacaaggagaactacaggcgtcctcccacagaaacaactgagaatgagactgaagttaatatagataataatgacatggaacttgattttggtgaaaatccagaggctgatgcacctgatgacacatatggatcggataatcctggatctgcaggaaatgaaaagcctcaaagcactgatgctaatgaagagaattgtatggcaaatcaggttgatatgcttacagatgagggttcagttaagcctgatatcatggtgaaaactgagcagaattcttgttcagataacctggatgtggaggctactccacctagtagcacgcgaaaagcacaacgtgcaaaggtaactccatgtcctggaactggttctgagccatctaacatctttgaagcattctggcatccaacagatcttgcagttaaaccagttatgcctagtaggaaagcagataaagctgtggacatggtccccacacttccttttgaagcacttacagcaagtgattatattaagttaccactggaacagatgaatgcattcaacagtcagatacttcagagtttaagtggaacctatcaggtttcagaaaaacaaaatactatcagatacctggagatgttaagcatgaattcagatgctgcgaacaaaataactaatggaccaattatgctgctactaataaaaatgcttcgactgtcaaaaacttcagtcttgcgtgtccaaattgcctcacttatggggttgctgatacgatattccactgctcttgatgtggagctggcaagttcaggaatttttaatgcactatcagatgggttaagggataaacatgataaactcaggcgattctgtatggcaacactaggagagttattattctatatttctacccagtctgatcaagataccaaggaaataaatacccaagaataccctttgaaggataacaggtctgcaacatcttggcaggttcctagtgctgtaattgcactggtgtcatctatcttgcgaaagggagaagatgatctagctcagctatatgccttacggacagtcgataatatatgtagccaaggaactgaatggacatcccgttttgcatctcaggatgcgattggacatctgtgctacatctataaagcaactggaaagcaggagagtacgaggctcattgcaggatcttgtttggcccgtctctctcgcttcagtccatcatgcattcatttaatattggaaaagatatcattcaaggatatagcatgcacacttatcaagggaaatacacgtgaacagcagattagtcttaatattctcaattcggcattagttaatagtcacactgtgacaagcatgaaccggtatattctttcattatcagatgacaaacaattggtccccgggctcatttctctaatagaacagggaactgatgttctacgtgggaagacccttttgtttgttgctctgctttgcaagaatagtcgaaggtggcttcctcatttcttttgcaatgcaaaattaatctcagctgttgatagactgggaaaagagaaggagggttttattcatcaatgtacagaagcatttgtgcagttggttgcttccttggtccctggtattcttgacactgtctccagtgatatacaacaggttatggttggcaaacgccatggacctgttactgctttagctgggcgagctcatccaaagagcacaattcatctgttccctgttattcttcatcttctgggaagtgcatccttcaagcatagagttgtgacaggccatgtattgcttcagttggcaaatcttattaagattttggaggcaccgtttcaggctagggatgatttccaaatgacattgttgcgagttcttgaggctgctacagaggagccttctgttatacttaatgaacacacagtattcatgagtcgtatcattccaagcttatctgtcttatacaagggcaataaagatggtgatgccagatttctttgtttgaagatactcgcagatgttatgattgtgatcttcagtgattcttcattaacttctgacgaacaaacaataactgatctgaaatcaatctctcagaggcattttctaccactgtacccttcttttgcagaggatgaagatcccatacccatatatgcacaaaaactgctagtaatgctaatggaacatggttgtgtaaaagtctctgatattctgcacaaagcaacagtatcccagtgctttgaatttttgctaggagatctttcaaatgcaaatgtaagcaatgtcaagctttgctttgccctggtatctgcacctgagatggacacctatattctttctcagcttcaagttgttagaagaatagggaacctactcgagtttgttgctgcaaaagacatggacgattttcttgaaccaaccctggaactttgcagagcttttattattcgtggcactggcagcaacagaagtgtcgccctctccaaaaacccggcacttcttcttgacagtgccttcagcatgagtattgctgttgatcaacaaacttgtgtcatggatatatgtgacttcggtggcaacatgggtatttttcttgagctagttggcaattcagatccgcagataagtgatttagcatcagattgtgtagtgttgttgctcaaggcagcacctcgagaggctacagtgggcttgttgacaagtcttcctaaattaagcactgtcatggacttgctgaagcatgacagccaccgatgtctgattcgcttattatatggcctagccttctcatgcagacaatacttagcccagggaatgatcctgtcaatatcagtgccagctttgatgcgagttgaagcacttgtttcagttttcaagggctccaatgatagccttcttgctgatgctgcttcttatttgagcgccgaactgcagcgcttacctcgctgtggttgaaggtgcaacttggccaaggaggcaggttggctgctattgttcaaggatgcgcatgtattccttcatccttcgtgcaccatgtacatgatgagctgagcaagtgagcaggacgtcatcaagtgaagggtgcgagggtgttttatgctatcatttatgtgcatttcggggctgctgtatatggcgcttttgaacaataccttgaaggtggctagaagcaaaagaacacttcgttcccccgccaattttggttggcaattacctcagtttcatgtaattctgtagtacctgtaattttattgagaatactgtagtccaatttcatgtgtacatttataaattcctgtgaagttccatgtagctgttaaagagttccccatagctcctgaatctttggtactattgtgtatttttttttactttttacaatagtgataacgtggcccatttcgaagcattttcctatcttattttgcgcaaattcgtggtaa

SEQ ID NO: 71656 - DNA, 4654 bp, Zea Mays
atgaaaaaacgcaacgaaaccaacgaagcacaaataataggattttcaaaaaggaaaaagattagcaggaggactggaggagcgcctccgcacgggcacgggccggcagcccggcacgaagcggaaaacttgaaaactagccgagcgaactgccgtctcaattcaaaatcccgtcaactctcacccccatatccctccccgtcttccttccccccatttctcccacagacttcggcctcccgaatctcgaaccctaacctcatcggcgacgaggggagccccgcctccgcctcctgcttctctgttatgaacaacttccatgtctacgaggccattggccgcggcaagcactcgacggtgtataaggggcggaagaagaagaccatcgagtacttcgctgttaagagcgttgacaagtcgcagcgctccaaggtcctcaacgaggttcgaatgctccattccttagaccatgccaatgtcctgaaattttactcttggtatgagacctccgcacatttctggttagtgttggagtattgcgttggtggagacctgaagggcttgcttgaacaggataagaagcttcctgaaaattctatacatgacctggcttacaatcttgtcaaagctcttcagttcttgcattcccaaggaattatatattgcgatctgaagccatcaaatattctgcttgatgaatttggatgcatgaaggtgccacaacccatgaggggaacaccatgctatatggctcctgagttatttcgagaggcaggagtccactcatatgcttctgatttctgggcacttgggtgtgttttgtatgaatgctatacaggaaggcccccttttgtaggcagagaatttacacagttggtcaaatctataattttggatcctacaccgcctttatctgataattcatcaaggtccttccaaaatctgattgattgtttactcatgaaagatccagcagaaagattacagtggtctgaattgtgtgaccacaacttctggaaaaccagtatcccaatgatttctttacctcctcagcctgcttttgacaacatgattgaactttctgctacaccatatctagctgagagaaatggtgacaaaccttccagacagctgacaccacccaagcaccgtgaatatagtggccttcggaggaaggatgaaaattctactaagccatccatgacacctgttaaaaatgtgcaaagtgtcaagaaaaattgtggaaaaccaaaagctgagggtttcaaaggtgtaaatatcctcagaatgtctcgcattgctaaattgaatttgcaaagggaaagggacaaggagaactacaggcgtcctcccacagaaacaactgagaatgagactgaagttaatatagataataatgacatggaacttgattttggtgaaaatccagaggctgatgcacctgatgacacatatggatcggataatcctggatctgcaggaaatgaaaagcctcaaagcactgatgctaatgaagagaattgtatggcaaatcaggttgatatgcttacagatgagggttcagttaagcctgatatcatggtgaaaactgagcagaattcttgttcagataacctggatgtggaggctactccacctagtagcacgcgaaaagcacaacgtgcaaaggtaactccatgtcctggaactggttctgagccatctaacatctttgaagcattctggcatccaacagatcttgcagttaaaccagttatgcctagtaggaaagcagataaagctgtggacatggtccccacacttccttttgaagcacttacagcaagtgattatattaagttaccactggaacagatgaatgcattcaacagtcagatacttcagagtttaagtggaacctatcaggtttcagaaaaacaaaatactatcagatacctggagatgttaagcatgaattcagatgctgcgaacaaaataactaatggaccaattatgctgctactaataaaaatgcttcgactgtcaaaaacttcagtcttgcgtgtccaaattgcctcacttatggggttgctgatacgatattccactgctcttgatgtggagctggcaagttcaggaatttttaatgcactatcagatgggttaagggataaacatgataaactcaggcgattctgtatggcaacactaggagagttattattctatatttctacccagtctgatcaagataccaaggaaataaatacccaagaataccctttgaaggataacaggtctgcaacatcttggcaggttcctagtgctgtaattgcactggtgtcatctatcttgcgaaagggagaagatgatctagctcagctatatgccttacggacagtcgataatatatgtagccaaggaactgaatggacatcccgttttgcatctcaggatgcgattggacatctgtgctacatctataaagcaactggaaagcaggagagtacgaggctcattgcaggatcttgtttggcccgtctctctcgcttcagtccatcatgcattcatttaatattggaaaagatatcattcaaggatatagcatgcacacttatcaagggaaatacacgtgaacagcagattagtcttaatattctcaattcggcattagttaatagtcacactgtgacaagcatgaaccggtatattctttcattatcagatgacaaacaattggtccccgggctcatttctctaatagaacagggaactgatgttctacgtgggaagacccttttgtttgttgctctgctttgcaagaatagtcgaaggtggcttcctcatttcttttgcaatgcaaaattaatctcagctgttgatagactgggaaaagagaaggagggttttattcatcaatgtacagaagcatttgtgcagttggttgcttccttggtccctggtattcttgacactgtctccagtgatatacaacaggttatggttggcaaacgccatggacctgttactgctttagctgggcgagctcatccaaagagcacaattcatctgttccctgttattcttcatcttctgggaagtgcatccttcaagcatagagttgtgacaggccatgtattgcttcagttggcaaatcttattaagattttggaggcaccgtttcaggctagggatgatttccaaatgacattgttgcgagttcttgaggctgctacagaggagccttctgttatacttaatgaacacacagtattcatgagtcgtatcattccaagcttatctgtcttatacaagggcaataaagatggtgatgccagatttctttgtttgaagatactcgcagatgttatgattgtgatcttcagtgattcttcattaacttctgacgaacaaacaataactgatctgaaatcaatctctcagaggcattttctaccactgtacccttcttttgcagaggatgaagatcccatacccatatatgcacaaaaactgctagtaatgctaatggaacatggttgtgtaaaagtctctgatattctgcacaaagcaacagtatcccagtgctttgaatttttgctaggagatctttcaaatgcaaatgtaagcaatgtcaagctttgctttgccctggtatctgcacctgagatggacacctatattctttctcagcttcaagttgttagaagaatagggaacctactcgagtttgttgctgcaaaagacatggacgattttcttgaaccaaccctggaactttgcagagcttttattattcgtggcactggcagcaacagaagtgtcgccctctccaaaaacccggcacttcttcttgacagtgccttcagcatgagtattgctgttgatcaacaaacttgtgtcatggatatatgtgacttcggtggcaacatgggtatttttcttgagctagttggcaattcagatccgcagataagtgatttagcatcagattgtgtagtgttgttgctcaaggcagcacctcgagaggctacagtgggcttgttgacaagtcttcctaaattaagcactgtcatggacttgctgaagcatgacagccaccgatgtctgattcgcttattatatggcctagccttctcatgcagacaatacttagcccagggaatgatcctgtcaatatcagtgccagctttgatgcgagttgaagcacttgtttcagttttcaagggctccaatgatagccttcttgctgatgctgcttcttatttgagcgccgaactgcagcgcttacctcgctgtggttgaaggtgcaacttggccaaggaggcaggttggctgctattgttcaaggatgcgcatgtattccttcatccttcgtgcaccatgtacatgatgagctgagcaagtgagcaggacgtcatcaagtgaaggtactttacatcagtggctgatctcagttgcctcaatggccaagtgacactttccgctcgtagatgtgcagggtgcgagggtgttttatgctatcatttatgtgcatttcggggctgctgtatatggcgcttttgaacaataccttgaaggtggctagaagcaaaagaacacttcgttcccccgccaattttggttggcaattacctcagtttcatatttacttttctctgcatgcgtgtccact

SEQ ID NO: 71657 - DNA, 2845 bp, Zea Mays
gacagaggcagcggaaaaatagctagacaaagacaagagagaggaaggaaatagtgtcctgccccacaccacagtggtggaaggaaaggaaacgggagggagagaaaaacccaggccccccgatctcctcctcccactccgatcgcccgaccgatcgccgagcttccctgttccctccccgcccccgcgacgccgcgacgccatggagccgccgcacgccgagcaggccgtcgccgctgtagcagcaggaggagagggcggcaccgcaagcccgggcaccggcctcgaagggccggtgcttaggcgggggctggacggcggtggggaaggggaggacggggagctgggggcggggcaggaggcgaacgcacggctaccagagcggcctggcgaggcggactgtggctactacctccgcacgggcgcctgcggcttcggggagcgttgccgctacaaccatccccgcgatcgtggcggcactgagtattatttgaagactggaacttgtaaatttggttccaattgcaaatatcaccatcctaagcaagatggatctgtgcagtctgttatattaaacaacaatggattccctctacgcctgggtgagaaagaatgctcctactatatgaagactgggcaatgcaagtttggttctacatgtaaatttcatcatccagaatttggtggtattccggtgacccctggaatatatccaccattacaatcaccttctgtgccctcccctcatacatatgctccaaattggcaaatgggaagatcacctgcagttcctggatcatatataccaggctcatacactccaatgatgatctcatctggaatggttccattgcaaggatggagcccttatccggcatcggtaaatcctgtggcatcaggtggagcacaacaaactgttcaagctggaccattatatggtataggacaccatggatcttccaccgcaattgcttatggtggtacatacttgccatattcttcctcagctggacaatcgagcaataatcatcaagaacatggatttcctgagcgaccagggcagcctgagtgtcaatattatatgaggactggcgattgcaaatttggaactacgtgtaaatataaccatcctcgagattggagcactcctaagtccaattacatgttcagccatctatgccttccacttcgtccggttaatggcgttgggaagaccacaggtatggagtacccagagcgccctggacagccactctgtgagtactatgcaaagaatggcacatgcaaatttggttccaattgcaagtttgatcatcccagggaaagtggttttgtacctgtcgctttaaacaacagtggattccctctacgtctgggtgaaaaggaatgttcgtattacatgaaaactggacattgcaaatttggaggtacatgtaaattccatcacccagaacttggttttcttacagagacgcctggcatgtacccaccagttcaaccatcacctatttcctccccacatccatatccacatcattccaactggcaaatggggaggcctgctgttgtgccagggtcatttttaccaggcccatatccaccaatgatgcttccacctacagttatgccaatgcagggatggaacccttatgtttcacctatgaaccaaactacaccagctgggggccagcaagctgttccagcagggccatcttatggcttgtcgcaccaggagccaacctctgcagtgacttatggcagtcattatgcgcaattgtattcttcttctgggacttcaagcagcaacatacaagaatatgtgtttccagagcggcctgggcagcctgaatgtgaacattacatgaagacaggaacctgtaaatatggagcagcctgcaaatatcatcatcctcaatacttcagtggaccaaagtctaactgtatactgagccctctgggtcttcccctgcgtcctggttctcagcgatgtgcttactacgcacaccatggcttttgcaagtttgggccgacatgcaagtttgatcacccgatgggtactccaaactacagtcttccagcaccatcacttactgatgtgccagtcgctccatatcctcacactttctctgttactcctattgctccatatctgctgccccctgatccgcggccgcaatacactctagccaaggatccctctgcttatccaccacaagcgcccggaactacgtacggacctgttggggcgatatcaaaggtttatgcccgccacacgcttatccgatccccgacttctggagctgctggcatgcaagcgtcgtaatgagacaagagttgagagcactagtcccctctctgtcatgaagatagatcttgggcaaaccttctcaggatttttctgccataggtggaatggggtctcggattcttttttttttgctccaattcgacttcccatcaactgtgaataacggccgcagctgacatagaaaggtctcaataaatggaaagatagggattggcaagctcattcacttgccatttttctgtccatctctgaaacgagaggaggtaattctgactgtagtcggattcagagctccgttattatctcgtgtaacgtgcacaattgcaggggattcgaatgggaaagctgatgggttccatagctctagcccaaatcttttgtttatctcgtcatcttattacatatatgatatgatgtgtataccccgtcggaacagcaacatgtatatctatctatatatattactctaaactcatgttactgtttattgggcgtgaattattcgactgattgcccatcctagattgaatactgtta

SEQ ID NO: 71658 - DNA, 2304 bp, Zea Mays
cggaaaaatagctagacaaagacaagagagaggaaggaaatagtgtcctgccccacaccacagtggtggaaggaaaggaaacgggagggagagaaaaacccaggccccccgatctcctcctcccactccgatcgcccgaccgatcgccgagcttccctgttccctccccgcccccgcgacgccgcgacgccatggagccgccgcacgccgagcaggccgtcgccgctgtagcagcaggaggagagggcggcaccgcaagcccgggcaccggcctcgaagggccggtgcttaggcgggggctggacggcggtggggaaggggaggacggggagctgggggcggggcaggaggcgaacgcacggctaccagagcggcctggcgaggcggactgtggctactacctccgcacgggcgcctgcggcttcggggagcgttgccgctacaaccatccccgcgatcgtggcggcactgaggatatctgaggtctgctgcaaccaaatctctagctgccaattgctaatgttttctaatagattcgtagcaaatggcttcacaaaattctcctgaaacgccaagctgataaatagtttcttcttaaaacctatttcaaaaattttagtttggtggaggtgccaagaatggcgcagcacaagactttccagaacgacagggccaacctgtatgcgagtattatttgaagactggaacttgtaaatttggttccaattgcaaatatcaccatcctaagcaagatggatctgtgcagtctgttatattaaacaacaatggattccctctacgcctgggtgagaaagaatgctcctactatatgaagactgggcaatgcaagtttggttctacatgtaaatttcatcatccagaatttggtggtattccggtgacccctggaatatatccaccattacaatcaccttctgtgccctcccctcatacatatgctccaaattggcaaatgggaagatcacctgcagttcctggatcatatataccaggctcatacactccaatgatgatctcatctggaatggttccattgcaaggatggagcccttatccggcatcggtaaatcctgtggcatcaggtggagcacaacaaactgttcaagctggaccattatatggtataggacaccatggatcttccaccgcaattgcttatggtggtacatacttgccatattcttcctcagctggacaatcgagcaataatcatcaagaacatggatttcctgagcgaccagggcagcctgagtgtcaatattatatgaggactggcgattgcaaatttggaactacgtgtaaatataaccatcctcgagattggagcactcctaagtccaattacatgttcagccatctatgccttccacttcgtccgggtgctcagccttgtgcgtactatgcccaaaatggatattgcagatatggagttgcatgcaaatatgatcactcaatgggtacactaggctacagttcatctgctttgccactatctgacatgccaattgctccctatcctattagcttctccgttgccacgttggctccatcttcgtcttccccagaatatatttcaactaaagatccatctatcaatcatgtagtatcaccagtggcaggacccgcgcctgttggagcaatcttgccaaaaggggtattccatcatgataccattatgcaaactcagactcctacaagtgccggcagttcaagccctggtggtgggcgctgattttactgagctggtgggagtgatcctctcatcataaattttctatcacttgacacagagaagctgcggcgagggtgggtttctttaccatcagaataagagagcattgataggtcacacgcaagctcgattcactagcaattttgggttcttccgttcatgtccaaaacgggaaaaaggaaaggtttttgaatgtcaggttccgtagagcatattgggcgccttggtggggctcaggtccataccctcggtaaataattctcaggcaagaaaattttcgttgttatcaagaaaattttcacatgcagagttactgggttcctccacctttcaatttttctctttccttttgttttctgtatttcgtcatactgggagcaaggcgcattgtaatggataaaaaatgcttaattgaagagatcttgctgtcaatactgaaatggctctattcacgagctcgacttgacacttatatattacgtccatgtccatttcataaagtgtagcgtttcagttttgtcctaagctaaagtgttttatcagatttgtag

SEQ ID NO: 71659 - DNA, 2129 bp, Zea Mays
gtcctgccccacaccacagtggtggaaggaaaggaaacgggagggagagaaaaacccaggccccccgatctcctcctcccactccgatcgcccgaccgatcgccgagcttccctgttccctccccgcccccgcgacgccgcgacgccatggagccgccgcacgccgagcaggccgtcgccgctgtagcagcaggaggagagggcggcaccgcaagcccgggcaccggcctcgaagggccggtgcttaggcgggggctggacggcggtggggaaggggaggacggggagctgggggcggggcaggaggcgaacgcacggctaccagagcggcctggcgaggcggactgtggctactacctccgcacgggcgcctgcggcttcggggagcgttgccgctacaaccatccccgcgatcgtggcggcactgagtttggtggaggtgccaagaatggcgcagcacaagactttccagaacgacagggccaacctgtatgcgagtattatttgaagactggaacttgtaaatttggttccaattgcaaatatcaccatcctaagcaagatggatctgtgcagtctgttatattaaacaacaatggattccctctacgcctgggtgagaaagaatgctcctactatatgaagactgggcaatgcaagtttggttctacatgtaaatttcatcatccagaatttggtggtattccggtgacccctggaatatatccaccattacaatcaccttctgtgccctcccctcatacatatgctccaaattggcaaatgggaagatcacctgcagttcctggatcatatataccaggctcatacactccaatgatgatctcatctggaatggttccattgcaaggatggagcccttatccggcatcggtaaatcctgtggcatcaggtggagcacaacaaactgttcaagctggaccattatatggtataggacaccatggatcttccaccgcaattgcttatggtggtacatacttgccatattcttcctcagctggacaatcgagcaataatcatcaagaacatggatttcctgagcgaccagggcagcctgagtgtcaatattatatgaggactggcgattgcaaatttggaactacgtgtaaatataaccatcctcgagattggagcactcctaagtccaattacatgttcagccatctatgccttccacttcgtccgggtgctcagccttgtgcgtactatgcccaaaatggatattgcagatatggagttgcatgcaaatatgatcactcaatgggtacactaggctacagttcatctgctttgccactatctgacatgccaattgctccctatcctattagcttctccgttgccacgttggctccatcttcgtcttccccagaatatatttcaactaaagatccatctatcaatcatgtagtatcaccagtggcaggacccgcgcctgttggagcaatcttgccaaaaggggtattccatcatgataccattatgcaaactcagactcctacaagtgccggcagttcaagccctggtggtgggcgctgattttactgagctggtgggagtgatcctctcatcataaattttctatcacttgacacagctgtggtctctgtagagaagctgcggcgagggtgggtttctttaccatcagaataagagagcattgataggtcacacgcaagctcgattcactagcaattttgggttcttccgttcatgtccaaaacgggaaaaaggaaaggtttttgaatgtcaggttccgtagagcatattgggcgccttggtggggctcaggtccataccctcggtaaataattctcaggcaagaaaattttcgttgttatcaagaaaattttcacatgcagagttactgggttcctccacctttcaatttttctctttccttttgttttctgtatttcgtcatactgggagcaaggcgcattgtaatggataaaaaatgcttaattgaagagatcttgctgtcaatactgaaatggctctattcacgagctcgacttgacacttatatattacgtccatgtccatttcataaagtgtagcgtttcagttttgtcctaagctaaagtgttttatcagatttgtag

SEQ ID NO: 71660 - DNA, 3988 bp, Zea Mays
gtcctgccccacaccacagtggtggaaggaaaggaaacgggagggagagaaaaacccaggccccccgatctcctcctcccactccgatcgcccgaccgatcgccgagcttccctgttccctccccgcccccgcgacgccgcgacgccatggagccgccgcacgccgagcaggccgtcgccgctgtagcagcaggaggagagggcggcaccgcaagcccgggcaccggcctcgaagggccggtgcttaggcgggggctggacggcggtggggaaggggaggacggggagctgggggcggggcaggaggcgaacgcacggctaccagagcggcctggcgaggcggactgtggctactacctccgcacgggcgcctgcggcttcggggagcgttgccgctacaaccatccccgcgatcgtggcggcactgagtttggtggaggtgccaagaatggcgcagcacaagactttccagaacgacagggccaacctgtatgcgagtattatttgaagactggaacttgtaaatttggttccaattgcaaatatcaccatcctaagcaagatggatctgtgcagtctgttatattaaacaacaatggattccctctacgcctgggtgagaaagaatgctcctactatatgaagactgggcaatgcaagtttggttctacatgtaaatttcatcatccagaatttggtggtattccggtgacccctggaatatatccaccattacaatcaccttctgtgccctcccctcatacatatgctccaaattggcaaatgggaagatcacctgcagttcctggatcatatataccaggctcatacactccaatgatgatctcatctggaatggttccattgcaaggatggagcccttatccggcatcggtaaatcctgtggcatcaggtggagcacaacaaactgttcaagctggaccattatatggtataggacaccatggatcttccaccgcaattgcttatggtggtacatacttgccatattcttcctcagctggacaatcgagcaataatcatcaagaacatggatttcctgagcgaccagggcagcctgagtgtcaatattatatgaggactggcgattgcaaatttggaactacgtgtaaatataaccatcctcgagattggagcactcctaagtccaattacatgttcagccatctatgccttccacttcgtccgggtgctcagccttgtgcgtactatgcccaaaatggatattgcagatatggagttgcatgcaaatatgatcactcaatgggtacactaggctacagttcatctgctttgccactatctgacatgccaattgctccctatcctattagcttctccgttgccacgttggctccatcttcgtcttccccagaatatatttcaactaaagatccatctatcaatcatgtagtatcaccagtggcaggacccgcgcctgttggagcaatcttgccaaaaggggtattccatcatgataccattatgcaaactcagactcctacaagtgccggcagttcaagccctggtggtgggcgctgattttactgagctggtgggagtgatcctctcatcataaattttctatcacttgacacagttctgataggcctctccaatgtgaataagctgtggtctctgtagagaagctgcggcgagggtgggtttctttaccatcagaataagagagcattgataggtcacacgcaagctcgattcactagcaattttgggttcttccgttcatgtccaaaacgggaaaaaggaaaggtttttgaatgtcaggttccgtagagcatattgggcgccttggtggggctcaggtccataccctcggtaaataattctcagagtcgatgcggaagctggggctcggcgaggacgacgaagcgggggaggagaagcttccggagcggccgggcgaggcggactgcacctactacctccgcactggcgcctgcggctacggggagcgctgccgctacaaccacccccgggatcggccggctccggttaatggcgttgggaagaccacaggtatggagtacccagagcgccctggacagccactctgtgagtactatgcaaagaatggcacatgcaaatttggttccaattgcaagtttgatcatcccagggaaagtggttttgtacctgtcgctttaaacaacagtggattccctctacgtctgggtgaaaaggaatgttcgtattacatgaaaactggacattgcaaatttggaggtacatgtaaattccatcacccagaacttggttttcttacagagacgcctggcatgtacccaccagttcaaccatcacctatttcctccccacatccatatccacatcattccaactggcaaatggggaggcctgctgttgtgccagggtcatttttaccaggcccatatccaccaatgatgcttccacctacagttatgccaatgcagggatggaacccttatgttgtaagtttctattacttgtcattttgtactttattactttaaagaaggcacttgcgtgccttatataaattaggaagatatctttgttctaaattggcatctccaatattgcggtaagtagtgagaattcagtggtaagttcataacaaaatagaggcaatgggctaaaatggaggttttataggaccacaaataattggatgtaagttagtaattccttcatgccttgaaaacacaatcttagccatgaatagaagacaccactgactgcctgatgatttttaaaaactctttttggttctcagtcacctatgaaccaaactacaccagctgggggccagcaagctgttccagcagggccatcttatggcttgtcgcaccaggagccaacctctgcagtgacttatggcagtcattatgcgcaattgtattcttcttctgggacttcaagcagcaacatacaagaatatgtgtttccagagcggcctgggcagcctgaatgtgaacattacatgaagacaggaacctgtaaatatggagcagcctgcaaatatcatcatcctcaatacttcagtggaccaaagtctaactgtatactgagccctctgggtcttcccctgcgtcctggttctcagcgatgtgcttactacgcacaccatggcttttgcaagtttgggccgacatgcaagtttgatcacccgatgggtactccaaactacagtcttccagcaccatcacttactgatgtgccagtcgctccatatcctcacactttctctgttactcctattgctccatatctgctgccccctgatccgcggccgcaatacactctagccaaggatccctctgcttatccaccacaagcgcccggaactacgtacggacctgttggggcgatatcaaaggtttatgcccgccacacgcttatccgatccccgacttctggagctgctggcatgcaagcgtcgtaatgagacaagagttgagagcactagtcccctctctgtcatgaagatagatcttgggcaaaccttctcaggatttttctgccataggtggaatggggtctcggattcttttttttttgctccaattcgacttcccatcaactgtgaataacggccgcagctgacatagaaaggtctcaataaatggaaagatagggattggcaagctcattcacttgccatttttctgtccatctctgaaacgagaggaggtaattctgactgtagtcggattcagagctccgttattatctcgtgtaacgtgcacaattgcaggggattcgaatgggaaagctgatgggttccatagctctagcccaaatcttttgtttatctcgtcatcttattacatatatgatatgatgtgtataccccgtcggaacagcaacatgtatatctatctatatatattactctaaactcatgttactgtttattgggcgtgaattattcgactgattgcccatcctagattgaatactgtta

SEQ ID NO: 71661 - DNA, 2301 bp, Zea Mays
ccctttccttttccgtttcccatgtccattggcgccacgcctctgttttaccccgtttagaggctgacatcccaggcttatccgccgctgcgccacgccgtactcgtccccgttaaacagcgccgcacggttgcggcagtggttgcccgagcgaatccacgcgtccgcccgtttcgctcgttgtctccggggtaggggggccgctccagcgccgaacggaaatccccatcagcactggccactcccgatcccccgtcccggcgtccccccaatccctctccctgcaaaaggccaccgcgacgcgaccgcgtacgggaggtgagccgcgagtgcagtgcagtgcaggcaggcaggccgagagaagagtcggcaggaagcaaccgagaccgcgaggaagcagcgagctgcactgcagcggcgcagagaaaaaaaaaagaaattctggaatagtttttttcttccctttggctccgtgaggttcctgtgcttgctcgctcgctcgcctgagcttcgatcgagccgtacgcgggccgtcgggagctcaatcaccgctctccgggagcttccgagggccgtcggatggagccgtacgcggcgacgaagggcggcgagtccgacgccggcaccggcctggaagagtcgatgcggaagctggggctcggcgaggacgacgaagcgggggaggagaagcttccggagcggccgggcgaggcggactgcacctactacctccgcactggcgcctgcggctacggggagcgctgccgctacaaccacccccgggatcggccggctccggttaatggcgttgggaagaccacaggtatggagtacccagagcgccctggacagccactctgtgagtactatgcaaagaatggcacatgcaaatttggttccaattgcaagtttgatcatcccagggaaagtggttttgtacctgtcgctttaaacaacagtggattccctctacgtctgggtgaaaaggaatgttcgtattacatgaaaactggacattgcaaatttggagggtcatttttaccaggcccatatccaccaatgatgcttccacctacagttatgccaatgcagggatggaacccttatgtttcacctatgaaccaaactacaccagctgggggccagcaagctgttccagcagggccatcttatggcttgtcgcaccaggagccaacctctgcagtgacttatggcagtcattatgcgcaattgtattcttcttctgggacttcaagcagcaacatacaagaatatgtgtttccagagcggcctgggcagcctgaatgtgaacattacatgaagacaggaacctgtaaatatggagcagcctgcaaatatcatcatcctcaatacttcagtggaccaaagtctaactgtatactgagccctctgggtcttcccctgcgtcctggttctcagcgatgtgcttactacgcacaccatggcttttgcaagtttgggccgacatgcaagtttgatcacccgatgggtactccaaactacagtcttccagcaccatcacttactgatgtgccagtcgctccatatcctcacactttctctgttactcctattgctccatatctgctgccccctgatccgcggccgcaatacactctagccaaggatccctctgcttatccaccacaagcgcccggaactacgtacggacctgttggggcgatatcaaaggtttatgcccgccacacgcttatccgatccccgacttctggagctgctggcatgcaagcgtcgtaatgagacaagagttgagagcactagtcccctctctgtcatgaagatagatcttgggcaaaccttctcaggatttttctgccataggtggaatggggtctcggattcttttttttttgctccaattcgacttcccatcaactgtgaataacggccgcagctgacatagaaaggtctcaataaatggaaagatagggattggcaagctcattcacttgccatttttctgtccatctctgaaacgagaggaggtaattctgactgtagtcggattcagagctccgttattatctcgtgtaacgtgcacaattgcaggggattcgaatgggaaagctgatgggttccatagctctagcccaaatcttttgtttatctcgtcatcttattacatatatgatatgatgtgtataccccgtcggaacagcaacatgtatatctatctatatatattactctaaactcatgttactgtttattgggcgtgaattattcgactgattgcccatcctagattgaatactgtta

SEQ ID NO: 71662 - DNA, 2640 bp, Zea Mays
ttcccatgtccattggcgccacgcctctgttttaccccgtttagaggctgacatcccaggcttatccgccgctgcgccacgccgtactcgtccccgttaaacagcgccgcacggttgcggcagtggttgcccgagcgaatccacgcgtccgcccgtttcgctcgttgtctccggggtaggggggccgctccagcgccgaacggaaatccccatcagcactggccactcccgatcccccgtcccggcgtccccccaatccctctccctgcaaaaggccaccgcgacgcgaccgcgtacgggaggtgagccgcgagtgcagtgcagtgcaggcaggcaggccgagagaagagtcggcaggaagcaaccgagaccgcgaggaagcagcgagctgcactgcagcggcgcagagaaaaaaaaaagaaattctggaatagtttttttcttccctttggctccgtgaggttcctgtgcttgctcgctcgctcgcctgagcttcgatcgagccgtacgcgggccgtcgggagctcaatcaccgctctccgggagcttccgagggccgtcggatggagccgtacgcggcgacgaagggcggcgagtccgacgccggcaccggcctggaagagtcgatgcggaagctggggctcggcgaggacgacgaagcgggggaggagaagcttccggagcggccgggcgaggcggactgcacctactacctccgcactggcgcctgcggctacggggagcgctgccgctacaaccacccccgggatcggccggctccggtcagcgccagcctcacccacgcagcctcgctgtccgcttgttcccctacccctgctctagtgctctgccaagttttattctgttccttttcttttgtctcgtgctcatctcgatggttactggtgagctaagcgctcccgacaatgaccgacactgcgtgatgttacatctggttggtgggtgacgagtttgttcttaaagttgaaggttaatggcgttgggaagaccacaggtatggagtacccagagcgccctggacagccactctgtgagtactatgcaaagaatggcacatgcaaatttggttccaattgcaagtttgatcatcccagggaaagtggttttgtacctgtcgctttaaacaacagtggattccctctacgtctgggtgaaaaggaatgttcgtattacatgaaaactggacattgcaaatttggaggtacatgtaaattccatcacccagaacttggttttcttacagagacgcctggcatgtacccaccagttcaaccatcacctatttcctccccacatccatatccacatcattccaactggcaaatggggaggcctgctgttgtgccagggtcatttttaccaggcccatatccaccaatgatgcttccacctacagttatgccaatgcagggatggaacccttatgtttcacctatgaaccaaactacaccagctgggggccagcaagctgttccagcagggccatcttatggcttgtcgcaccaggagccaacctctgcagtgacttatggcagtcattatgcgcaattgtattcttcttctgggacttcaagcagcaacatacaagaatatgtgtttccagagcggcctgggcagcctgaatgtgaacattacatgaagacaggaacctgtaaatatggagcagcctgcaaatatcatcatcctcaatacttcagtggaccaaagtctaactgtatactgagccctctgggtcttcccctgcgtcctggttctcagcgatgtgcttactacgcacaccatggcttttgcaagtttgggccgacatgcaagtttgatcacccgatgggtactccaaactacagtcttccagcaccatcacttactgatgtgccagtcgctccatatcctcacactttctctgttactcctattgctccatatctgctgccccctgatccgcggccgcaatacactctagccaaggatccctctgcttatccaccacaagcgcccggaactacgtacggacctgttggggcgatatcaaaggtttatgcccgccacacgcttatccgatccccgacttctggagctgctggcatgcaagcgtcgtaatgagacaagagttgagagcactagtcccctctctgtcatgaagatagatcttgggcaaaccttctcaggatttttctgccataggtggaatggggtctcggattcttttttttttgctccaattcgacttcccatcaactgtgaataacggccgcagctgacatagaaaggtctcaataaatggaaagatagggattggcaagctcattcacttgccatttttctgtccatctctgaaacgagaggaggtaattctgactgtagtcggattcagagctccgttattatctcgtgtaacgtgcacaattgcaggggattcgaatgggaaagctgatgggttccatagctctagcccaaatcttttgtttatctcgtcatcttattacatatatgatatgatgtgtataccccgtcggaacagcaacatgtatatctatctatatatattactctaaactcatgttactgtttattgggcgtgaattattcgactgattgcccatcctagattgaatactgtta

SEQ ID NO: 71663 - DNA, 2277 bp, Zea Mays
cttgcattgtaggctgctctggctctgcagttctactcctattaggattgtattgcttatttgtctgtcttttccttatgtcttgcgcctttagtactccctccttcccaaattataaggtgttttgacttttttacatccatagcctttgctatccacgtagatagggagggagagcagataataaccagtcttcatatatgtctacaatgagtgggagattggagtctttggtgggagctagaaccttcagtacctaataggagctatacccttcatatgtcacactagaatgaatgcatgatggagtataatgtagaatgttaatggcgttgggaagaccacaggtatggagtacccagagcgccctggacagccactctgtgagtactatgcaaagaatggcacatgcaaatttggttccaattgcaagtttgatcatcccagggaaagtggttttgtacctgtcgctttaaacaacagtggattccctctacgtctgggtgaaaaggaatgttcgtattacatgaaaactggacattgcaaatttggaggtacatgtaaattccatcacccagaacttggttttcttacagagacgcctggcatgtacccaccagttcaaccatcacctatttcctccccacatccatatccacatcattccaactggcaaatggggaggcctgctgttgtgccagggtcatttttaccaggcccatatccaccaatgatgcttccacctacagttatgccaatgcagggatggaacccttatgttgtaagtttctattacttgtcattttgtactttattactttaaagaaggcacttgcgtgccttatataaattaggaagatatctttgttctaaattggcatctccaatattgcggtaagtagtgagaattcagtggtaagttcataacaaaatagaggcaatgggctaaaatggaggttttataggaccacaaataattggatgtaagttagtaattccttcatgccttgaaaacacaatcttagccatgaatagaagacaccactgactgcctgatgatttttaaaaactctttttggttctcagtcacctatgaaccaaactacaccagctgggggccagcaagctgttccagcagggccatcttatggcttgtcgcaccaggagccaacctctgcagtgacttatggcagtcattatgcgcaattgtattcttcttctgggacttcaagcagcaacatacaagaatatgtgtttccagagcggcctgggcagcctgaatgtgaacattacatgaagacaggaacctgtaaatatggagcagcctgcaaatatcatcatcctcaatacttcagtggaccaaagtctaactgtatactgagccctctgggtcttcccctgcgtcctggttctcagcgatgtgcttactacgcacaccatggcttttgcaagtttgggccgacatgcaagtttgatcacccgatgggtactccaaactacagtcttccagcaccatcacttactgatgtgccagtcgctccatatcctcacactttctctgttactcctattgctccatatctgctgccccctgatccgcggccgcaatacactctagccaaggatccctctgcttatccaccacaagcgcccggaactacgtacggacctgttggggcgatatcaaaggtttatgcccgccacacgcttatccgatccccgacttctggagctgctggcatgcaagcgtcgtaatgagacaagagttgagagcactagtcccctctctgtcatgaagatagatcttgggcaaaccttctcaggatttttctgccataggtggaatggggtctcggattcttttttttttgctccaattcgacttcccatcaactgtgaataacggccgcagctgacatagaaaggtctcaataaatggaaagatagggattggcaagctcattcacttgccatttttctgtccatctctgaaacgagaggaggtaattctgactgtagtcggattcagagctccgttattatctcgtgtaacgtgcacaattgcaggggattcgaatgggaaagctgatgggttccatagctctagcccaaatcttttgtttatctcgtcatcttattacatatatgatatgatgtgtataccccgtcggaacagcaacatgtatatctatctatatatattactctaaactcatgttactgtttattgggcgtgaattattcgactgattgcccatcctagattgaatactgtta

SEQ ID NO: 71664 - DNA, 1826 bp, Zea Mays
ataggagctatacccttcatatgtcacactagaatgaatgcatgatggagtataatgtagaatgttaatggcgttgggaagaccacaggtatggagtacccagagcgccctggacagccactctgtgaggtaaataaaaccaattttaaatctatttcttattgacattttaggtcaaaatgtattatttttttattgtcatgtggtggaaactctggttacgaaattctcgttattttcagtactatgcaaagaatggcacatgcaaatttggttccaattgcaagtttgatcatcccagggaaagtggttttgtacctgtcgctttaaacaacagtggattccctctacgtctgggtgaaaaggaatgttcgtattacatgaaaactggacattgcaaatttggaggtacatgtaaattccatcacccagaacttggttttcttacagagacgcctggcatgtacccaccagttcaaccatcacctatttcctccccacatccatatccacatcattccaactggcaaatggggaggcctgctgttgtgccagggtcatttttaccaggcccatatccaccaatgatgcttccacctacagttatgccaatgcagggatggaacccttatgtttcacctatgaaccaaactacaccagctgggggccagcaagctgttccagcagggccatcttatggcttgtcgcaccaggagccaacctctgcagtgacttatggcagtcattatgcgcaattgtattcttcttctgggacttcaagcagcaacatacaagaatatgtgtttccagagcggcctgggcagcctgaatgtgaacattacatgaagacaggaacctgtaaatatggagcagcctgcaaatatcatcatcctcaatacttcagtggaccaaagtctaactgtatactgagccctctgggtcttcccctgcgtcctggttctcagcgatgtgcttactacgcacaccatggcttttgcaagtttgggccgacatgcaagtttgatcacccgatgggtactccaaactacagtcttccagcaccatcacttactgatgtgccagtcgctccatatcctcacactttctctgttactcctattgctccatatctgctgccccctgatccgcggccgcaatacactctagccaaggatccctctgcttatccaccacaagcgcccggaactacgtacggacctgttggggcgatatcaaaggtttatgcccgccacacgcttatccgatccccgacttctggagctgctggcatgcaagcgtcgtaatgagacaagagttgagagcactagtcccctctctgtcatgaagatagatcttgggcaaaccttctcaggatttttctgccataggtggaatggggtctcggattcttttttttttgctccaattcgacttcccatcaactgtgaataacggccgcagctgacatagaaaggtctcaataaatggaaagatagggattggcaagctcattcacttgccatttttctgtccatctctgaaacgagaggaggtaattctgactgtagtcggattcagagctccgttattatctcgtgtaacgtgcacaattgcaggggattcgaatgggaaagctgatgggttccatagctctagcccaaatcttttgtttatctcgtcatcttattacatatatgatatgatgtgtataccccgtcggaacagcaacatgtatatctatctatatatattactctaaactcatgttactgtttattgggcgtgaattattcgactgattgcccatcctagattgaatactgtta

SEQ ID NO: 71665 - DNA, 936 bp, Zea Mays
agcttctttgttgtctacatgaaaaatgaaatatgatccatattggtttgcatccttcgattaccgggttctcagcgatgtgcttactacgcacaccatggcttttgcaagtttgggccgacatgcaagtttgatcacccgatgggtactccaaactacagtcttccagcaccatcacttactgatgtgccagtcgctccatatcctcacactttctctgttactcctattgctccatatctgctgccccctgatccgcggccgcaatacactctagccaaggatccctctgcttatccaccacaagcgcccggaactacgtacggacctgttggggcgatatcaaaggtttatgcccgccacacgcttatccgatccccgacttctggagctgctggcatgcaagcgtcgtaatgagacaagagttgagagcactagtcccctctctgtcatgaagatagatcttgggcaaaccttctcaggatttttctgccataggtggaatggggtctcggattcttttttttttgctccaattcgacttcccatcaactgtgaataacggccgcagctgacatagaaaggtctcaataaatggaaagatagggattggcaagctcattcacttgccatttttctgtccatctctgaaacgagaggaggtaattctgactgtagtcggattcagagctccgttattatctcgtgtaacgtgcacaattgcaggggattcgaatgggaaagctgatgggttccatagctctagcccaaatcttttgtttatctcgtcatcttattacatatatgatatgatgtgtataccccgtcggaacagcaacatgtatatctatctatatatattactctaaactcatgttactgtttattgggcgtgaattattcgactgattgcccatcctagattgaatactgtta

SEQ ID NO: 71666 - DNA, 1268 bp, Zea Mays
cgaccgtccgcctctcctcgtcctcgtcctcgtcctcgcgctctcgatcgccaagcaccggtagggcgggctgcctcccgagtcggagtatcccgcggcggcgccacggtgctgctctcccttccttgacgcggccaacctggtcgacgcttggccgctctgggcaaggagctgcgcagaaggctggcgaggaatttgatggcccctaggcgcggtagttgactccatgaagaacatcgcggagaggacgaacggcgttgtaagttcctgtctctcaatcgtgcttactcctgcgttgaaaatcgtttgagtcatggaattcgttttgatgatggggatcctggttccggccggaccttgtgggggtggagcaaggaattcgaactgatttcgttgatcggtttatatcctggaggaaatctggtgatttcgatgaccttcaatcgaatcaccttggatctcctgcagctataggcatgcattttgaatatggatccaaaggtactctgtagtgttccagttggaggaaattccaaggagcgaaagtcgaaggatgttgagcgcagggcctttggcaaacgcttacaacgtagtacgtcgggcgtgcttgatatggccatggagtggaccactgccgaggccaaggccggcaacacaactgacgttggcggctttcctgcctgtaaataaaagctgggctcaccgtcccgtggtgcatgagagtagcgccgacgaaaggtttggcccctttcatggtgggttccgaggagacgcgcggaatatcttcaaaaggtggccagctcgttaactcaggaagggatagacaccaaaacggttctccaagcataggagacaactaagagactctattgtacaatggagtgtctataaacgtagtctattaataaatacagaattaaatgtatttgtatagcatcagatcgatagaacagacgacaaattcgtacagtgggaagtgaggcgtctgttgttacttggtttacgagccagaggcgtctcttcacggagagacggttctaagatttttttgcaaataaccccctaaaacactttaagagcccccacattaaacaccactgtacatgccctaaagaacgcttctggatatttgtattcctgcgctgagctaatcaagagggctaggaactttggacgctcgagatcctgtttgatacgacttaatcaaggcagggccgatgggaaggcttcccttcttagggcatgtacaaactagatagctagacggg

SEQ ID NO: 71667 - DNA, 507 bp, Zea Mays
ctgattccaatcagatacgtctcatccgttgtgtcgtcttttttttcggtgtcgcgagctcttcctccttccgcttctcttcgacagaaaactagggttttgctcttggaatctctctccccgctgccgccgccgccggacagtgcaccgacgatacgacctcctccttcctccgatctggcctttttaatccgcggatcccgtacaagatgcttcccctctcgctcctcaagaccgcccaggggcacccaatgctcgtggagctgaagaatggtgagacgtacaacgggcatctggtcaattgcgacacgtggatgaacatccaccttagggaggttatttgcacctcaaaggatggtgacaagttttggaggatgccagagtgttacattcgtgggaacaccattaagtatcttcgagttcctgatgaggtgattgacaaggttcaggaggaaacttccaaaagccggtcagtttgcagcatgttggtatggacagctgtgtggg

SEQ ID NO: 71668 - DNA, 3233 bp, Zea Mays
ggcgaagcttaagggtctggaaagcttgcaggcgaaggcgcggcattccattgtgcgccggaaggatctttagccggcggccatggcgctgggggtgttagtggtggaggaggggaggcagcagcaggaggcgccgccgccgctcgccgtggaggcgcttcgcgacaaaatcgtcgagaaggtgaaggcgaaccgcgtcacgctgatcgtgggggacactggatgcgggaagagttctctggttccccagttcctcttagaagaaaatatggagcctatcctgtgcacacagcctagaaggtttgcagtggtagccattgctcgagcgatagctaactctcgcaattggcagctaggcgaggaggttggatatcatataggtcactcaaatatgtcggatctcaactctaaaaggtcaaaaattgtgttcaaaacagctggtgtagtattggagcaaatgtgtgataggggaattgctgcattaaagtataaggtcattattcttgatgaggtacatgaaagatccgtggaatctgatcttgtccttgctagtatcaagcagtttttgatgaaaaagagtgacttaaggttagttttgatgtctgccactgctgacattactagatataaagaatattttagagacctagggagaggcgaaagggttgaagtgattgccattccctgcagtccacatacaagcatttttcagcgcaaagtcctatacctagagcagattgctgatattctcaagataaattcccaattgctttcatcaaaatattgctctggtccggatgcttctgctgatgctgaaataaattatgatgtttatgaacttatccacaagttattgttgcatatacaccaaaatgaaccagacattagcaagagcattttggttttcctccctacatactacgcattggagcagcaatggatccgtctactgccttttagttcaacctttaaggtacatattcttcaccggagtattggcactgatgaagcacttcagactatggagatctcaaagtcttgccgaaaggtgatactggctacaaatattgctgaatcatcagttactataccaggagttgcatacgttatcgattcttgtagatcattgcaagtatattgggacccaatcaggaaagcagatgcagctgggcttgtttggatttccaagtctcaggcagagcagcgtaaaggcaggacaggtcgaacctgtgatggtcaaatttatcgtttggtgactggaacattttatagcagtttaaatgatcatgaatatcctgccattttgagatgctccttaagggagcaagtgctcatggtttgttgtgcagagcccagatcgataagcgaccctagttcacttctgcaaagagttcttaatccaccagatccagatgctattgaagaagcgctagaatcactagttcaaattcatgcattggagaagacagcttctggacgctacgaacccactttttatggctgtttgctcaatagtttgccattgtcatttgattcttctgttcttgcccttaaattttgtgagcttggtgctatccatgaaggaattctaataagcatcatgctggacatccagccgcttcctatcttgcacacttttggctatcgagaactgtgccagaagtacatagacaattatttcaagggaaatggcagtgtacaaatcggcaaaaaggaagctaccaccattggaaatctttgtgcatttcaattttgggagcgcgtttttaaggacaaacaccgtctggaatatctaaaatatgtggcgaagactcaagaaccagaagaatcacataccttccttactaaacctgaagaggaatggtgtgcagttcacaacctcctccctgcagcgtttaagaacatatctgaaatttatgatgttgttgtgatgcaactgcaccggttcaggccaagttttcttgtcaaaatcaatcctccaaagtttcttcagccttctgaattcaaccacacatgtctccatcgtgaaatactggatctagaggaggacgtggattcactctcattagagactgagaatgctcacagcgattcacagaagcgatgtgctgcaactccatatgtttcaccaactgattttgagaccagcaccattgttgaaatgctaaagacacttgtcaagatgaaaacacaacatgctgagaataaaatttcttataaggggcgacttggttctaatgtgaagccaaccttgggaactcaggcgtgcgtgttttttgctaatggatcatgcaatcttggggatgtgtgccgcttttctcattcatcccttgctcctaaaccagtatgcaagttctatctcacactacagggttgtcgaaatggcagatcttgtccatactctcatgattctggctcattggtctctgcacctgtcacatctggaatatgctctcaggaaagcagaggcacctcattgtgcgatacaaggttgcttcctgctgatggagatgggcatattcttgtcgtgaatgacaaaaccctgcagttctctaccaccgagcaggctctcttgcagaagttcttcgcgagtattgccatcaagattttgtcggaacagctgtccggcctgcaggtcatcctgatcatgaaaaacacgagatacattcagttgcaggtggaaagattggcgcgggagtgcttctttttcctcagcgaatcgtttctgtctgatgaagcaaatctaggatggttctcagatacctccacgcacacaagaaggatgcaagtggcagcaccggtgacctacgtcttcaacctgcaccctccctcctctactcagtttggggattatccggcggaacttcgggaggctttacgcagggattagttaggccaggttatccacgtgaatagctagtgtcatctggatttcgtagcagtgaaccttgttcgtggtattggcactgaagccctttctgtctgtgagttgtgagcttgcttactcgttcttagtaagacgctgaggaatattgcataactccattcaggtgtcaactgtcggtcgtctcatggacagcttattaggccgctgcttgcaaatatcatttgtgggtgggcgtaaatatgcttgacctgctaagttaacgtacgttttagtgcttttgttgactgcgaaattgtaccttcacgatgtcatctattgtgtgcagacgaaagcattctgaaatatc

SEQ ID NO: 71669 - DNA, 1983 bp, Zea Mays
ccgccgctgccccatttcccttcgccgcgaaaaccctagaaactacccaccccgaccacccgccgccatgtcatccacaacgccggccatcgcgtcccccgcctctgagcaagccaaatcgaagaaaaagaagcacagatcgaaggacgacccctccgctgctgccgccgacccaccgtcgctcgctgaggccgaggagaagactgatggctacctcatcaagccgcagtcccttgttccgtccctcgacacctccacctggccgctcctcctcaaaaactacgaccgccttaacgtccgcaccggccactacaccccgctaccctccggccactcgccgctcaagcgtcccctcgccgagcatctccgttacggcatcatcaacctcgacaagccgtcgaacccgtcctcccacgaggtggtcgcctggatcaagcgcatcctccgcgtcgagaagaccggtcacagcggcacgctcgaccccaaggtgaccggcaacctcatcgtctgcatcgaccgcgcaacgcgccttgtcaagtcgcagcagggcgctggcaaggagtacgtctgcgtcgcccgcttccacgccgccgtgccggacaccgcgcgagtggcccgcgcgcttgaggcgctcactggcgcggtgttccagcgcccgccgcttatctccgcagtcaagcgccagctcagggtgcggacaatctacgagagcaagctgctggagcacgatcccgagcgccaccttgccgtgttctggatctcatgcgaggcaggtacctatgtccggactctgtgtgtgcaccttgggctgctccttggtgttggtgcgcatatgcaggaactgcgccgtgtcaggtcggggatcctaggggagcaggacaacatggtcaccatgcacgatgtgatggacgcgatgtggtctctcgacaactacaaggatgagtcatacttgaggcgtgtcgtgatgccactagaggtactgcttactagctacaagaggcttgttgtgaaggactccgctgtaaatgctatctgctatggtgctaagcttatgattcctgggttactccgatttgagaatgatattgagaccggggaggaagtggttctcatgacgacgaaaggggaggctatcgcgattggtatagctgaaatgactactgctgtgatggcgacctgtgaccatggtgcagtttcaaagatcaagagggtagtgatggacagagatacatacccaaggaaatggggacttggcccggtggcactcaagaagaaaaaactggttgctgagggtctacttgacaagcatgggaagccaaatgagaagacaccaactgagtggcttcggaatgtggtgcttcccactggtggtgatgtttcaattgccagcattgcagctgctcctgagccagagaagaagatcaaagttgaggaagccactgaagcagtggaaggggagaagagtgagaagaagaagaagaaaaagaaagacaagggcgagtcagagccagctgaggtcgttgagggcaaggaggaggttgctacaggtgacgagaaggggagtgagaagaaaaagaagaaaaagaagagcaaggaagcaagtgatgctgcaaaaccagagagtgctcagattggagatggcacaggcaccgagaagagtgagaagaaaaaagagaagaagaagaagagccgagatacagaggaggcacaataggtgtagtttatgttggctagctacccttgtttagagatgctgggaagtttgagatgcctttcagatgctggggaagtttgagatgcctttcttgcttgccttgtatctgttgcaactgctatgcctgatgtaccatccttaggttattgctattctactgcttaaaactgatatgccaagtggtggcattttcattgaaactcttgaacagcgaaggttgtattgttgtttcacttaccagataatgcaacgagttttgttttgctctc

SEQ ID NO: 71670 - DNA, 855 bp, Zea Mays
ccgacttcgagagcacgacacaaaattaaattgaaacaatgtgaaattcggttcgatgaacaaagaggatatatggtgacacgtgactgtaacaagacatggcgagaactcaaaactctaaagggttaaactaagacccacgacttgacaaaaaaacaaagtaataaaaaactcaacaagccctaactagataatactagtaacaagctcaaaaggtccatgggattgcagtatacctaatctactattgttttcggcttttatataacaacgaacaacagaaatatctctcacccatcaacctttctctaatacccatcaatgagaacccaaataaggttattgtctgctatacaaatgtttggtgagttttctaatgtaaaaaggctgaaagactgaacttagtttagagagaggtgaatagactaaatctgaaatgttcaccataaacatcgaaataatgtcaaataaatatttcaactggtgcaaccggttcaaccgctattaaggccggttgaacaactctaaacccgcctaactgtgagaatagatataggctagaaacaacacacaaatacaatgagagattcttttaagattggttggttgcgtgcttctcggcaaccggcttctgtccatgcgttgactgacctctaatttatgtttggatgtctgtatgtgcatgggcacacttgcatgtgcgggtgtgcagctaaagccaaatcgagccatttttgttgcatgcgtggagaagcagagaaaccacgtttgcggtaggccaggcttggtcgagccatgcgcctgtcgctcatgcaaccaatcatgcccgtaagtgtagaaggagagaaatacgaa

SEQ ID NO: 71671 - DNA, 1205 bp, Zea Mays
aacccagccagccagccagagccaggcagcttccagccgagcccgcccgactcgacggacaagacataaaacacggcaacacataacacagctagtgaaggatacatcagacaagcttaaacaagccagcgaggcggatcatcgcgttgaagtcagcgctaccaagaagattgctgatgcaaagctagctaaagatttccaagcagtcctaaaagaattccagaaagcccaacgattagcagcagagagagaagctgcatatgcaccttttatttctcaagcgggcttgccacagagctacaactcaagtgaagtgaataatggtgctgataggttggcagagcagcgcacacagcttctagaatctagaaggcaggagttggtcttcttggataatgaaatcgtgttcaatgaggccatcattgaggagagggatcagggaatacaagagattcagcaccaaatcactgaagtaaatgaaatcttcaaagatctcgctgtgctagtccatgatcaaggagcaatgatagatgacattgattcccatatagagaacgccgttgtagcgacttcgcaggctaaaggccagctttcaaaggctgctaaaactcagaagtcgaactcttctctgatatgcttgttgctcgttattttcggagtggtcctgctcatagtgataatagtacttgcagcctaaaagcttggaaggcagctggggttccgaaatctgatcgagagcttattgcgacaaattccttcataagttatttttgctgtgctgctaggaatgattcctggtacccaggcggtgattggcgctctgcttgtggtgtggcggtatatgtggtgatgatgaaatctgatacataaaagtactctttcctgcaagtgtagtgcctcatgcacgtttttgtttatatattgtgatgtatgagtgcgtgctgtagaacaaggttggattatccgtggcatgaagtttctcgatctcatgagaaacgcttttctatatttcatctcgcactacgcttctctatcagtatccgccaggtctatcattgtcttctgcttgcttattatgtgctacatcatagggcaggtttgtttctgagaatctgaggataatttgtgtattttgaggattaagtgaggaggaaaataaatgagtccatgaggtttaggatctagaaagtgattttctattatta

SEQ ID NO: 71672 - DNA, 1179 bp, Zea Mays
aacttttctcccacccattcttctagagattgcttccacataaaacacggcaacacataacacagctagtgaaggatacatcagacaagcttaaacaagccagcgaggcggatcatcgcgttgaagtcagcgctaccaagaagattgctgatgcaaagctagctaaagatttccaagcagtcctaaaagaattccagaaagcccaacgattagcagcagagagagaagctgcatatgcaccttttatttctcaagcgggcttgccacagagctacaactcaagtgaagtgaataatggtgctgataggttggcagagcagcgcacacagcttctagaatctagaaggcaggagttggtcttcttggataatgaaatcgtgttcaatgaggccatcattgaggagagggatcagggaatacaagagattcagcaccaaatcactgaagtaaatgaaatcttcaaagatctcgctgtgctagtccatgatcaaggagcaatgatagatgacattgattcccatatagagaacgccgttgtagcgacttcgcaggctaaaggccagctttcaaaggctgctaaaactcagaagtcgaactcttctctgatatgcttgttgctcgttattttcggagtggtcctgctcatagtgataatagtacttgcagcctaaaagcttggaaggcagctggggttccgaaatctgatcgagagcttattgcgacaaattccttcataagttatttttgctgtgctgctaggaatgattcctggtacccaggcggtgattggcgctctgcttgtggtgtggcggtatatgtggtgatgatgaaatctgatacataaaagtactctttcctgcaagtgtagtgcctcatgcacgtttttgtttatatattgtgatgtatgagtgcgtgctgtagaacaaggttggattatccgtggcatgaagtttctcgatctcatgagaaacgcttttctatatttcatctcgcactacgcttctctatcagtatccgccaggtctatcattgtcttctgcttgcttattatgtgctacatcatagggcaggtttgtttctgagaatctgaggataatttgtgtattttgaggattaagtgaggaggaaaataaatgagtccatgaggtttaggatctagaaagtgattttctattatta

SEQ ID NO: 71673 - DNA, 1283 bp, Zea Mays
tgacacgtgccttagctgatagccatcagctgttgaaccgacggaaccatgccatatgacctacacggattcattccgtcatctgaatcaattcttatgccgtccttgctcgttttgtgttatattttgaaaattgatctaacataaaacacggcaacacataacacagctagtgaaggatacatcagacaagcttaaacaagccagcgaggcggatcatcgcgttgaagtcagcgctaccaagaagattgctgatgcaaagctagctaaagatttccaagcagtcctaaaagaattccagaaagcccaacgattagcagcagagagagaagctgcatatgcaccttttatttctcaagcgggcttgccacagagctacaactcaagtgaagtgaataatggtgctgataggttggcagagcagcgcacacagcttctagaatctagaaggcaggagttggtcttcttggataatgaaatcgtgttcaatgaggccatcattgaggagagggatcagggaatacaagagattcagcaccaaatcactgaagtaaatgaaatcttcaaagatctcgctgtgctagtccatgatcaaggagcaatgatagatgacattgattcccatatagagaacgccgttgtagcgacttcgcaggctaaaggccagctttcaaaggctgctaaaactcagaagtcgaactcttctctgatatgcttgttgctcgttattttcggagtggtcctgctcatagtgataatagtacttgcagcctaaaagcttggaaggcagctggggttccgaaatctgatcgagagcttattgcgacaaattccttcataagttatttttgctgtgctgctaggaatgattcctggtacccaggcggtgattggcgctctgcttgtggtgtggcggtatatgtggtgatgatgaaatctgatacataaaagtactctttcctgcaagtgtagtgcctcatgcacgtttttgtttatatattgtgatgtatgagtgcgtgctgtagaacaaggttggattatccgtggcatgaagtttctcgatctcatgagaaacgcttttctatatttcatctcgcactacgcttctctatcagtatccgccaggtctatcattgtcttctgcttgcttattatgtgctacatcatagggcaggtttgtttctgagaatctgaggataatttgtgtattttgaggattaagtgaggaggaaaataaatgagtccatgaggtttaggatctagaaagtgattttctattatta

SEQ ID NO: 71674 - DNA, 385 bp, Zea Mays
cgtccttgctcgttttgtgttatattttgaaaattgatctaacataaaacacggcaacacataacacagctagtgaaggatacatcagacaagcttaaacaagccagcgaggcggatcatcgcgttgaagtcagcgctaccaagaagattgctgatgcaaagctagctaaagatttccaagcagtcctaaaagaattccagaaagcccaacgattagcagcagagagagaagctgcatatgcaccttttatttctcaagcgggcttgccacagagctacaactcaagtgaagtgaataatggtgctgataggttggcagagcagcgcacacagcttctagaatctagaaggttttaatttggagacccatataccttgattttat

SEQ ID NO: 71675 - DNA, 1089 bp, Zea Mays
cagacaactcatgcattctgattcggaggaccaaacctaatgctaccaagaagattgctgatgcaaagctagctaaagatttccaagcagtcctaaaagaattccagaaagcccaacgattagcagcagagagagaagctgcatatgcaccttttatttctcaagcgggcttgccacagagctacaactcaagtgaagtgaataatggtgctgataggttggcagagcagcgcacacagcttctagaatctagaaggcaggagttggtcttcttggataatgaaatcgtgttcaatgaggccatcattgaggagagggatcagggaatacaagagattcagcaccaaatcactgaagtaaatgaaatcttcaaagatctcgctgtgctagtccatgatcaaggagcaatgatagatgacattgattcccatatagagaacgccgttgtagcgacttcgcaggctaaaggccagctttcaaaggctgctaaaactcagaagtcgaactcttctctgatatgcttgttgctcgttattttcggagtggtcctgctcatagtgataatagtacttgcagcctaaaagcttggaaggcagctggggttccgaaatctgatcgagagcttattgcgacaaattccttcataagttatttttgctgtgctgctaggaatgattcctggtacccaggcggtgattggcgctctgcttgtggtgtggcggtatatgtggtgatgatgaaatctgatacataaaagtactctttcctgcaagtgtagtgcctcatgcacgtttttgtttatatattgtgatgtatgagtgcgtgctgtagaacaaggttggattatccgtggcatgaagtttctcgatctcatgagaaacgcttttctatatttcatctcgcactacgcttctctatcagtatccgccaggtctatcattgtcttctgcttgcttattatgtgctacatcatagggcaggtttgtttctgagaatctgaggataatttgtgtattttgaggattaagtgaggaggaaaataaatgagtccatgaggtttaggatctagaaagtgattttctattatta

SEQ ID NO: 71676 - DNA, 4140 bp, Zea Mays
cgagagctcatcgaagaaaagcgagactggagtttctctctcccacccaaccctcttccttccaccccatccccgcttctctctcgcctccgcttcgctcgcgcgagagggggccgacgacggaactctaggattcgcgcccgcccgcgcggccaagccaccaggatcgcgctccgcggactcgagggcgctagccaagctccagggcgcgcggatcgtgcaccgggcggggccggttaccgccgccatgtcatcgctcacccgcgacatcgtcttcctcgtcctccagttcctagacgaggagaagtttaaggagaccatgcataagtttgagcaagagtcggggttcttcttcaatatgaagtactttgaagcgaagggccatgctggggactgggatgaggtggagaaatacttgtcaggtttcaccaagatagatgacaataattattcgatgaagatcttctttgagattaggaaacagaagtatttggaagcgcttgataggcatgatggagcaaaggctttagatattcttgttaaggatcttaaagtcttttcgacattcaatgaggagtcatataaggaaataacacagcttctcacttttgagaattttagggaaaatgaacagttgtctaattatggggatactaaatcagctcgaactgttatgctggttgaactaaaaaaactcattaaagccaaccctcttctccaggaaaaacttgtcttcccgactcttaaggcatcacgcctccgaactttaattaatcaaagcttgaattggcagcatcaacattgtaagaatcctcgtccaaatccagatatcaaaactttattcactgaccatacatgtactttacccaatggagctcctgcatcacgggtatctgtaccactggcagctgttccaaaggctggtgccgcatatccacccctgacagctcatactccactccaacttcctccacctagtccatctttagctcgttggctgacgaatacagccgtcccttcatctgttcagtctgctgttgtagcagcctcgtcaatacctgttccacccaatcaagtgcctgagcaactaatgaagcgcttgaggcctggtggacatggcattggtgagaccacatatcctactcccattcctcaacgtgcatggtcaatggatgatcttccaaggacagttgcttgttcattgtcacatggatctaatgtaactagcatggattttcatccaactcgccatacactgcttctagtgggatctgctaatggtgaatttacactttatgagatcggtctgcgtcaaacattactttcaaagccctttaaaattctggatacaaatgcatgctcaccacaatttcagaatgctgttgttaaagacccccccatgtccattaatcgagttacctggagccctcatggagaattgattggagttgcattcacaaaatatttgatccgtgtatatgcatatcaaccaccaaatgagacacgacatgttctagagattgttgctcattctggaggtgtaaatgatatagcattctcacgaccaaacaagcaactttgtgtggtcacctgtggagatgataaactgataaaggtatggaatatgcatggacagaaattatttacatttgaagggcacaaggcgcctgtgtattctatatgtgcgcatcacaaacagagtattcagttcatcttctcaacttcccttgatggaaaaattaaggcctggctttatgacaatgtgggatctagggtggactatgaagctcctggcaagtggtgtactactttgctatatagtgctgatgggactaggttgttctcatgtggaacaagcaaagagggagactcatatttggttcagtggaatgaaaatgatggatctatcaagaggacatattctggattccgtaagaggtcagctggtgttgctggtgtagtgcagtttgatatagctcagaatcacattttggctgctggtgaagataacaagattaaattttgggatgttgataataataatatgctgatctgcaccgacgctgaaggaggcctcccagctcttcctcgcttgaggttcaataaagaaggcaatcttcttgctgttactacagtggacaatggttttaagatacttgcaaatgctgatggactcagaaatctacgcgcattaggtagcaggcctcctttcgaagcatttaggctacaatacgaagatgcttctatgaaggtctcaggtgctcctgttgttgctaccatatctcctaacataggccgaatggatcacttggataggaattctcctgcaaagccatctcctatgctgactggtggcgatacagcatcaagaagcatagatataaaggcaagaatctcagaagaaaagtctgataaagcaaaagcttcggaactaatggaggttctaaatccccaacaatgccgtgtagcaacaatgccagaaactcccgatcaggctagaaaggttgtccgacttctgtacacaaattctggtgttgggttgctagcactagggtcaaacgccattcaaaggctatggaaatggagtcgaaacgagcaaaatcctagtggaaaagccacagccagtgttgtgccacaccattggcagccaaatagcggtcttgtcatgacaaatgatacatcggataccaatccagaggaggcaatcccatgcattgcactctccaagaatgattcctatgtgatgtctgcttgtggtgggaaggtttctttgtttaccatgatgacatttaaggtgctgacaacattcatgccgccaccaccagcatcaacatttttagcatttcaccctcaagataataacatcatagcaataggaatggaagattcaaccattcacatatacgatgtcagggtagataaggtaaaaactgaactcaaaggacatcaaaagaggataactgggttggcattctccaccaaccttggcgtacttgtttcttcaggcgccgatgcacagctctgtgtgtggaccaatgacacctgggaaaaaaagagaacagtctcgatacaaatgctagctgggaaggctccttcaggaaatacacgggtccagtttagttctgaccaaaatcacttgctagtagtacaagagactcaactagccatatatgatgcatcaaaaatggagaggatctatcagtggataccgcaggacacattgtcagcttccatatcccatgcatcatactcatgtaacagccagctagttttttctgccttcattgatggtaacataggtgtttttgacgcggagaacttgagattaagatgccgaattgcgcaatcggtgataaacagcaatccacatgttcaccctcttgttgtcgccgcacatccgcacgagccaaaccaatttgcggtggggctgtcagatgggttcgttaaagtgctggagccattggagtccgaaggaaaatggggaacacctgctccggtgaccaatggcacccccaacggcaagacaccagcttcgtcgactacgagtaaccctgctacggaccaaatccaaagatagattgtatttcctaagcattcttctgtaagggctagtttggcatccctatttttctaaaaaaaattattttattaaggaaattagttcatttttctttgggaaaataaaaattccttagaaaaatgctgttgccaaactagccctaaactttctaattacaccgacttatctgtatgtgcatgctgttaggatgtcattgccatttgttgaaaaaaaaagatagaataggttcaagttcaggtgtggttagttttcagatagagatctcttccagatactaccctagtttttttaaggaaaggctgtagggaaaatccctacaacatgattttgttaaataatgaaaggaaggggacaaattagatcaagaaaagaaaaatgattcaaccggctatcgagaatttagccacaaagacaccctaagcctctgaccgctattaaacctaagcatttgcaacttcagcatgtcattgaagctgtccttccaagagaggaaagaagtggcaatgttcctgaagatgaagtcgttcctttgcttccaaatgcaccaaactatcactgct

SEQ ID NO: 71677 - DNA, 3984 bp, Zea Mays
agaaaagcgagactggagtttctctctcccacccaaccctcttccttccaccccatccccgcttctctctcgcctccgcttcgctcgcgcgagagggggccgacgacggaactctaggattcgcgcccgcccgcgcggccaagccaccaggatcgcgctccgcggactcgagggcgctagccaagctccagggcgcgcggatcgtgcaccgggcggggccggttaccgccgccatgtcatcgctcacccgcgacatcgtcttcctcgtcctccagttcctagacgaggagaagtttaaggagaccatgcataagtttgagcaagagtcggggttcttcttcaatatgaagtactttgaagcgaagggccatgctggggactgggatgaggtggagaaatacttgtcaggtttcaccaagatagatgacaataattattcgatgaagatcttctttgagattaggaaacagaagtatttggaagcgcttgataggcatgatggagcaaaggctttagatattcttgttaaggatcttaaagtcttttcgacattcaatgaggagtcatataaggaaataacacagcttctcacttttgagaattttagccactccaacttcctccacctagtccatctttagctcgttggctgacgaatacagccgtcccttcatctgttcagtctgctgttgtagcagcctcgtcaatacctgttccacccaatcaagttgtctccatgttgaaacgcccaactataacagactatcaaagtgcagtgcctgagcaactaatgaagcgcttgaggcctggtggacatggcattggtgagaccacatatcctactcccattcctcaacgtgcatggtcaatggatgatcttccaaggacagttgcttgttcattgtcacatggatctaatgtaactagcatggattttcatccaactcgccatacactgcttctagtgggatctgctaatggtgaatttacactttatgagatcggtctgcgtcaaacattactttcaaagccctttaaaattctggatacaaatgcatgctcaccacaatttcagaatgctgttgttaaagacccccccatgtccattaatcgagttacctggagccctcatggagaattgattggagttgcattcacaaaatatttgatccgtgtatatgcatatcaaccaccaaatgagacacgacatgttctagagattgttgctcattctggaggtgtaaatgatatagcattctcacgaccaaacaagcaactttgtgtggtcacctgtggagatgataaactgataaaggtatggaatatgcatggacagaaattatttacatttgaagggcacaaggcgcctgtgtattctatatgtgcgcatcacaaacagagtattcagtttaaatttagggattatggctatggagtttctactgcgactatggcatacaatatagtgatatgcctattcaagtggaaaaaagggaggtccgcatgtggatgacttttaagtgaacaaatgttgattttagcagtatttatgttcatcttctcaacttcccttgatggaaaaattaaggcctggctttatgacaatgtgggatctagggtggactatgaagctcctggcaagtggtgtactactttgctatatagtgctgatgggactaggttgttctcatgtggaacaagcaaagagggagactcatatttggttcagtggaatgaaaatgatggatctatcaagaggacatattctggattccgtaagaggtcagctggtgttgctggtgtagtgcagtttgatatagctcagaatcacattttggctgctggtgaagataacaagattaaattttgggatgttgataataataatatgctgatctgcaccgacgctgaaggaggcctcccagctcttcctcgcttgaggttcaataaagaaggcaatcttcttgctgttactacagtggacaatggttttaagatacttgcaaatgctgatggactcagaaatctacgcgcattaggtagcaggcctcctttcgaagcatttaggctacaatacgaagatgcttctatgaaggtctcaggtgctcctgttgttgctaccatatctcctaacataggccgaatggatcacttggataggaattctcctgcaaagccatctcctatgctgactggtggcgatacagcatcaagaagcatagatataaaggcaagaatctcagaagaaaagtctgataaagcaaaagcttcggaactaatggaggttctaaatccccaacaatgccgtgtagcaacaatgccagaaactcccgatcaggctagaaaggttgtccgacttctgtacacaaattctggtgttgggttgctagcactagggtcaaacgccattcaaaggctatggaaatggagtcgaaacgagcaaaatcctagtggaaaagccacagccagtgttgtgccacaccattggcagccaaatagcggtcttgtcatgacaaatgatacatcggataccaatccagaggaggcaatcccatgcattgcactctccaagaatgattcctatgtgatgtctgcttgtggtgggaaggtttctttgtttaccatgatgacatttaaggtgctgacaacattcatgccgccaccaccagcatcaacatttttagcatttcaccctcaagataataacatcatagcaataggaatggaagattcaaccattcacatatacgatgtcagggtagataaggtaaaaactgaactcaaaggacatcaaaagaggataactgggttggcattctccaccaaccttggcgtacttgtttcttcaggcgccgatgcacagctctgtgtgtggaccaatgacacctgggaaaaaaagagaacagtctcgatacaaatgctagctgggaaggctccttcaggaaatacacgggtccagtttagttctgaccaaaatcacttgctagtagtacaagagactcaactagccatatatgatgcatcaaaaatggagaggatctatcagtggataccgcaggacacattgtcagcttccatatcccatgcatcatactcatgtaacagccagctagttttttctgccttcattgatggtaacataggtgtttttgacgcggagaacttgagattaagatgccgaattgcgcaatcggtgataaacagcaatccacatgttcaccctcttgttgtcgccgcacatccgcacgagccaaaccaatttgcggtggggctgtcagatgggttcgttaaagtgctggagccattggagtccgaaggaaaatggggaacacctgctccggtgaccaatggcacccccaacggcaagacaccagcttcgtcgactacgagtaaccctgctacggaccaaatccaaagatagattgtatttcctaagcattcttctgtaagggctagtttggcatccctatttttctaaaaaaaattattttattaaggaaattagttcatttttctttgggaaaataaaaattccttagaaaaatgctgttgccaaactagccctaaactttctaattacaccgacttatctgtatgtgcatgctgttaggatgtcattgccatttgttgaaaaaaaaagatagaataggttcaagttcaggtgtggttagttttcagatagagatctcttccagatactaccctagtttttttaaggaaaggctgtagggaaaatccctacaacatgattttgttaaataatgaaaggaaggggacaaattagatcaagaaaagaaaaatgattcaaccggctatcgagaatttagccacaaagacaccctaagcctctgaccgctattaaacctaagcatttgcaacttcagcatgtcattgaagctgtccttccaagagaggaaagaagtggcaatgttcctgaagatgaagtcgttcctttgcttccaaatgcaccaaactatcactgct

SEQ ID NO: 71678 - DNA, 4318 bp, Zea Mays
agaaaagcgagactggagtttctctctcccacccaaccctcttccttccaccccatccccgcttctctctcgcctccgcttcgctcgcgcgagagggggccgacgacggaactctaggattcgcgcccgcccgcgcggccaagccaccaggatcgcgctccgcggactcgagggcgctagccaagctccagggcgcgcggatcgtgcaccgggcggggccggttaccgccgccatgtcatcgctcacccgcgacatcgtcttcctcgtcctccagttcctagacgaggagaagtttaaggagaccatgcataagtttgagcaagagtcggggttcttcttcaatatgaagtactttgaagcgaagggccatgctggggactgggatgaggtggagaaatacttgtcaggtttcaccaagatagatgacaataattattcgatgaagatcttctttgagattaggaaacagaagtatttggaagcgcttgataggcatgatggagcaaaggctttagatattcttgttaaggatcttaaagtcttttcgacattcaatgaggagtcatataaggaaataacacagcttctcacttttgagaattttagggaaaatgaacagttgtctaattatggggatactaaatcagctcgaactgttatgctggttgaactaaaaaaactcattaaagccaaccctcttctccaggaaaaacttgtcttcccgactcttaaggcatcacgcctccgaactttaattaatcaaagcttgaattggcagcatcaacattgtaagaatcctcgtccaaatccagatatcaaaactttattcactgaccatacatgtactttacccaatggagctcctgcatcacgggtatctgtaccactggcagctgttccaaaggctggtgccgcatatccacccctgacagctcatactccactccaacttcctccacctagtccatctttagctcgttggctgacgaatacagccgtcccttcatctgttcagtctgctgttgtagcagcctcgtcaatacctgttccacccaatcaagttgtctccatgttgaaacgcccaactataacagactatcaaagtgcagtgcctgagcaactaatgaagcgcttgaggcctggtggacatggcattggtgagaccacatatcctactcccattcctcaacgtgcatggtcaatggatgatcttccaaggacagttgcttgttcattgtcacatggatctaatgtaactagcatggattttcatccaactcgccatacactgcttctagtgggatctgctaatggtgaatttacactttatgagatcggtctgcgtcaaacattactttcaaagccctttaaaattctggatacaaatgcatgctcaccacaatttcagaatgctgttgttaaagacccccccatgtccattaatcgagttacctggagccctcatggagaattgattggagttgcattcacaaaatatttgatccgtgtatatgcatatcaaccaccaaatgagacacgacatgttctagagattgttgctcattctggaggtgtaaatgatatagcattctcacgaccaaacaagcaactttgtgtggtcacctgtggagatgataaactgataaaggtatggaatatgcatggacagaaattatttacatttgaagggcacaaggcgcctgtgtattctatatgtgcgcatcacaaacagagtattcagtttaaatttagggattatggctatggagtttctactgcgactatggcatacaatatagtgatatgcctattcaagtggaaaaaagggaggtccgcatgtggatgacttttaagtgaacaaatgttgattttagcagtatttatgttcatcttctcaacttcccttgatggaaaaattaaggcctggctttatgacaatgtgggatctagggtggactatgaagctcctggcaagtggtgtactactttgctatatagtgctgatgggactaggttgttctcatgtggaacaagcaaagagggagactcatatttggttcagtggaatgaaaatgatggatctatcaagaggacatattctggattccgtaagaggtcagctggtgttgctggtgtagtgcagtttgatatagctcagaatcacattttggctgctggtgaagataacaagattaaattttgggatgttgataataataatatgctgatctgcaccgacgctgaaggaggcctcccagctcttcctcgcttgaggttcaataaagaaggcaatcttcttgctgttactacagtggacaatggttttaagatacttgcaaatgctgatggactcagaaatctacgcgcattaggtagcaggcctcctttcgaagcatttaggctacaatacgaagatgcttctatgaaggtctcaggtgctcctgttgttgctaccatatctcctaacataggccgaatggatcacttggataggaattctcctgcaaagccatctcctatgctgactggtggcgatacagcatcaagaagcatagatataaaggcaagaatctcagaagaaaagtctgataaagcaaaagcttcggaactaatggaggttctaaatccccaacaatgccgtgtagcaacaatgccagaaactcccgatcaggctagaaaggttgtccgacttctgtacacaaattctggtgttgggttgctagcactagggtcaaacgccattcaaaggctatggaaatggagtcgaaacgagcaaaatcctagtggaaaagccacagccagtgttgtgccacaccattggcagccaaatagcggtcttgtcatgacaaatgatacatcggataccaatccagaggaggcaatcccatgcattgcactctccaagaatgattcctatgtgatgtctgcttgtggtgggaaggtttctttgtttaccatgatgacatttaaggtgctgacaacattcatgccgccaccaccagcatcaacatttttagcatttcaccctcaagataataacatcatagcaataggaatggaagattcaaccattcacatatacgatgtcagggtagataaggtaaaaactgaactcaaaggacatcaaaagaggataactgggttggcattctccaccaaccttggcgtacttgtttcttcaggcgccgatgcacagctctgtgtgtggaccaatgacacctgggaaaaaaagagaacagtctcgatacaaatgctagctgggaaggctccttcaggaaatacacgggtccagtttagttctgaccaaaatcacttgctagtagtacaagagactcaactagccatatatgatgcatcaaaaatggagaggatctatcagtggataccgcaggacacattgtcagcttccatatcccatgcatcatactcatgtaacagccagctagttttttctgccttcattgatggtaacataggtgtttttgacgcggagaacttgagattaagatgccgaattgcgcaatcggtgataaacagcaatccacatgttcaccctcttgttgtcgccgcacatccgcacgagccaaaccaatttgcggtggggctgtcagatgggttcgttaaagtgctggagccattggagtccgaaggaaaatggggaacacctgctccggtgaccaatggcacccccaacggcaagacaccagcttcgtcgactacgagtaaccctgctacggaccaaatccaaagatagattgtatttcctaagcattcttctgtaagggctagtttggcatccctatttttctaaaaaaaattattttattaaggaaattagttcatttttctttgggaaaataaaaattccttagaaaaatgctgttgccaaactagccctaaactttctaattacaccgacttatctgtatgtgcatgctgttaggatgtcattgccatttgttgaaaaaaaaagatagaataggttcaagttcaggtgtggttagttttcagatagagatctcttccagatactaccctagtttttttaaggaaaggctgtagggaaaatccctacaacatgattttgttaaataatgaaaggaaggggacaaattagatcaagaaaagaaaaatgattcaaccggctatcgagaatttagccacaaagacaccctaagcctctgaccgctattaaacctaagcatttgcaacttcagcatgtcattgaagctgtccttccaagagaggaaagaagtggcaatgttcctgaagatgaagtcgttcctttgcttccaaatgcaccaaactatcactgct

SEQ ID NO: 71679 - DNA, 4220 bp, Zea Mays
ggagtttctctctcccacccaaccctcttccttccaccccatccccgcttctctctcgcctccgcttcgctcgcgcgagagggggccgacgacggaactctaggattcgcgcccgcccgcgcggccaagccaccaggatcgcgctccgcggactcgagggcgctagccaagctccagggcgcgcggatcgtgcaccgggcggggccggttaccgccgccatgtcatcgctcacccgcgacatcgtcttcctcgtcctccagttcctagacgaggagaagtttaaggagaccatgcataagtttgagcaagagtcggggttcttcttcaatatgaagtactttgaagcgaagggccatgctggggactgggatgaggtggagaaatacttgtcaggtttcaccaagatagatgacaataattattcgatgaagatcttctttgagattaggaaacagaagtatttggaagcgcttgataggcatgatggagcaaaggctttagatattcttgttaaggatcttaaagtcttttcgacattcaatgaggagtcatataaggaaataacacagcttctcacttttgagaattttagggaaaatgaacagttgtctaattatggggatactaaatcagctcgaactgttatgctggttgaactaaaaaaactcattaaagccaaccctcttctccaggaaaaacttgtcttcccgactcttaaggcatcacgcctccgaactttaattaatcaaagcttgaattggcagcatcaacattgtaagaatcctcgtccaaatccagatatcaaaactttattcactgaccatacatgtactttacccaatggagctcctgcatcacgggtatctgtaccactggcagctgttccaaagccactccaacttcctccacctagtccatctttagctcgttggctgacgaatacagccgtcccttcatctgttcagtctgctgttgtagcagcctcgtcaatacctgttccacccaatcaagtgcctgagcaactaatgaagcgcttgaggcctggtggacatggcattggtgagaccacatatcctactcccattcctcaacgtgcatggtcaatggatgatcttccaaggacagttgcttgttcattgtcacatggatctaatgtaactagcatggattttcatccaactcgccatacactgcttctagtgggatctgctaatggtgaatttacactttatgagatcggtctgcgtcaaacattactttcaaagccctttaaaattctggatacaaatgcatgctcaccacaatttcagaatgctgttgttaaagacccccccatgtccattaatcgagttacctggagccctcatggagaattgattggagttgcattcacaaaatatttgatccgtgtatatgcatatcaaccaccaaatgagacacgacatgttctagagattgttgctcattctggaggtgtaaatgatatagcattctcacgaccaaacaagcaactttgtgtggtcacctgtggagatgataaactgataaaggtatggaatatgcatggacagaaattatttacatttgaagggcacaaggcgcctgtgtattctatatgtgcgcatcacaaacagagtattcagtttaaatttagggattatggctatggagtttctactgcgactatggcatacaatatagtgatatgcctattcaagtggaaaaaagggaggtccgcatgtggatgacttttaagtgaacaaatgttgattttagcagtatttatgttcatcttctcaacttcccttgatggaaaaattaaggcctggctttatgacaatgtgggatctagggtggactatgaagctcctggcaagtggtgtactactttgctatatagtgctgatgggactaggttgttctcatgtggaacaagcaaagagggagactcatatttggttcagtggaatgaaaatgatggatctatcaagaggacatattctggattccgtaagaggtcagctggtgttgctggtgtagtgcagtttgatatagctcagaatcacattttggctgctggtgaagataacaagattaaattttgggatgttgataataataatatgctgatctgcaccgacgctgaaggaggcctcccagctcttcctcgcttgaggttcaataaagaaggcaatcttcttgctgttactacagtggacaatggttttaagatacttgcaaatgctgatggactcagaaatctacgcgcattaggtagcaggcctcctttcgaagcatttaggctacaatacgaagatgcttctatgaaggtctcaggtgctcctgttgttgctaccatatctcctaacataggccgaatggatcacttggataggaattctcctgcaaagccatctcctatgctgactggtggcgatacagcatcaagaagcatagatataaaggcaagaatctcagaagaaaagtctgataaagcaaaagcttcggaactaatggaggttctaaatccccaacaatgccgtgtagcaacaatgccagaaactcccgatcaggctagaaaggttgtccgacttctgtacacaaattctggtgttgggttgctagcactagggtcaaacgccattcaaaggctatggaaatggagtcgaaacgagcaaaatcctagtggaaaagccacagccagtgttgtgccacaccattggcagccaaatagcggtcttgtcatgacaaatgatacatcggataccaatccagaggaggcaatcccatgcattgcactctccaagaatgattcctatgtgatgtctgcttgtggtgggaaggtttctttgtttaccatgatgacatttaaggtgctgacaacattcatgccgccaccaccagcatcaacatttttagcatttcaccctcaagataataacatcatagcaataggaatggaagattcaaccattcacatatacgatgtcagggtagataaggtaaaaactgaactcaaaggacatcaaaagaggataactgggttggcattctccaccaaccttggcgtacttgtttcttcaggcgccgatgcacagctctgtgtgtggaccaatgacacctgggaaaaaaagagaacagtctcgatacaaatgctagctgggaaggctccttcaggaaatacacgggtccagtttagttctgaccaaaatcacttgctagtagtacaagagactcaactagccatatatgatgcatcaaaaatggagaggatctatcagtggataccgcaggacacattgtcagcttccatatcccatgcatcatactcatgtaacagccagctagttttttctgccttcattgatggtaacataggtgtttttgacgcggagaacttgagattaagatgccgaattgcgcaatcggtgataaacagcaatccacatgttcaccctcttgttgtcgccgcacatccgcacgagccaaaccaatttgcggtggggctgtcagatgggttcgttaaagtgctggagccattggagtccgaaggaaaatggggaacacctgctccggtgaccaatggcacccccaacggcaagacaccagcttcgtcgactacgagtaaccctgctacggaccaaatccaaagatagattgtatttcctaagcattcttctgtaagggctagtttggcatccctatttttctaaaaaaaattattttattaaggaaattagttcatttttctttgggaaaataaaaattccttagaaaaatgctgttgccaaactagccctaaactttctaattacaccgacttatctgtatgtgcatgctgttaggatgtcattgccatttgttgaaaaaaaaagatagaataggttcaagttcaggtgtggttagttttcagatagagatctcttccagatactaccctagtttttttaaggaaaggctgtagggaaaatccctacaacatgattttgttaaataatgaaaggaaggggacaaattagatcaagaaaagaaaaatgattcaaccggctatcgagaatttagccacaaagacaccctaagcctctgaccgctattaaacctaagcatttgcaacttcagcatgtcattgaagctgtccttccaagagaggaaagaagtggcaatgttcctgaagatgaagtcgttcctttgcttccaaatgcaccaaactatcactgct

SEQ ID NO: 71680 - DNA, 3775 bp, Zea Mays
gtttctctctcccacccaaccctcttccttccaccccatccccgcttctctctcgcctccgcttcgctcgcgcgagagggggccgacgacggaactctaggattcgcgcccgcccgcgcggccaagccaccaggatcgcgctccgcggactcgagggcgctagccaagctccagggcgcgcggatcgtgcaccgggcggggccggttaccgccgccatgtcatcgctcacccgcgacatcgtcttcctcgtcctccagttcctagacgaggagaagtttaaggagaccatgcataagtttgagcaagagtcggggttcttcttcaatatgaagtactttgaagcgaagggccatgctggggactgggatgaggtggagaaatacttgtcaggtttcaccaagatagatgacaataattattcgatgaagatcttctttgagattaggaaacagaagtatttggaagcgcttgataggcatgatggagcaaaggctttagatattcttgttaaggatcttaaagtcttttcgacattcaatgaggagtcatataaggaaataacacagcttctcacttttgagaattttagccactccaacttcctccacctagtccatctttagctcgttggctgacgaatacagccgtcccttcatctgttcagtctgctgttgtagcagcctcgtcaatacctgttccacccaatcaagtgcctgagcaactaatgaagcgcttgaggcctggtggacatggcattggtgagaccacatatcctactcccattcctcaacgtgcatggtcaatggatgatcttccaaggacagttgcttgttcattgtcacatggatctaatgtaactagcatggattttcatccaactcgccatacactgcttctagtgggatctgctaatggtgaatttacactttatgagatcggtctgcgtcaaacattactttcaaagccctttaaaattctggatacaaatgcatgctcaccacaatttcagaatgctgttgttaaagacccccccatgtccattaatcgagttacctggagccctcatggagaattgattggagttgcattcacaaaatatttgatccgtgtatatgcatatcaaccaccaaatgagacacgacatgttctagagattgttgctcattctggaggtgtaaatgatatagcattctcacgaccaaacaagcaactttgtgtggtcacctgtggagatgataaactgataaaggtatggaatatgcatggacagaaattatttacatttgaagggcacaaggcgcctgtgtattctatatgtgcgcatcacaaacagagtattcagttcatcttctcaacttcccttgatggaaaaattaaggcctggctttatgacaatgtgggatctagggtggactatgaagctcctggcaagtggtgtactactttgctatatagtgctgatgggactaggttgttctcatgtggaacaagcaaagagggagactcatatttggttcagtggaatgaaaatgatggatctatcaagaggacatattctggattccgtaagaggtcagctggtgttgctggtgtagtgcagtttgatatagctcagaatcacattttggctgctggtgaagataacaagattaaattttgggatgttgataataataatatgctgatctgcaccgacgctgaaggaggcctcccagctcttcctcgcttgaggttcaataaagaaggcaatcttcttgctgttactacagtggacaatggttttaagatacttgcaaatgctgatggactcagaaatctacgcgcattaggtagcaggcctcctttcgaagcatttaggctacaatacgaagatgcttctatgaaggtctcaggtgctcctgttgttgctaccatatctcctaacataggccgaatggatcacttggataggaattctcctgcaaagccatctcctatgctgactggtggcgatacagcatcaagaagcatagatataaaggcaagaatctcagaagaaaagtctgataaagcaaaagcttcggaactaatggaggttctaaatccccaacaatgccgtgtagcaacaatgccagaaactcccgatcaggctagaaaggttgtccgacttctgtacacaaattctggtgttgggttgctagcactagggtcaaacgccattcaaaggctatggaaatggagtcgaaacgagcaaaatcctagtggaaaagccacagccagtgttgtgccacaccattggcagccaaatagcggtcttgtcatgacaaatgatacatcggataccaatccagaggaggcaatcccatgcattgcactctccaagaatgattcctatgtgatgtctgcttgtggtgggaaggtttctttgtttaccatgatgacatttaaggtgctgacaacattcatgccgccaccaccagcatcaacatttttagcatttcaccctcaagataataacatcatagcaataggaatggaagattcaaccattcacatatacgatgtcagggtagataaggtaaaaactgaactcaaaggacatcaaaagaggataactgggttggcattctccaccaaccttggcgtacttgtttcttcaggcgccgatgcacagctctgtgtgtggaccaatgacacctgggaaaaaaagagaacagtctcgatacaaatgctagctgggaaggctccttcaggaaatacacgggtccagtttagttctgaccaaaatcacttgctagtagtacaagagactcaactagccatatatgatgcatcaaaaatggagaggatctatcagtggataccgcaggacacattgtcagcttccatatcccatgcatcatactcatgtaacagccagctagttttttctgccttcattgatggtaacataggtgtttttgacgcggagaacttgagattaagatgccgaattgcgcaatcggtgataaacagcaatccacatgttcaccctcttgttgtcgccgcacatccgcacgagccaaaccaatttgcggtggggctgtcagatgggttcgttaaagtgctggagccattggagtccgaaggaaaatggggaacacctgctccggtgaccaatggcacccccaacggcaagacaccagcttcgtcgactacgagtaaccctgctacggaccaaatccaaagatagattgtatttcctaagcattcttctgtaagggctagtttggcatccctatttttctaaaaaaaattattttattaaggaaattagttcatttttctttgggaaaataaaaattccttagaaaaatgctgttgccaaactagccctaaactttctaattacaccgacttatctgtatgtgcatgctgttaggatgtcattgccatttgttgaaaaaaaaagatagaataggttcaagttcaggtgtggttagttttcagatagagatctcttccagatactaccctagtttttttaaggaaaggctgtagggaaaatccctacaacatgattttgttaaataatgaaaggaaggggacaaattagatcaagaaaagaaaaatgattcaaccggctatcgagaatttagccacaaagacaccctaagcctctgaccgctattaaacctaagcatttgcaacttcagcatgtcattgaagctgtccttccaagagaggaaagaagtggcaatgttcctgaagatgaagtcgttcctttgcttccaaatgcaccaaactatcactgct

SEQ ID NO: 71681 - DNA, 4086 bp, Zea Mays
tctctctcccacccaaccctcttccttccaccccatccccgcttctctctcgcctccgcttcgctcgcgcgagagggggccgacgacggaactctaggattcgcgcccgcccgcgcggccaagccaccaggatcgcgctccgcggactcgagggcgctagccaagctccagggcgcgcggatcgtgcaccgggcggggccggttaccgccgccatgtcatcgctcacccgcgacatcgtcttcctcgtcctccagttcctagacgaggagaagtttaaggagaccatgcataagtttgagcaagagtcggggttcttcttcaatatgaagtactttgaagcgaagggccatgctggggactgggatgaggtggagaaatacttgtcaggtttcaccaagatagatgacaataattattcgatgaagatcttctttgagattaggaaacagaagtatttggaagcgcttgataggcatgatggagcaaaggctttagatattcttgttaaggatcttaaagtcttttcgacattcaatgaggagtcatataaggaaataacacagcttctcacttttgagaattttagggaaaatgaacagttgtctaattatggggatactaaatcagctcgaactgttatgctggttgaactaaaaaaactcattaaagccaaccctcttctccaggaaaaacttgtcttcccgactcttaaggcatcacgcctccgaactttaattaatcaaagcttgaattggcagcatcaacattgtaagaatcctcgtccaaatccagatatcaaaactttattcactgaccatacatgtactttacccaatggagctcctgcatcacgggtatctgtaccactggcagctgttccaaaggctgccactccaacttcctccacctagtccatctttagctcgttggctgacgaatacagccgtcccttcatctgttcagtctgctgttgtagcagcctcgtcaatacctgttccacccaatcaagtgcctgagcaactaatgaagcgcttgaggcctggtggacatggcattggtgagaccacatatcctactcccattcctcaacgtgcatggtcaatggatgatcttccaaggacagttgcttgttcattgtcacatggatctaatgtaactagcatggattttcatccaactcgccatacactgcttctagtgggatctgctaatggtgaatttacactttatgagatcggtctgcgtcaaacattactttcaaagccctttaaaattctggatacaaatgcatgctcaccacaatttcagaatgctgttgttaaagacccccccatgtccattaatcgagttacctggagccctcatggagaattgattggagttgcattcacaaaatatttgatccgtgtatatgcatatcaaccaccaaatgagacacgacatgttctagagattgttgctcattctggaggtgtaaatgatatagcattctcacgaccaaacaagcaactttgtgtggtcacctgtggagatgataaactgataaaggtatggaatatgcatggacagaaattatttacatttgaagggcacaaggcgcctgtgtattctatatgtgcgcatcacaaacagagtattcagtttaaatttagggattatggctatggagtttctactgcgactatggcatacaatatagtgatatgcctattcaagtggaaaaaagggaggtccgcatgtggatgacttttaagtgaacaaatgttgattttagcagtatttatgttcatcttctcaacttcccttgatggaaaaattaaggcctggctttatgacaatgtgggatctagggtggactatgaagctcctggcaagtggtgtactactttgctatatagtgctgatgggactaggttgttctcatgtggaacaagcaaagagggagactcatatttggttcagtggaatgaaaatgatggatctatcaagaggacatattctggattccgtaagaggtcagctggtgttgctggtgtagtgcagtttgatatagctcagaatcacattttggctgctggtgaagataacaagattaaattttgggatgttgataataataatatgctgatctgcaccgacgctgaaggaggcctcccagctcttcctcgcttgaggttcaataaagaaggcaatcttcttgctgttactacagtggacaatggttttaagatacttgcaaatgctgatggactcagaaatctacgcgcattaggtagcaggcctcctttcgaagcatttaggctacaatacgaagatgcttctatgaaggtctcaggtgctcctgttgttgctaccatatctcctaacataggccgaatggatcacttggataggaattctcctgcaaagccatctcctatgctgactggtggcgatacagcatcaagaagcatagatataaaggcaagaatctcagaagaaaagtctgataaagcaaaagcttcggaactaatggaggttctaaatccccaacaatgccgtgtagcaacaatgccagaaactcccgatcaggctagaaaggttgtccgacttctgtacacaaattctggtgttgggttgctagcactagggtcaaacgccattcaaaggctatggaaatggagtcgaaacgagcaaaatcctagtggaaaagccacagccagtgttgtgccacaccattggcagccaaatagcggtcttgtcatgacaaatgatacatcggataccaatccagaggaggcaatcccatgcattgcactctccaagaatgattcctatgtgatgtctgcttgtggtgggaaggtttctttgtttaccatgatgacatttaaggtgctgacaacattcatgccgccaccaccagcatcaacatttttagcatttcaccctcaagataataacatcatagcaataggaatggaagattcaaccattcacatatacgatgtcagggtagataaggtaaaaactgaactcaaaggacatcaaaagaggataactgggttggcattctccaccaaccttggcgtacttgtttcttcaggcgccgatgcacagctctgtgtgtggaccaatgacacctgggaaaaaaagagaacagtctcgatacaaatgctagctgggaaggctccttcaggaaatacacgggtccagtttagttctgaccaaaatcacttgctagtagtacaagagactcaactagccatatatgatgcatcaaaaatggagaggatctatcagtggataccgcaggacacattgtcagcttccatatcccatgcatcatactcatgtaacagccagctagttttttctgccttcattgatggtaacataggtgtttttgacgcggagaacttgagattaagatgccgaattgcgcaatcggtgataaacagcaatccacatgttcaccctcttgttgtcgccgcacatccgcacgagccaaaccaatttgcggtggggctgtcagatgggttcgttaaagtgctggagccattggagtccgaaggaaaatggggaacacctgctccggtgaccaatggcacccccaacggcaagacaccagcttcgtcgactacgagtaaccctgctacggaccaaatccaaagatagattgtatttcctaagctttctaattacaccgacttatctgtatgtgcatgctgttaggatgtcattgccatttgttgaaaaaaaaagatagaataggttcaagttcaggtgtggttagttttcagatagagatctcttccagatactaccctagtttttttaaggaaaggctgtagggaaaatccctacaacatgattttgttaaataatgaaaggaaggggacaaattagatcaagaaaagaaaaatgattcaaccggctatcgagaatttagccacaaagacaccctaagcctctgaccgctattaaacctaagcatttgcaacttcagcatgtcattgaagctgtccttccaagagaggaaagaagtggcaatgttcctgaagatgaagtcgttcctttgcttccaaatgcaccaaactatcactgct

SEQ ID NO: 71682 - DNA, 4159 bp, Zea Mays
tctctctcccacccaaccctcttccttccaccccatccccgcttctctctcgcctccgcttcgctcgcgcgagagggggccgacgacggaactctaggattcgcgcccgcccgcgcggccaagccaccaggatcgcgctccgcggactcgagggcgctagccaagctccagggcgcgcggatcgtgcaccgggcggggccggttaccgccgccatgtcatcgctcacccgcgacatcgtcttcctcgtcctccagttcctagacgaggagaagtttaaggagaccatgcataagtttgagcaagagtcggggttcttcttcaatatgaagtactttgaagcgaagggccatgctggggactgggatgaggtggagaaatacttgtcaggtttcaccaagatagatgacaataattattcgatgaagatcttctttgagattaggaaacagaagtatttggaagcgcttgataggcatgatggagcaaaggctttagatattcttgttaaggatcttaaagtcttttcgacattcaatgaggagtcatataaggaaataacacagcttctcacttttgagaattttagggaaaatgaacagttgtctaattatggggatactaaatcagctcgaactgttatgctggttgaactaaaaaaactcattaaagccaaccctcttctccaggaaaaacttgtcttcccgactcttaaggcatcacgcctccgaactttaattaatcaaagcttgaattggcagcatcaacattgtaagaatcctcgtccaaatccagatatcaaaactttattcactgaccatacatgtactttacccaatggagctcctgcatcacgggtatctgtaccactggcagctgttccaaagccactccaacttcctccacctagtccatctttagctcgttggctgacgaatacagccgtcccttcatctgttcagtctgctgttgtagcagcctcgtcaatacctgttccacccaatcaagtgcctgagcaactaatgaagcgcttgaggcctggtggacatggcattggtgagaccacatatcctactcccattcctcaacgtgcatggtcaatggatgatcttccaaggacagttgcttgttcattgtcacatggatctaatgtaactagcatggattttcatccaactcgccatacactgcttctagtgggatctgctaatggtgaatttacactttatgagatcggtctgcgtcaaacattactttcaaagccctttaaaattctggatacaaatgcatgctcaccacaatttcagaatgctgttgttaaagacccccccatgtccattaatcgagttacctggagccctcatggagaattgattggagttgcattcacaaaatatttgatccgtgtatatgcatatcaaccaccaaatgagacacgacatgttctagagattgttgctcattctggaggtgtaaatgatatagcattctcacgaccaaacaagcaactttgtgtggtcacctgtggagatgataaactgataaaggtatggaatatgcatggacagaaattatttacatttgaagggcacaaggcgcctgtgtattctatatgtgcgcatcacaaacagagtattcagtttaaatttagggattatggctatggagtttctactgcgactatggcatacaatatagtgatatgcctattcaagtggaaaaaagggagttcatcttctcaacttcccttgatggaaaaattaaggcctggctttatgacaatgtgggatctagggtggactatgaagctcctggcaagtggtgtactactttgctatatagtgctgatgggactaggttgttctcatgtggaacaagcaaagagggagactcatatttggttcagtggaatgaaaatgatggatctatcaagaggacatattctggattccgtaagaggtcagctggtgttgctggtgtagtgcagtttgatatagctcagaatcacattttggctgctggtgaagataacaagattaaattttgggatgttgataataataatatgctgatctgcaccgacgctgaaggaggcctcccagctcttcctcgcttgaggttcaataaagaaggcaatcttcttgctgttactacagtggacaatggttttaagatacttgcaaatgctgatggactcagaaatctacgcgcattaggtagcaggcctcctttcgaagcatttaggctacaatacgaagatgcttctatgaaggtctcaggtgctcctgttgttgctaccatatctcctaacataggccgaatggatcacttggataggaattctcctgcaaagccatctcctatgctgactggtggcgatacagcatcaagaagcatagatataaaggcaagaatctcagaagaaaagtctgataaagcaaaagcttcggaactaatggaggttctaaatccccaacaatgccgtgtagcaacaatgccagaaactcccgatcaggctagaaaggttgtccgacttctgtacacaaattctggtgttgggttgctagcactagggtcaaacgccattcaaaggctatggaaatggagtcgaaacgagcaaaatcctagtggaaaagccacagccagtgttgtgccacaccattggcagccaaatagcggtcttgtcatgacaaatgatacatcggataccaatccagaggaggcaatcccatgcattgcactctccaagaatgattcctatgtgatgtctgcttgtggtgggaaggtttctttgtttaccatgatgacatttaaggtgctgacaacattcatgccgccaccaccagcatcaacatttttagcatttcaccctcaagataataacatcatagcaataggaatggaagattcaaccattcacatatacgatgtcagggtagataaggtaaaaactgaactcaaaggacatcaaaagaggataactgggttggcattctccaccaaccttggcgtacttgtttcttcaggcgccgatgcacagctctgtgtgtggaccaatgacacctgggaaaaaaagagaacagtctcgatacaaatgctagctgggaaggctccttcaggaaatacacgggtccagtttagttctgaccaaaatcacttgctagtagtacaagagactcaactagccatatatgatgcatcaaaaatggagaggatctatcagtggataccgcaggacacattgtcagcttccatatcccatgcatcatactcatgtaacagccagctagttttttctgccttcattgatggtaacataggtgtttttgacgcggagaacttgagattaagatgccgaattgcgcaatcggtgataaacagcaatccacatgttcaccctcttgttgtcgccgcacatccgcacgagccaaaccaatttgcggtggggctgtcagatgggttcgttaaagtgctggagccattggagtccgaaggaaaatggggaacacctgctccggtgaccaatggcacccccaacggcaagacaccagcttcgtcgactacgagtaaccctgctacggaccaaatccaaagatagattgtatttcctaagcattcttctgtaagggctagtttggcatccctatttttctaaaaaaaattattttattaaggaaattagttcatttttctttgggaaaataaaaattccttagaaaaatgctgttgccaaactagccctaaactttctaattacaccgacttatctgtatgtgcatgctgttaggatgtcattgccatttgttgaaaaaaaaagatagaataggttcaagttcaggtgtggttagttttcagatagagatctcttccagatactaccctagtttttttaaggaaaggctgtagggaaaatccctacaacatgattttgttaaataatgaaaggaaggggacaaattagatcaagaaaagaaaaatgattcaaccggctatcgagaatttagccacaaagacaccctaagcctctgaccgctattaaacctaagcatttgcaacttcagcatgtcattgaagctgtccttccaagagaggaaagaagtggcaatgttcctgaagatgaagtcgttcctttgcttccaaatgcaccaaactatcactgct

SEQ ID NO: 71683 - DNA, 4146 bp, Zea Mays
tctctctcccacccaaccctcttccttccaccccatccccgcttctctctcgcctccgcttcgctcgcgcgagagggggccgacgacggaactctaggattcgcgcccgcccgcgcggccaagccaccaggatcgcgctccgcggactcgagggcgctagccaagctccagggcgcgcggatcgtgcaccgggcggggccggttaccgccgccatgtcatcgctcacccgcgacatcgtcttcctcgtcctccagttcctagacgaggagaagtttaaggagaccatgcataagtttgagcaagagtcggggttcttcttcaatatgaagtactttgaagcgaagggccatgctggggactgggatgaggtggagaaatacttgtcaggtttcaccaagatagatgacaataattattcgatgaagatcttctttgagattaggaaacagaagtatttggaagcgcttgataggcatgatggagcaaaggctttagatattcttgttaaggatcttaaagtcttttcgacattcaatgaggagtcatataaggaaataacacagcttctcacttttgagaattttagggaaaatgaacagttgtctaattatggggatactaaatcagctcgaactgttatgctggttgaactaaaaaaactcattaaagccaaccctcttctccaggaaaaacttgtcttcccgactcttaaggcatcacgcctccgaactttaattaatcaaagcttgaattggcagcatcaacattccactccaacttcctccacctagtccatctttagctcgttggctgacgaatacagccgtcccttcatctgttcagtctgctgttgtagcagcctcgtcaatacctgttccacccaatcaagttgtctccatgttgaaacgcccaactataacagactatcaaagtgcagtgcctgagcaactaatgaagcgcttgaggcctggtggacatggcattggtgagaccacatatcctactcccattcctcaacgtgcatggtcaatggatgatcttccaaggacagttgcttgttcattgtcacatggatctaatgtaactagcatggattttcatccaactcgccatacactgcttctagtgggatctgctaatggtgaatttacactttatgagatcggtctgcgtcaaacattactttcaaagccctttaaaattctggatacaaatgcatgctcaccacaatttcagaatgctgttgttaaagacccccccatgtccattaatcgagttacctggagccctcatggagaattgattggagttgcattcacaaaatatttgatccgtgtatatgcatatcaaccaccaaatgagacacgacatgttctagagattgttgctcattctggaggtgtaaatgatatagcattctcacgaccaaacaagcaactttgtgtggtcacctgtggagatgataaactgataaaggtatggaatatgcatggacagaaattatttacatttgaagggcacaaggcgcctgtgtattctatatgtgcgcatcacaaacagagtattcagtttaaatttagggattatggctatggagtttctactgcgactatggcatacaatatagtgatatgcctattcaagtggaaaaaagggaggtccgcatgtggatgacttttaagtgaacaaatgttgattttagcagtatttatgttcatcttctcaacttcccttgatggaaaaattaaggcctggctttatgacaatgtgggatctagggtggactatgaagctcctggcaagtggtgtactactttgctatatagtgctgatgggactaggttgttctcatgtggaacaagcaaagagggagactcatatttggttcagtggaatgaaaatgatggatctatcaagaggacatattctggattccgtaagaggtcagctggtgttgctggtgtagtgcagtttgatatagctcagaatcacattttggctgctggtgaagataacaagattaaattttgggatgttgataataataatatgctgatctgcaccgacgctgaaggaggcctcccagctcttcctcgcttgaggttcaataaagaaggcaatcttcttgctgttactacagtggacaatggttttaagatacttgcaaatgctgatggactcagaaatctacgcgcattaggtagcaggcctcctttcgaagcatttaggctacaatacgaagatgcttctatgaaggtctcaggtgctcctgttgttgctaccatatctcctaacataggccgaatggatcacttggataggaattctcctgcaaagccatctcctatgctgactggtggcgatacagcatcaagaagcatagatataaaggcaagaatctcagaagaaaagtctgataaagcaaaagcttcggaactaatggaggttctaaatccccaacaatgccgtgtagcaacaatgccagaaactcccgatcaggctagaaaggttgtccgacttctgtacacaaattctggtgttgggttgctagcactagggtcaaacgccattcaaaggctatggaaatggagtcgaaacgagcaaaatcctagtggaaaagccacagccagtgttgtgccacaccattggcagccaaatagcggtcttgtcatgacaaatgatacatcggataccaatccagaggaggcaatcccatgcattgcactctccaagaatgattcctatgtgatgtctgcttgtggtgggaaggtttctttgtttaccatgatgacatttaaggtgctgacaacattcatgccgccaccaccagcatcaacatttttagcatttcaccctcaagataataacatcatagcaataggaatggaagattcaaccattcacatatacgatgtcagggtagataaggtaaaaactgaactcaaaggacatcaaaagaggataactgggttggcattctccaccaaccttggcgtacttgtttcttcaggcgccgatgcacagctctgtgtgtggaccaatgacacctgggaaaaaaagagaacagtctcgatacaaatgctagctgggaaggctccttcaggaaatacacgggtccagtttagttctgaccaaaatcacttgctagtagtacaagagactcaactagccatatatgatgcatcaaaaatggagaggatctatcagtggataccgcaggacacattgtcagcttccatatcccatgcatcatactcatgtaacagccagctagttttttctgccttcattgatggtaacataggtgtttttgacgcggagaacttgagattaagatgccgaattgcgcaatcggtgataaacagcaatccacatgttcaccctcttgttgtcgccgcacatccgcacgagccaaaccaatttgcggtggggctgtcagatgggttcgttaaagtgctggagccattggagtccgaaggaaaatggggaacacctgctccggtgaccaatggcacccccaacggcaagacaccagcttcgtcgactacgagtaaccctgctacggaccaaatccaaagatagattgtatttcctaagcattcttctgtaagggctagtttggcatccctatttttctaaaaaaaattattttattaaggaaattagttcatttttctttgggaaaataaaaattccttagaaaaatgctgttgccaaactagccctaaactttctaattacaccgacttatctgtatgtgcatgctgttaggatgtcattgccatttgttgaaaaaaaaagatagaataggttcaagttcaggtgtggttagttttcagatagagatctcttccagatactaccctagtttttttaaggaaaggctgtagggaaaatccctacaacatgattttgttaaataatgaaaggaaggggacaaattagatcaagaaaagaaaaatgattcaaccggctatcgagaatttagccacaaagacaccctaagcctctgaccgctattaaacctaagcatttgcaacttcagcatgtcattgaagctgtccttccaagagaggaaagaagtggcaatgttcctgaagatgaagtcgttcctttgcttccaaatgcaccaaactatcactgct

SEQ ID NO: 71684 - DNA, 4452 bp, Zea Mays
tctctctcccacccaaccctcttccttccaccccatccccgcttctctctcgcctccgcttcgctcgcgcgagagggggccgacgacggaactctaggattcgcgcccgcccgcgcggccaagccaccaggatcgcgctccgcggactcgagggcgctagccaagctccagggcgcgcggatcgtgcaccgggcggggccggttaccgccgccatgtcatcgctcacccgcgacatcgtcttcctcgtcctccagttcctagacgaggagaagtttaaggagaccatgcataagtttgagcaagagtcggggttcttcttcaatatgaagtactttgaagcgaagggccatgctggggactgggatgaggtggagaaatacttgtcaggtttcaccaagatagatgacaataattattcgatgaagatcttctttgagattaggaaacagaagtatttggaagcgcttgataggcatgatggagcaaaggctttagatattcttgttaaggatcttaaagtcttttcgacattcaatgaggagtcatataaggaaataacacagcttctcacttttgagaattttagggaaaatgaacagttgtctaattatggggatactaaatcagctcgaactgttatgctggttgaactaaaaaaactcattaaagccaaccctcttctccaggaaaaacttgtcttcccgactcttaaggcatcacgcctccgaactttaattaatcaaagcttgaattggcagcatcaacattgtaagaatcctcgtccaaatccagatatcaaaactttattcactgaccatacatgtactttacccaatggagctcctgcatcacgggtatctgtaccactggcagctgttccaaaggctggtgccgcatatccacccctgacagctcatactgtatctttgcttgatcattttctgcttgtgcatggcttttatgatgtttttttgtttttacattatgcatttatttatgcagccactccaacttcctccacctagtccatctttagctcgttggctgacgaatacagccgtcccttcatctgttcagtctgctgttgtagcagcctcgtcaatacctgttccacccaatcaagttgtctccatgttgaaacgcccaactataacagactatcaaagtgcagtgcctgagcaactaatgaagcgcttgaggcctggtggacatggcattgaccacatatcctactcccattcctcaacgtgcatggtcaatggatgatcttccaaggacagttgcttgttcattgtcacatggatctaatgtaactagcatggattttcatccaactcgccatacactgcttctagtgggatctgctaatggtgaatttacactttatgagatcggtctgcgtcaaacattactttcaaagccctttaaaattctggatacaaatgcatgctcaccacaatttcagaatgctgttgttaaagacccccccatgtccattaatcgagttacctggagccctcatggagaattgattggagttgcattcacaaaatatttgatccgtgtatatgcatatcaaccaccaaatgagacacgacatgttctagagattgttgctcattctggaggtgtaaatgatatagcattctcacgaccaaacaagcaactttgtgtggtcacctgtggagatgataaactgataaaggtaggagatgtgacttatggaaaattaatttactttttacttggcttgtctccttgaacttcattttcgttttttaggtatggaatatgcatggacagaaattatttacatttgaagggcacaaggcgcctgtgtattctatatgtgcgcatcacaaacagagtattcagtttaaatttagggattatggctatggagtttctactgcgactatggcatacaatatagtgatatgcctattcaagtggaaaaaagggaggtccgcatgtggatgacttttaagtgaacaaatgttgattttagcagtatttatgttcatcttctcaacttcccttgatggaaaaattaaggcctggctttatgacaatgtgggatctagggtggactatgaagctcctggcaagtggtgtactactttgctatatagtgctgatgggactaggttgttctcatgtggaacaagcaaagagggagactcatatttggttcagtggaatgaaaatgatggatctatcaagaggacatattctggattccgtaagaggtcagctggtgttgctggtgtagtgcagtttgatatagctcagaatcacattttggctgctggtgaagataacaagattaaattttgggatgttgataataataatatgctgatctgcaccgacgctgaaggaggcctcccagctcttcctcgcttgaggttcaataaagaaggcaatcttcttgctgttactacagtggacaatggttttaagatacttgcaaatgctgatggactcagaaatctacgcgcattaggtagcaggcctcctttcgaagcatttaggctacaatacgaagatgcttctatgaaggtctcaggtgctcctgttgttgctaccatatctcctaacataggccgaatggatcacttggataggaattctcctgcaaagccatctcctatgctgactggtggcgatacagcatcaagaagcatagatataaaggcaagaatctcagaagaaaagtctgataaagcaaaagcttcggaactaatggaggttctaaatccccaacaatgccgtgtagcaacaatgccagaaactcccgatcaggctagaaaggttgtccgacttctgtacacaaattctggtgttgggttgctagcactagggtcaaacgccattcaaaggctatggaaatggagtcgaaacgagcaaaatcctagtggaaaagccacagccagtgttgtgccacaccattggcagccaaatagcggtcttgtcatgacaaatgatacatcggataccaatccagaggaggcaatcccatgcattgcactctccaagaatgattcctatgtgatgtctgcttgtggtgggaaggtttctttgtttaccatgatgacatttaaggtgctgacaacattcatgccgccaccaccagcatcaacatttttagcatttcaccctcaagataataacatcatagcaataggaatggaagattcaaccattcacatatacgatgtcagggtagataaggtaaaaactgaactcaaaggacatcaaaagaggataactgggttggcattctccaccaaccttggcgtacttgtttcttcaggcgccgatgcacagctctgtgtgtggaccaatgacacctgggaaaaaaagagaacagtctcgatacaaatgctagctgggaaggctccttcaggaaatacacgggtccagtttagttctgaccaaaatcacttgctagtagtacaagagactcaactagccatatatgatgcatcaaaaatggagaggatctatcagtggataccgcaggacacattgtcagcttccatatcccatgcatcatactcatgtaacagccagctagttttttctgccttcattgatggtaacataggtgtttttgacgcggagaacttgagattaagatgccgaattgcgcaatcggtgataaacagcaatccacatgttcaccctcttgttgtcgccgcacatccgcacgagccaaaccaatttgcggtggggctgtcagatgggttcgttaaagtgctggagccattggagtccgaaggaaaatggggaacacctgctccggtgaccaatggcacccccaacggcaagacaccagcttcgtcgactacgagtaaccctgctacggaccaaatccaaagatagattgtatttcctaagcattcttctgtaagggctagtttggcatccctatttttctaaaaaaaattattttattaaggaaattagttcatttttctttgggaaaataaaaattccttagaaaaatgctgttgccaaactagccctaaactttctaattacaccgacttatctgtatgtgcatgctgttaggatgtcattgccatttgttgaaaaaaaaagatagaataggttcaagttcaggtgtggttagttttcagatagagatctcttccagatactaccctagtttttttaaggaaaggctgtagggaaaatccctacaacatgattttgttaaataatgaaaggaaggggacaaattagatcaagaaaagaaaaatgattcaaccggctatcgagaatttagccacaaagacaccctaagcctctgaccgctattaaacctaagcatttgcaacttcagcatgtcattgaagctgtccttccaagagaggaaagaagtggcaatgttcctgaagatgaagtcgttcctttgcttccaaatgcaccaaactatcactgct

SEQ ID NO: 71685 - DNA, 3820 bp, Zea Mays
tctctctcccacccaaccctcttccttccaccccatccccgcttctctctcgcctccgcttcgctcgcgcgagagggggccgacgacggaactctaggattcgcgcccgcccgcgcggccaagccaccaggatcgcgctccgcggactcgagggcgctagccaagctccagggcgcgcggatcgtgcaccgggcggggccggttaccgccgccatgtcatcgctcacccgcgacatcgtcttcctcgtcctccagttcctagacgaggagaagtttaaggagaccatgcataagtttgagcaagagtcggggttcttcttcaatatgaagtactttgaagcgaagggccatgctggggactgggatgaggtggagaaatacttgtcaggtttcaccaagatagatgacaataattattcgatgaagatcttctttgagattaggaaacagaagtatttggaagcgcttgataggcatgatggagcaaaggctttagatattcttgttaaggatcttaaagtcttttcgacattcaatgaggagtcatataaggaaataacacagcttctcacttttgagaattttagccactccaacttcctccacctagtccatctttagctcgttggctgacgaatacagccgtcccttcatctgttcagtctgctgttgtagcagcctcgtcaatacctgttccacccaatcaagttgtctccatgttgaaacgcccaactataacagactatcaaagtgcagtgcctgagcaactaatgaagcgcttgaggcctggtggacatggcattggtgagaccacatatcctactcccattcctcaacgtgcatggtcaatggatgatcttccaaggacagttgcttgttcattgtcacatggatctaatgtaactagcatggattttcatccaactcgccatacactgcttctagtgggatctgctaatggtgaatttacactttatgagatcggtctgcgtcaaacattactttcaaagccctttaaaattctggatacaaatgcatgctcaccacaatttcagaatgctgttgttaaagacccccccatgtccattaatcgagttacctggagccctcatggagaattgattggagttgcattcacaaaatatttgatccgtgtatatgcatatcaaccaccaaatgagacacgacatgttctagagattgttgctcattctggaggtgtaaatgatatagcattctcacgaccaaacaagcaactttgtgtggtcacctgtggagatgataaactgataaaggtatggaatatgcatggacagaaattatttacatttgaagggcacaaggcgcctgtgtattctatatgtgcgcatcacaaacagagtattcagttcatcttctcaacttcccttgatggaaaaattaaggcctggctttatgacaatgtgggatctagggtggactatgaagctcctggcaagtggtgtactactttgctatatagtgctgatgggactaggttgttctcatgtggaacaagcaaagagggagactcatatttggttcagtggaatgaaaatgatggatctatcaagaggacatattctggattccgtaagaggtcagctggtgttgctggtgtagtgcagtttgatatagctcagaatcacattttggctgctggtgaagataacaagattaaattttgggatgttgataataataatatgctgatctgcaccgacgctgaaggaggcctcccagctcttcctcgcttgaggttcaataaagaaggcaatcttcttgctgttactacagtggacaatggttttaagatacttgcaaatgctgatggactcagaaatctacgcgcattaggtagcaggcctcctttcgaagcatttaggctacaatacgaagatgcttctatgaaggtctcaggtgctcctgttgttgctaccatatctcctaacataggccgaatggatcacttggataggaattctcctgcaaagccatctcctatgctgactggtggcgatacagcatcaagaagcatagatataaaggcaagaatctcagaagaaaagtctgataaagcaaaagcttcggaactaatggaggttctaaatccccaacaatgccgtgtagcaacaatgccagaaactcccgatcaggctagaaaggttgtccgacttctgtacacaaattctggtgttgggttgctagcactagggtcaaacgccattcaaaggctatggaaatggagtcgaaacgagcaaaatcctagtggaaaagccacagccagtgttgtgccacaccattggcagccaaatagcggtcttgtcatgacaaatgatacatcggataccaatccagaggaggcaatcccatgcattgcactctccaagaatgattcctatgtgatgtctgcttgtggtgggaaggtttctttgtttaccatgatgacatttaaggtgctgacaacattcatgccgccaccaccagcatcaacatttttagcatttcaccctcaagataataacatcatagcaataggaatggaagattcaaccattcacatatacgatgtcagggtagataaggtaaaaactgaactcaaaggacatcaaaagaggataactgggttggcattctccaccaaccttggcgtacttgtttcttcaggcgccgatgcacagctctgtgtgtggaccaatgacacctgggaaaaaaagagaacagtctcgatacaaatgctagctgggaaggctccttcaggaaatacacgggtccagtttagttctgaccaaaatcacttgctagtagtacaagagactcaactagccatatatgatgcatcaaaaatggagaggatctatcagtggataccgcaggacacattgtcagcttccatatcccatgcatcatactcatgtaacagccagctagttttttctgccttcattgatggtaacataggtgtttttgacgcggagaacttgagattaagatgccgaattgcgcaatcggtgataaacagcaatccacatgttcaccctcttgttgtcgccgcacatccgcacgagccaaaccaatttgcggtggggctgtcagatgggttcgttaaagtgctggagccattggagtccgaaggaaaatggggaacacctgctccggtgaccaatggcacccccaacggcaagacaccagcttcgtcgactacgagtaaccctgctacggaccaaatccaaagatagattgtatttcctaagcattcttctgtaagggctagtttggcatccctatttttctaaaaaaaattattttattaaggaaattagttcatttttctttgggaaaataaaaattccttagaaaaatgctgttgccaaactagccctaaactttctaattacaccgacttatctgtatgtgcatgctgttaggatgtcattgccatttgttgaaaaaaaaagatagaataggttcaagttcaggtgtggttagttttcagatagagatctcttccagatactaccctagtttttttaaggaaaggctgtagggaaaatccctacaacatgattttgttaaataatgaaaggaaggggacaaattagatcaagaaaagaaaaatgattcaaccggctatcgagaatttagccacaaagacaccctaagcctctgaccgctattaaacctaagcatttgcaacttcagcatgtcattgaagctgtccttccaagagaggaaagaagtggcaatgttcctgaagatgaagtcgttcctttgcttccaaatgcaccaaactatcactgct

SEQ ID NO: 71686 - DNA, 4262 bp, Zea Mays
tctctctcccacccaaccctcttccttccaccccatccccgcttctctctcgcctccgcttcgctcgcgcgagagggggccgacgacggaactctaggattcgcgcccgcccgcgcggccaagccaccaggatcgcgctccgcggactcgagggcgctagccaagctccagggcgcgcggatcgtgcaccgggcggggccggttaccgccgccatgtcatcgctcacccgcgacatcgtcttcctcgtcctccagttcctagacgaggagaagtttaaggagaccatgcataagtttgagcaagagtcggggttcttcttcaatatgaagtactttgaagcgaagggccatgctggggactgggatgaggtggagaaatacttgtcaggtttcaccaagatagatgacaataattattcgatgaagatcttctttgagattaggaaacagaagtatttggaagcgcttgataggcatgatggagcaaaggctttagatattcttgttaaggatcttaaagtcttttcgacattcaatgaggagtcatataaggaaataacacagcttctcacttttgagaattttagggaaaatgaacagttgtctaattatggggatactaaatcagctcgaactgttatgctggttgaactaaaaaaactcattaaagccaaccctcttctccaggaaaaacttgtcttcccgactcttaaggcatcacgcctccgaactttaattaatcaaagcttgaattggcagcatcaacattgtaagaatcctcgtccaaatccagatatcaaaactttattcactgaccatacatgtactttacccaatggagctcctgcatcacgggtatctgtaccactggcagctgttccaaagccactccaacttcctccacctagtccatctttagctcgttggctgacgaatacagccgtcccttcatctgttcagtctgctgttgtagcagcctcgtcaatacctgttccacccaatcaagttgtctccatgttgaaacgcccaactataacagactatcaaagtgcagtgcctgagcaactaatgaagcgcttgaggcctggtggacatggcattggtgagaccacatatcctactcccattcctcaacgtgcatggtcaatggatgatcttccaaggacagttgcttgttcattgtcacatggatctaatgtaactagcatggattttcatccaactcgccatacactgcttctagtgggatctgctaatggtgaatttacactttatgagatcggtctgcgtcaaacattactttcaaagccctttaaaattctggatacaaatgcatgctcaccacaatttcagaatgctgttgttaaagacccccccatgtccattaatcgagttacctggagccctcatggagaattgattggagttgcattcacaaaatatttgatccgtgtatatgcatatcaaccaccaaatgagacacgacatgttctagagattgttgctcattctggaggtgtaaatgatatagcattctcacgaccaaacaagcaactttgtgtggtcacctgtggagatgataaactgataaaggtatggaatatgcatggacagaaattatttacatttgaagggcacaaggcgcctgtgtattctatatgtgcgcatcacaaacagagtattcagtttaaatttagggattatggctatggagtttctactgcgactatggcatacaatatagtgatatgcctattcaagtggaaaaaagggaggtccgcatgtggatgacttttaagtgaacaaatgttgattttagcagtatttatgttcatcttctcaacttcccttgatggaaaaattaaggcctggctttatgacaatgtgggatctagggtggactatgaagctcctggcaagtggtgtactactttgctatatagtgctgatgggactaggttgttctcatgtggaacaagcaaagagggagactcatatttggttcagtggaatgaaaatgatggatctatcaagaggacatattctggattccgtaagaggtcagctggtgttgctggtgtagtgcagtttgatatagctcagaatcacattttggctgctggtgaagataacaagattaaattttgggatgttgataataataatatgctgatctgcaccgacgctgaaggaggcctcccagctcttcctcgcttgaggttcaataaagaaggcaatcttcttgctgttactacagtggacaatggttttaagatacttgcaaatgctgatggactcagaaatctacgcgcattaggtagcaggcctcctttcgaagcatttaggctacaatacgaagatgcttctatgaaggtctcaggtgctcctgttgttgctaccatatctcctaacataggccgaatggatcacttggataggaattctcctgcaaagccatctcctatgctgactggtggcgatacagcatcaagaagcatagatataaaggcaagaatctcagaagaaaagtctgataaagcaaaagcttcggaactaatggaggttctaaatccccaacaatgccgtgtagcaacaatgccagaaactcccgatcaggctagaaaggttgtccgacttctgtacacaaattctggtgttgggttgctagcactagggtcaaacgccattcaaaggctatggaaatggagtcgaaacgagcaaaatcctagtggaaaagccacagccagtgttgtgccacaccattggcagccaaatagcggtcttgtcatgacaaatgatacatcggataccaatccagaggaggcaatcccatgcattgcactctccaagaatgattcctatgtgatgtctgcttgtggtgggaaggtttctttgtttaccatgatgacatttaaggtgctgacaacattcatgccgccaccaccagcatcaacatttttagcatttcaccctcaagataataacatcatagcaataggaatggaagattcaaccattcacatatacgatgtcagggtagataaggtaaaaactgaactcaaaggacatcaaaagaggataactgggttggcattctccaccaaccttggcgtacttgtttcttcaggcgccgatgcacagctctgtgtgtggaccaatgacacctgggaaaaaaagagaacagtctcgatacaaatgctagctgggaaggctccttcaggaaatacacgggtccagtttagttctgaccaaaatcacttgctagtagtacaagagactcaactagccatatatgatgcatcaaaaatggagaggatctatcagtggataccgcaggacacattgtcagcttccatatcccatgcatcatactcatgtaacagccagctagttttttctgccttcattgatggtaacataggtgtttttgacgcggagaacttgagattaagatgccgaattgcgcaatcggtgataaacagcaatccacatgttcaccctcttgttgtcgccgcacatccgcacgagccaaaccaatttgcggtggggctgtcagatgggttcgttaaagtgctggagccattggagtccgaaggaaaatggggaacacctgctccggtgaccaatggcacccccaacggcaagacaccagcttcgtcgactacgagtaaccctgctacggaccaaatccaaagatagattgtatttcctaagcattcttctgtaagggctagtttggcatccctatttttctaaaaaaaattattttattaaggaaattagttcatttttctttgggaaaataaaaattccttagaaaaatgctgttgccaaactagccctaaactttctaattacaccgacttatctgtatgtgcatgctgttaggatgtcattgccatttgttgaaaaaaaaagatagaataggttcaagttcaggtgtggttagttttcagatagagatctcttccagatactaccctagtttttttaaggaaaggctgtagggaaaatccctacaacatgattttgttaaataatgaaaggaaggggacaaattagatcaagaaaagaaaaatgattcaaccggctatcgagaatttagccacaaagacaccctaagcctctgaccgctattaaacctaagcatttgcaacttcagcatgtcattgaagctgtccttccaagagaggaaagaagtggcaatgttcctgaagatgaagtcgttcctttgcttccaaatgcaccaaactatcactgct

SEQ ID NO: 71687 - DNA, 4207 bp, Zea Mays
tctctctcccacccaaccctcttccttccaccccatccccgcttctctctcgcctccgcttcgctcgcgcgagagggggccgacgacggaactctaggattcgcgcccgcccgcgcggccaagccaccaggatcgcgctccgcggactcgagggcgctagccaagctccagggcgcgcggatcgtgcaccgggcggggccggttaccgccgccatgtcatcgctcacccgcgacatcgtcttcctcgtcctccagttcctagacgaggagaagtttaaggagaccatgcataagtttgagcaagagtcggggttcttcttcaatatgaagtactttgaagcgaagggccatgctggggactgggatgaggtggagaaatacttgtcaggtttcaccaagatagatgacaataattattcgatgaagatcttctttgagattaggaaacagaagtatttggaagcgcttgataggcatgatggagcaaaggctttagatattcttgttaaggatcttaaagtcttttcgacattcaatgaggagtcatataaggaaataacacagcttctcacttttgagaattttagggaaaatgaacagttgtctaattatggggatactaaatcagctcgaactgttatgctggttgaactaaaaaaactcattaaagccaaccctcttctccaggaaaaacttgtcttcccgactcttaaggcatcacgcctccgaactttaattaatcaaagcttgaattggcagcatcaacattgtaagaatcctcgtccaaatccagatatcaaaactttattcactgaccatacatgtactttacccaatggagctcctgcatcacgggtatctgtaccactggcagctgttccaaagccactccaacttcctccacctagtccatctttagctcgttggctgacgaatacagccgtcccttcatctgttcagtctgctgttgtagcagcctcgtcaatacctgttccacccaatcaagttgtctccatgttgaaacgcccaactataacagactatcaaagtgcagtgcctgagcaactaatgaagcgcttgaggcctggtggacatggcattggtgagaccacatatcctactcccattcctcaacgtgcatggtcaatggatgatcttccaaggacagttgcttgttcattgtcacatggatctaatgtaactagcatggattttcatccaactcgccatacactgcttctagtgggatctgctaatggtgaatttacactttatgagatcggtctgcgtcaaacattactttcaaagccctttaaaattctggatacaaatgcatgctcaccacaatttcagaatgctgttgttaaagacccccccatgtccattaatcgagttacctggagccctcatggagaattgattggagttgcattcacaaaatatttgatccgtgtatatgcatatcaaccaccaaatgagacacgacatgttctagagattgttgctcattctggaggtgtaaatgatatagcattctcacgaccaaacaagcaactttgtgtggtcacctgtggagatgataaactgataaaggtatggaatatgcatggacagaaattatttacatttgaagggcacaaggcgcctgtgtattctatatgtgcgcatcacaaacagagtattcagtttaaatttagggattatggctatggagtttctactgcgactatggcatacaatatagtgatatgcctattcaagtggaaaaaagggagttcatcttctcaacttcccttgatggaaaaattaaggcctggctttatgacaatgtgggatctagggtggactatgaagctcctggcaagtggtgtactactttgctatatagtgctgatgggactaggttgttctcatgtggaacaagcaaagagggagactcatatttggttcagtggaatgaaaatgatggatctatcaagaggacatattctggattccgtaagaggtcagctggtgttgctggtgtagtgcagtttgatatagctcagaatcacattttggctgctggtgaagataacaagattaaattttgggatgttgataataataatatgctgatctgcaccgacgctgaaggaggcctcccagctcttcctcgcttgaggttcaataaagaaggcaatcttcttgctgttactacagtggacaatggttttaagatacttgcaaatgctgatggactcagaaatctacgcgcattaggtagcaggcctcctttcgaagcatttaggctacaatacgaagatgcttctatgaaggtctcaggtgctcctgttgttgctaccatatctcctaacataggccgaatggatcacttggataggaattctcctgcaaagccatctcctatgctgactggtggcgatacagcatcaagaagcatagatataaaggcaagaatctcagaagaaaagtctgataaagcaaaagcttcggaactaatggaggttctaaatccccaacaatgccgtgtagcaacaatgccagaaactcccgatcaggctagaaaggttgtccgacttctgtacacaaattctggtgttgggttgctagcactagggtcaaacgccattcaaaggctatggaaatggagtcgaaacgagcaaaatcctagtggaaaagccacagccagtgttgtgccacaccattggcagccaaatagcggtcttgtcatgacaaatgatacatcggataccaatccagaggaggcaatcccatgcattgcactctccaagaatgattcctatgtgatgtctgcttgtggtgggaaggtttctttgtttaccatgatgacatttaaggtgctgacaacattcatgccgccaccaccagcatcaacatttttagcatttcaccctcaagataataacatcatagcaataggaatggaagattcaaccattcacatatacgatgtcagggtagataaggtaaaaactgaactcaaaggacatcaaaagaggataactgggttggcattctccaccaaccttggcgtacttgtttcttcaggcgccgatgcacagctctgtgtgtggaccaatgacacctgggaaaaaaagagaacagtctcgatacaaatgctagctgggaaggctccttcaggaaatacacgggtccagtttagttctgaccaaaatcacttgctagtagtacaagagactcaactagccatatatgatgcatcaaaaatggagaggatctatcagtggataccgcaggacacattgtcagcttccatatcccatgcatcatactcatgtaacagccagctagttttttctgccttcattgatggtaacataggtgtttttgacgcggagaacttgagattaagatgccgaattgcgcaatcggtgataaacagcaatccacatgttcaccctcttgttgtcgccgcacatccgcacgagccaaaccaatttgcggtggggctgtcagatgggttcgttaaagtgctggagccattggagtccgaaggaaaatggggaacacctgctccggtgaccaatggcacccccaacggcaagacaccagcttcgtcgactacgagtaaccctgctacggaccaaatccaaagatagattgtatttcctaagcattcttctgtaagggctagtttggcatccctatttttctaaaaaaaattattttattaaggaaattagttcatttttctttgggaaaataaaaattccttagaaaaatgctgttgccaaactagccctaaactttctaattacaccgacttatctgtatgtgcatgctgttaggatgtcattgccatttgttgaaaaaaaaagatagaataggttcaagttcaggtgtggttagttttcagatagagatctcttccagatactaccctagtttttttaaggaaaggctgtagggaaaatccctacaacatgattttgttaaataatgaaaggaaggggacaaattagatcaagaaaagaaaaatgattcaaccggctatcgagaatttagccacaaagacaccctaagcctctgaccgctattaaacctaagcatttgcaacttcagcatgtcattgaagctgtccttccaagagaggaaagaagtggcaatgttcctgaagatgaagtcgttcctttgcttccaaatgcaccaaactatcactgct

SEQ ID NO: 71688 - DNA, 4113 bp, Zea Mays
tctctctcccacccaaccctcttccttccaccccatccccgcttctctctcgcctccgcttcgctcgcgcgagagggggccgacgacggaactctaggattcgcgcccgcccgcgcggccaagccaccaggatcgcgctccgcggactcgagggcgctagccaagctccagggcgcgcggatcgtgcaccgggcggggccggttaccgccgccatgtcatcgctcacccgcgacatcgtcttcctcgtcctccagttcctagacgaggagaagtttaaggagaccatgcataagtttgagcaagagtcggggttcttcttcaatatgaagtactttgaagcgaagggccatgctggggactgggatgaggtggagaaatacttgtcaggtttcaccaagatagatgacaataattattcgatgaagatcttctttgagattaggaaacagaagtatttggaagcgcttgataggcatgatggagcaaaggctttagatattcttgttaaggatcttaaagtcttttcgacattcaatgaggagtcatataaggaaataacacagcttctcacttttgagaattttagggaaaatgaacagttgtctaattatggggatactaaatcagctcgaactgttatgctggttgaactaaaaaaactcattaaagccaaccctcttctccaggaaaaacttgtcttcccgactcttaaggcatcacgcctccgaactttaattaatcaaagcttgaattggcagcatcaacattgtaagaatcctcgtccaaatccagatatcaaaactttattcactgaccatacatgtactttacccaatggagctcctgcatcacgggtatctgtaccactggcagctgttccaaagccactccaacttcctccacctagtccatctttagctcgttggctgacgaatacagccgtcccttcatctgttcagtctgctgttgtagcagcctcgtcaatacctgttccacccaatcaagttgtctccatgttgaaacgcccaactataacagactatcaaagtgcagtgcctgagcaactaatgaagcgcttgaggcctggtggacatggcattgaccacatatcctactcccattcctcaacgtgcatggtcaatggatgatcttccaaggacagttgcttgttcattgtcacatggatctaatgtaactagcatggattttcatccaactcgccatacactgcttctagtgggatctgctaatggtgaatttacactttatgagatcggtctgcgtcaaacattactttcaaagccctttaaaattctggatacaaatgcatgctcaccacaatttcagaatgctgttgttaaagacccccccatgtccattaatcgagttacctggagccctcatggagaattgattggagttgcattcacaaaatatttgatccgtgtatatgcatatcaaccaccaaatgagacacgacatgttctagagattgttgctcattctggaggtgtaaatgatatagcattctcacgaccaaacaagcaactttgtgtggtcacctgtggagatgataaactgataaaggtatggaatatgcatggacagaaattatttacatttgaagggcacaaggcgcctgtgtattctatatgtgcgcatcacaaacagagtattcagttcatcttctcaacttcccttgatggaaaaattaaggcctggctttatgacaatgtgggatctagggtggactatgaagctcctggcaagtggtgtactactttgctatatagtgctgatgggactaggttgttctcatgtggaacaagcaaagagggagactcatatttggttcagtggaatgaaaatgatggatctatcaagaggacatattctggattccgtaagaggtcagctggtgttgctggtgtagtgcagtttgatatagctcagaatcacattttggctgctggtgaagataacaagattaaattttgggatgttgataataataatatgctgatctgcaccgacgctgaaggaggcctcccagctcttcctcgcttgaggttcaataaagaaggcaatcttcttgctgttactacagtggacaatggttttaagatacttgcaaatgctgatggactcagaaatctacgcgcattaggtagcaggcctcctttcgaagcatttaggctacaatacgaagatgcttctatgaaggtctcaggtgctcctgttgttgctaccatatctcctaacataggccgaatggatcacttggataggaattctcctgcaaagccatctcctatgctgactggtggcgatacagcatcaagaagcatagatataaaggcaagaatctcagaagaaaagtctgataaagcaaaagcttcggaactaatggaggttctaaatccccaacaatgccgtgtagcaacaatgccagaaactcccgatcaggctagaaaggttgtccgacttctgtacacaaattctggtgttgggttgctagcactagggtcaaacgccattcaaaggctatggaaatggagtcgaaacgagcaaaatcctagtggaaaagccacagccagtgttgtgccacaccattggcagccaaatagcggtcttgtcatgacaaatgatacatcggataccaatccagaggaggcaatcccatgcattgcactctccaagaatgattcctatgtgatgtctgcttgtggtgggaaggtttctttgtttaccatgatgacatttaaggtgctgacaacattcatgccgccaccaccagcatcaacatttttagcatttcaccctcaagataataacatcatagcaataggaatggaagattcaaccattcacatatacgatgtcagggtagataaggtaaaaactgaactcaaaggacatcaaaagaggataactgggttggcattctccaccaaccttggcgtacttgtttcttcaggcgccgatgcacagctctgtgtgtggaccaatgacacctgggaaaaaaagagaacagtctcgatacaaatgctagctgggaaggctccttcaggaaatacacgggtccagtttagttctgaccaaaatcacttgctagtagtacaagagactcaactagccatatatgatgcatcaaaaatggagaggatctatcagtggataccgcaggacacattgtcagcttccatatcccatgcatcatactcatgtaacagccagctagttttttctgccttcattgatggtaacataggtgtttttgacgcggagaacttgagattaagatgccgaattgcgcaatcggtgataaacagcaatccacatgttcaccctcttgttgtcgccgcacatccgcacgagccaaaccaatttgcggtggggctgtcagatgggttcgttaaagtgctggagccattggagtccgaaggaaaatggggaacacctgctccggtgaccaatggcacccccaacggcaagacaccagcttcgtcgactacgagtaaccctgctacggaccaaatccaaagatagattgtatttcctaagcattcttctgtaagggctagtttggcatccctatttttctaaaaaaaattattttattaaggaaattagttcatttttctttgggaaaataaaaattccttagaaaaatgctgttgccaaactagccctaaactttctaattacaccgacttatctgtatgtgcatgctgttaggatgtcattgccatttgttgaaaaaaaaagatagaataggttcaagttcaggtgtggttagttttcagatagagatctcttccagatactaccctagtttttttaaggaaaggctgtagggaaaatccctacaacatgattttgttaaataatgaaaggaaggggacaaattagatcaagaaaagaaaaatgattcaaccggctatcgagaatttagccacaaagacaccctaagcctctgaccgctattaaacctaagcatttgcaacttcagcatgtcattgaagctgtccttccaagagaggaaagaagtggcaatgttcctgaagatgaagtcgttcctttgcttccaaatgcaccaaactatcactgct

SEQ ID NO: 71689 - DNA, 4326 bp, Zea Mays
tctctctcccacccaaccctcttccttccaccccatccccgcttctctctcgcctccgcttcgctcgcgcgagagggggccgacgacggaactctaggattcgcgcccgcccgcgcggccaagccaccaggatcgcgctccgcggactcgagggcgctagccaagctccagggcgcgcggatcgtgcaccgggcggggccggttaccgccgccatgtcatcgctcacccgcgacatcgtcttcctcgtcctccagttcctagacgaggagaagtttaaggagaccatgcataagtttgagcaagagtcggggttcttcttcaatatgaagtactttgaagcgaagggccatgctggggactgggatgaggtggagaaatacttgtcaggtttcaccaagatagatgacaataattattcgatgaagatcttctttgagattaggaaacagaagtatttggaagcgcttgataggcatgatggagcaaaggctttagatattcttgttaaggatcttaaagtcttttcgacattcaatgaggagtcatataaggaaataacacagcttctcacttttgagaattttagggaaaatgaacagttgtctaattatggggatactaaatcagctcgaactgttatgctggttgaactaaaaaaactcattaaagccaaccctcttctccaggaaaaacttgtcttcccgactcttaaggcatcacgcctccgaactttaattaatcaaagcttgaattggcagcatcaacattgtaagaatcctcgtccaaatccagatatcaaaactttattcactgaccatacatgtactttacccaatggagctcctgcatcacgggtatctgtaccactggcagctgttccaaaggctggtgccgcatatccacccctgacagctcatactgtatctttgcttgatcattttctgcttgtgcatggcttttatgatgtttttttgtttttacattatgcatttatttatgcagccactccaacttcctccacctagtccatctttagctcgttggctgacgaatacagccgtcccttcatctgttcagtctgctgttgtagcagcctcgtcaatacctgttccacccaatcaagttgtctccatgttgaaacgcccaactataacagactatcaaagtgcagtgcctgagcaactaatgaagcgcttgaggcctggtggacatggcattggtgagaccacatatcctactcccattcctcaacgtgcatggtcaatggatgatcttccaaggacagttgcttgttcattgtcacatggatctaatgtaactagcatggattttcatccaactcgccatacactgcttctagtgggatctgctaatggtgaatttacactttatgagatcggtctgcgtcaaacattactttcaaagccctttaaaattctggatacaaatgcatgctcaccacaatttcagaatgctgttgttaaagacccccccatgtccattaatcgagttacctggagccctcatggagaattgattggagttgcattcacaaaatatttgatccgtgtatatgcatatcaaccaccaaatgagacacgacatgttctagagattgttgctcattctggaggtgtaaatgatatagcattctcacgaccaaacaagcaactttgtgtggtcacctgtggagatgataaactgataaaggtatggaatatgcatggacagaaattatttacatttgaagggcacaaggcgcctgtgtattctatatgtgcgcatcacaaacagagtattcagtttaaatttagggattatggctatggagtttctactgcgactatggcatacaatatagtgatatgcctattcaagtggaaaaaagggaggttcatcttctcaacttcccttgatggaaaaattaaggcctggctttatgacaatgtgggatctagggtggactatgaagctcctggcaagtggtgtactactttgctatatagtgctgatgggactaggttgttctcatgtggaacaagcaaagagggagactcatatttggttcagtggaatgaaaatgatggatctatcaagaggacatattctggattccgtaagaggtcagctggtgttgctggtgtagtgcagtttgatatagctcagaatcacattttggctgctggtgaagataacaagattaaattttgggatgttgataataataatatgctgatctgcaccgacgctgaaggaggcctcccagctcttcctcgcttgaggttcaataaagaaggcaatcttcttgctgttactacagtggacaatggttttaagatacttgcaaatgctgatggactcagaaatctacgcgcattaggtagcaggcctcctttcgaagcatttaggctacaatacgaagatgcttctatgaaggtctcaggtgctcctgttgttgctaccatatctcctaacataggccgaatggatcacttggataggaattctcctgcaaagccatctcctatgctgactggtggcgatacagcatcaagaagcatagatataaaggcaagaatctcagaagaaaagtctgataaagcaaaagcttcggaactaatggaggttctaaatccccaacaatgccgtgtagcaacaatgccagaaactcccgatcaggctagaaaggttgtccgacttctgtacacaaattctggtgttgggttgctagcactagggtcaaacgccattcaaaggctatggaaatggagtcgaaacgagcaaaatcctagtggaaaagccacagccagtgttgtgccacaccattggcagccaaatagcggtcttgtcatgacaaatgatacatcggataccaatccagaggaggcaatcccatgcattgcactctccaagaatgattcctatgtgatgtctgcttgtggtgggaaggtttctttgtttaccatgatgacatttaaggtgctgacaacattcatgccgccaccaccagcatcaacatttttagcatttcaccctcaagataataacatcatagcaataggaatggaagattcaaccattcacatatacgatgtcagggtagataaggtaaaaactgaactcaaaggacatcaaaagaggataactgggttggcattctccaccaaccttggcgtacttgtttcttcaggcgccgatgcacagctctgtgtgtggaccaatgacacctgggaaaaaaagagaacagtctcgatacaaatgctagctgggaaggctccttcaggaaatacacgggtccagtttagttctgaccaaaatcacttgctagtagtacaagagactcaactagccatatatgatgcatcaaaaatggagaggatctatcagtggataccgcaggacacattgtcagcttccatatcccatgcatcatactcatgtaacagccagctagttttttctgccttcattgatggtaacataggtgtttttgacgcggagaacttgagattaagatgccgaattgcgcaatcggtgataaacagcaatccacatgttcaccctcttgttgtcgccgcacatccgcacgagccaaaccaatttgcggtggggctgtcagatgggttcgttaaagtgctggagccattggagtccgaaggaaaatggggaacacctgctccggtgaccaatggcacccccaacggcaagacaccagcttcgtcgactacgagtaaccctgctacggaccaaatccaaagatagattgtatttcctaagcattcttctgtaagggctagtttggcatccctatttttctaaaaaaaattattttattaaggaaattagttcatttttctttgggaaaataaaaattccttagaaaaatgctgttgccaaactagccctaaactttctaattacaccgacttatctgtatgtgcatgctgttaggatgtcattgccatttgttgaaaaaaaaagatagaataggttcaagttcaggtgtggttagttttcagatagagatctcttccagatactaccctagtttttttaaggaaaggctgtagggaaaatccctacaacatgattttgttaaataatgaaaggaaggggacaaattagatcaagaaaagaaaaatgattcaaccggctatcgagaatttagccacaaagacaccctaagcctctgaccgctattaaacctaagcatttgcaacttcagcatgtcattgaagctgtccttccaagagaggaaagaagtggcaatgttcctgaagatgaagtcgttcctttgcttccaaatgcaccaaactatcactgct

SEQ ID NO: 71690 - DNA, 4123 bp, Zea Mays
tctctctcccacccaaccctcttccttccaccccatccccgcttctctctcgcctccgcttcgctcgcgcgagagggggccgacgacggaactctaggattcgcgcccgcccgcgcggccaagccaccaggatcgcgctccgcggactcgagggcgctagccaagctccagggcgcgcggatcgtgcaccgggcggggccggttaccgccgccatgtcatcgctcacccgcgacatcgtcttcctcgtcctccagttcctagacgaggagaagtttaaggagaccatgcataagtttgagcaagagtcggggttcttcttcaatatgaagtactttgaagcgaagggccatgctggggactgggatgaggtggagaaatacttgtcaggtttcaccaagatagatgacaataattattcgatgaagatcttctttgagattaggaaacagaagtatttggaagcgcttgataggcatgatggagcaaaggctttagatattcttgttaaggatcttaaagtcttttcgacattcaatgaggagtcatataaggaaataacacagcttctcacttttgagaattttagggaaaatgaacagttgtctaattatggggatactaaatcagctcgaactgttatgctggttgaactaaaaaaactcattaaagccaaccctcttctccaggaaaaacttgtcttcccgactcttaaggcatcacgcctccgaactttaattaatcaaagccactccaacttcctccacctagtccatctttagctcgttggctgacgaatacagccgtcccttcatctgttcagtctgctgttgtagcagcctcgtcaatacctgttccacccaatcaagttgtctccatgttgaaacgcccaactataacagactatcaaagtgcagtgcctgagcaactaatgaagcgcttgaggcctggtggacatggcattggtgagaccacatatcctactcccattcctcaacgtgcatggtcaatggatgatcttccaaggacagttgcttgttcattgtcacatggatctaatgtaactagcatggattttcatccaactcgccatacactgcttctagtgggatctgctaatggtgaatttacactttatgagatcggtctgcgtcaaacattactttcaaagccctttaaaattctggatacaaatgcatgctcaccacaatttcagaatgctgttgttaaagacccccccatgtccattaatcgagttacctggagccctcatggagaattgattggagttgcattcacaaaatatttgatccgtgtatatgcatatcaaccaccaaatgagacacgacatgttctagagattgttgctcattctggaggtgtaaatgatatagcattctcacgaccaaacaagcaactttgtgtggtcacctgtggagatgataaactgataaaggtatggaatatgcatggacagaaattatttacatttgaagggcacaaggcgcctgtgtattctatatgtgcgcatcacaaacagagtattcagtttaaatttagggattatggctatggagtttctactgcgactatggcatacaatatagtgatatgcctattcaagtggaaaaaagggaggtccgcatgtggatgacttttaagtgaacaaatgttgattttagcagtatttatgttcatcttctcaacttcccttgatggaaaaattaaggcctggctttatgacaatgtgggatctagggtggactatgaagctcctggcaagtggtgtactactttgctatatagtgctgatgggactaggttgttctcatgtggaacaagcaaagagggagactcatatttggttcagtggaatgaaaatgatggatctatcaagaggacatattctggattccgtaagaggtcagctggtgttgctggtgtagtgcagtttgatatagctcagaatcacattttggctgctggtgaagataacaagattaaattttgggatgttgataataataatatgctgatctgcaccgacgctgaaggaggcctcccagctcttcctcgcttgaggttcaataaagaaggcaatcttcttgctgttactacagtggacaatggttttaagatacttgcaaatgctgatggactcagaaatctacgcgcattaggtagcaggcctcctttcgaagcatttaggctacaatacgaagatgcttctatgaaggtctcaggtgctcctgttgttgctaccatatctcctaacataggccgaatggatcacttggataggaattctcctgcaaagccatctcctatgctgactggtggcgatacagcatcaagaagcatagatataaaggcaagaatctcagaagaaaagtctgataaagcaaaagcttcggaactaatggaggttctaaatccccaacaatgccgtgtagcaacaatgccagaaactcccgatcaggctagaaaggttgtccgacttctgtacacaaattctggtgttgggttgctagcactagggtcaaacgccattcaaaggctatggaaatggagtcgaaacgagcaaaatcctagtggaaaagccacagccagtgttgtgccacaccattggcagccaaatagcggtcttgtcatgacaaatgatacatcggataccaatccagaggaggcaatcccatgcattgcactctccaagaatgattcctatgtgatgtctgcttgtggtgggaaggtttctttgtttaccatgatgacatttaaggtgctgacaacattcatgccgccaccaccagcatcaacatttttagcatttcaccctcaagataataacatcatagcaataggaatggaagattcaaccattcacatatacgatgtcagggtagataaggtaaaaactgaactcaaaggacatcaaaagaggataactgggttggcattctccaccaaccttggcgtacttgtttcttcaggcgccgatgcacagctctgtgtgtggaccaatgacacctgggaaaaaaagagaacagtctcgatacaaatgctagctgggaaggctccttcaggaaatacacgggtccagtttagttctgaccaaaatcacttgctagtagtacaagagactcaactagccatatatgatgcatcaaaaatggagaggatctatcagtggataccgcaggacacattgtcagcttccatatcccatgcatcatactcatgtaacagccagctagttttttctgccttcattgatggtaacataggtgtttttgacgcggagaacttgagattaagatgccgaattgcgcaatcggtgataaacagcaatccacatgttcaccctcttgttgtcgccgcacatccgcacgagccaaaccaatttgcggtggggctgtcagatgggttcgttaaagtgctggagccattggagtccgaaggaaaatggggaacacctgctccggtgaccaatggcacccccaacggcaagacaccagcttcgtcgactacgagtaaccctgctacggaccaaatccaaagatagattgtatttcctaagcattcttctgtaagggctagtttggcatccctatttttctaaaaaaaattattttattaaggaaattagttcatttttctttgggaaaataaaaattccttagaaaaatgctgttgccaaactagccctaaactttctaattacaccgacttatctgtatgtgcatgctgttaggatgtcattgccatttgttgaaaaaaaaagatagaataggttcaagttcaggtgtggttagttttcagatagagatctcttccagatactaccctagtttttttaaggaaaggctgtagggaaaatccctacaacatgattttgttaaataatgaaaggaaggggacaaattagatcaagaaaagaaaaatgattcaaccggctatcgagaatttagccacaaagacaccctaagcctctgaccgctattaaacctaagcatttgcaacttcagcatgtcattgaagctgtccttccaagagaggaaagaagtggcaatgttcctgaagatgaagtcgttcctttgcttccaaatgcaccaaactatcactgct

SEQ ID NO: 71691 - DNA, 3928 bp, Zea Mays
tctctctcccacccaaccctcttccttccaccccatccccgcttctctctcgcctccgcttcgctcgcgcgagagggggccgacgacggaactctaggattcgcgcccgcccgcgcggccaagccaccaggatcgcgctccgcggactcgagggcgctagccaagctccagggcgcgcggatcgtgcaccgggcggggccggttaccgccgccatgtcatcgctcacccgcgacatcgtcttcctcgtcctccagttcctagacgaggagaagtttaaggagaccatgcataagtttgagcaagagtcggggttcttcttcaatatgaagtactttgaagcgaagggccatgctggggactgggatgaggtggagaaatacttgtcaggtttcaccaagatagatgacaataattattcgatgaagatcttctttgagattaggaaacagaagtatttggaagcgcttgataggcatgatggagcaaaggctttagatattcttgttaaggatcttaaagtcttttcgacattcaatgaggagtcatataaggaaataacacagcttctcacttttgagaattttagccactccaacttcctccacctagtccatctttagctcgttggctgacgaatacagccgtcccttcatctgttcagtctgctgttgtagcagcctcgtcaatacctgttccacccaatcaagttgtctccatgttgaaacgcccaactataacagactatcaaagtgcagtgcctgagcaactaatgaagcgcttgaggcctggtggacatggcattgaccacatatcctactcccattcctcaacgtgcatggtcaatggatgatcttccaaggacagttgcttgttcattgtcacatggatctaatgtaactagcatggattttcatccaactcgccatacactgcttctagtgggatctgctaatggtgaatttacactttatgagatcggtctgcgtcaaacattactttcaaagccctttaaaattctggatacaaatgcatgctcaccacaatttcagaatgctgttgttaaagacccccccatgtccattaatcgagttacctggagccctcatggagaattgattggagttgcattcacaaaatatttgatccgtgtatatgcatatcaaccaccaaatgagacacgacatgttctagagattgttgctcattctggaggtgtaaatgatatagcattctcacgaccaaacaagcaactttgtgtggtcacctgtggagatgataaactgataaagggtatggaatatgcatggacagaaattatttacatttgaagggcacaaggcgcctgtgtattctatatgtgcgcatcacaaacagagtattcagtttaaatttagggattatggctatggagtttctactgcgactatggcatacaatatagtgatatgcctattcaagtggaaaaaagggaggtccgcatgtggatgacttttaattcatcttctcaacttcccttgatggaaaaattaaggcctggctttatgacaatgtgggatctagggtggactatgaagctcctggcaagtggtgtactactttgctatatagtgctgatgggactaggttgttctcatgtggaacaagcaaagagggagactcatatttggttcagtggaatgaaaatgatggatctatcaagaggacatattctggattccgtaagaggtcagctggtgttgctggtgtagtgcagtttgatatagctcagaatcacattttggctgctggtgaagataacaagattaaattttgggatgttgataataataatatgctgatctgcaccgacgctgaaggaggcctcccagctcttcctcgcttgaggttcaataaagaaggcaatcttcttgctgttactacagtggacaatggttttaagatacttgcaaatgctgatggactcagaaatctacgcgcattaggtagcaggcctcctttcgaagcatttaggctacaatacgaagatgcttctatgaaggtctcaggtgctcctgttgttgctaccatatctcctaacataggccgaatggatcacttggataggaattctcctgcaaagccatctcctatgctgactggtggcgatacagcatcaagaagcatagatataaaggcaagaatctcagaagaaaagtctgataaagcaaaagcttcggaactaatggaggttctaaatccccaacaatgccgtgtagcaacaatgccagaaactcccgatcaggctagaaaggttgtccgacttctgtacacaaattctggtgttgggttgctagcactagggtcaaacgccattcaaaggctatggaaatggagtcgaaacgagcaaaatcctagtggaaaagccacagccagtgttgtgccacaccattggcagccaaatagcggtcttgtcatgacaaatgatacatcggataccaatccagaggaggcaatcccatgcattgcactctccaagaatgattcctatgtgatgtctgcttgtggtgggaaggtttctttgtttaccatgatgacatttaaggtgctgacaacattcatgccgccaccaccagcatcaacatttttagcatttcaccctcaagataataacatcatagcaataggaatggaagattcaaccattcacatatacgatgtcagggtagataaggtaaaaactgaactcaaaggacatcaaaagaggataactgggttggcattctccaccaaccttggcgtacttgtttcttcaggcgccgatgcacagctctgtgtgtggaccaatgacacctgggaaaaaaagagaacagtctcgatacaaatgctagctgggaaggctccttcaggaaatacacgggtccagtttagttctgaccaaaatcacttgctagtagtacaagagactcaactagccatatatgatgcatcaaaaatggagaggatctatcagtggataccgcaggacacattgtcagcttccatatcccatgcatcatactcatgtaacagccagctagttttttctgccttcattgatggtaacataggtgtttttgacgcggagaacttgagattaagatgccgaattgcgcaatcggtgataaacagcaatccacatgttcaccctcttgttgtcgccgcacatccgcacgagccaaaccaatttgcggtggggctgtcagatgggttcgttaaagtgctggagccattggagtccgaaggaaaatggggaacacctgctccggtgaccaatggcacccccaacggcaagacaccagcttcgtcgactacgagtaaccctgctacggaccaaatccaaagatagattgtatttcctaagcattcttctgtaagggctagtttggcatccctatttttctaaaaaaaattattttattaaggaaattagttcatttttctttgggaaaataaaaattccttagaaaaatgctgttgccaaactagccctaaactttctaattacaccgacttatctgtatgtgcatgctgttaggatgtcattgccatttgttgaaaaaaaaagatagaataggttcaagttcaggtgtggttagttttcagatagagatctcttccagatactaccctagtttttttaaggaaaggctgtagggaaaatccctacaacatgattttgttaaataatgaaaggaaggggacaaattagatcaagaaaagaaaaatgattcaaccggctatcgagaatttagccacaaagacaccctaagcctctgaccgctattaaacctaagcatttgcaacttcagcatgtcattgaagctgtccttccaagagaggaaagaagtggcaatgttcctgaagatgaagtcgttcctttgcttccaaatgcaccaaactatcactgct

SEQ ID NO: 71692 - DNA, 4154 bp, Zea Mays
tctctctcccacccaaccctcttccttccaccccatccccgcttctctctcgcctccgcttcgctcgcgcgagagggggccgacgacggaactctaggattcgcgcccgcccgcgcggccaagccaccaggatcgcgctccgcggactcgagggcgctagccaagctccagggcgcgcggatcgtgcaccgggcggggccggttaccgccgccatgtcatcgctcacccgcgacatcgtcttcctcgtcctccagttcctagacgaggagaagtttaaggagaccatgcataagtttgagcaagagtcggggttcttcttcaatatgaagtactttgaagcgaagggccatgctggggactgggatgaggtggagaaatacttgtcaggtttcaccaagatagatgacaataattattcgatgaagatcttctttgagattaggaaacagaagtatttggaagcgcttgataggcatgatggagcaaaggctttagatattcttgttaaggatcttaaagtcttttcgacattcaatgaggagtcatataaggaaataacacagcttctcacttttgagaattttagggaaaatgaacagttgtctaattatggggatactaaatcagctcgaactgttatgctggttgaactaaaaaaactcattaaagccaaccctcttctccaggaaaaacttgtcttcccgactcttaaggcatcacgcctccgaactttaattaatcaaagcttgaattggcagcatcaacattgtaagaatcctcgtccaaatccagatatcaaaactttattcactgaccatacatgtactttacccaatggagctcctgcatcacgggtatctgtaccactggcagctgttccaaaggctggtgccgcatatccacccctgacagctcatactccactccaacttcctccacctagtccatctttagctcgttggctgacgaatacagccgtcccttcatctgttcagtctgctgttgtagcagcctcgtcaatacctgttccacccaatcaagttgtctccatgttgaaacgcccaactataacagactatcaaagtgcagtgcctgagcaactaatgaagcgcttgaggcctggtggacatggcattggtgagaccacatatcctactcccattcctcaacgtgcatggtcaatggatgatcttccaaggacagttgcttgttcattgtcacatggatctaatgtaactagcatggattttcatccaactcgccatacactgcttctagtgggatctgctaatggtgaatttacactttatgagatcggtctgcgtcaaacattactttcaaagccctttaaaattctggatacaaatgcatgctcaccacaatttcagaatgctgttgttaaagacccccccatgtccattaatcgagttacctggagccctcatggagaattgattggagttgcattcacaaaatatttgatccgtgtatatgcatatcaaccaccaaatgagacacgacatgttctagagattgttgctcattctggaggtgtaaatgatatagcattctcacgaccaaacaagcaactttgtgtggtcacctgtggagatgataaactgataaaggtatggaatatgcatggacagaaattatttacatttgaagggcacaaggcgcctgtgtattctatatgtgcgcatcacaaacagagtattcagttcatcttctcaacttcccttgatggaaaaattaaggcctggctttatgacaatgtgggatctagggtggactatgaagctcctggcaagtggtgtactactttgctatatagtgctgatgggactaggttgttctcatgtggaacaagcaaagagggagactcatatttggttcagtggaatgaaaatgatggatctatcaagaggacatattctggattccgtaagaggtcagctggtgttgctggtgtagtgcagtttgatatagctcagaatcacattttggctgctggtgaagataacaagattaaattttgggatgttgataataataatatgctgatctgcaccgacgctgaaggaggcctcccagctcttcctcgcttgaggttcaataaagaaggcaatcttcttgctgttactacagtggacaatggttttaagatacttgcaaatgctgatggactcagaaatctacgcgcattaggtagcaggcctcctttcgaagcatttaggctacaatacgaagatgcttctatgaaggtctcaggtgctcctgttgttgctaccatatctcctaacataggccgaatggatcacttggataggaattctcctgcaaagccatctcctatgctgactggtggcgatacagcatcaagaagcatagatataaaggcaagaatctcagaagaaaagtctgataaagcaaaagcttcggaactaatggaggttctaaatccccaacaatgccgtgtagcaacaatgccagaaactcccgatcaggctagaaaggttgtccgacttctgtacacaaattctggtgttgggttgctagcactagggtcaaacgccattcaaaggctatggaaatggagtcgaaacgagcaaaatcctagtggaaaagccacagccagtgttgtgccacaccattggcagccaaatagcggtcttgtcatgacaaatgatacatcggataccaatccagaggaggcaatcccatgcattgcactctccaagaatgattcctatgtgatgtctgcttgtggtgggaaggtttctttgtttaccatgatgacatttaaggtgctgacaacattcatgccgccaccaccagcatcaacatttttagcatttcaccctcaagataataacatcatagcaataggaatggaagattcaaccattcacatatacgatgtcagggtagataaggtaaaaactgaactcaaaggacatcaaaagaggataactgggttggcattctccaccaaccttggcgtacttgtttcttcaggcgccgatgcacagctctgtgtgtggaccaatgacacctgggaaaaaaagagaacagtctcgatacaaatgctagctgggaaggctccttcaggaaatacacgggtccagtttagttctgaccaaaatcacttgctagtagtacaagagactcaactagccatatatgatgcatcaaaaatggagaggatctatcagtggataccgcaggacacattgtcagcttccatatcccatgcatcatactcatgtaacagccagctagttttttctgccttcattgatggtaacataggtgtttttgacgcggagaacttgagattaagatgccgaattgcgcaatcggtgataaacagcaatccacatgttcaccctcttgttgtcgccgcacatccgcacgagccaaaccaatttgcggtggggctgtcagatgggttcgttaaagtgctggagccattggagtccgaaggaaaatggggaacacctgctccggtgaccaatggcacccccaacggcaagacaccagcttcgtcgactacgagtaaccctgctacggaccaaatccaaagatagattgtatttcctaagcattcttctgtaagggctagtttggcatccctatttttctaaaaaaaattattttattaaggaaattagttcatttttctttgggaaaataaaaattccttagaaaaatgctgttgccaaactagccctaaactttctaattacaccgacttatctgtatgtgcatgctgttaggatgtcattgccatttgttgaaaaaaaaagatagaataggttcaagttcaggtgtggttagttttcagatagagatctcttccagatactaccctagtttttttaaggaaaggctgtagggaaaatccctacaacatgattttgttaaataatgaaaggaaggggacaaattagatcaagaaaagaaaaatgattcaaccggctatcgagaatttagccacaaagacaccctaagcctctgaccgctattaaacctaagcatttgcaacttcagcatgtcattgaagctgtccttccaagagaggaaagaagtggcaatgttcctgaagatgaagtcgttcctttgcttccaaatgcaccaaactatcactgct

SEQ ID NO: 71693 - DNA, 4070 bp, Zea Mays
tctctctcccacccaaccctcttccttccaccccatccccgcttctctctcgcctccgcttcgctcgcgcgagagggggccgacgacggaactctaggattcgcgcccgcccgcgcggccaagccaccaggatcgcgctccgcggactcgagggcgctagccaagctccagggcgcgcggatcgtgcaccgggcggggccggttaccgccgccatgtcatcgctcacccgcgacatcgtcttcctcgtcctccagttcctagacgaggagaagtttaaggagaccatgcataagtttgagcaagagtcggggttcttcttcaatatgaagtactttgaagcgaagggccatgctggggactgggatgaggtggagaaatacttgtcaggtttcaccaagatagatgacaataattattcgatgaagatcttctttgagattaggaaacagaagtatttggaagcgcttgataggcatgatggagcaaaggctttagatattcttgttaaggatcttaaagtcttttcgacattcaatgaggagtcatataaggaaataacacagcttctcacttttgagaattttagggaaaatgaacagttgtctaattatggggatactaaatcagctcgaactgttatgctggttgaactaaaaaaactcattaaagccaaccctcttctccaggaaaaacttgtcttcccgactcttaaggcatcacgcctccgaactttaattaatcaaagcttgaattggcagcatcaacattgtaagaatcctcgtccaaatccagatatcaaaactttattcactgaccatacatgtactttacccaatggagctcctgcatcacgggtatctgtaccactggcagctgttccaaagccactccaacttcctccacctagtccatctttagctcgttggctgacgaatacagccgtcccttcatctgttcagtctgctgttgtagcagcctcgtcaatacctgttccacccaatcaagtgcctgagcaactaatgaagcgcttgaggcctggtggacatggcattggtgagaccacatatcctactcccattcctcaacgtgcatggtcaatggatgatcttccaaggacagttgcttgttcattgtcacatggatctaatgtaactagcatggattttcatccaactcgccatacactgcttctagtgggatctgctaatggtgaatttacactttatgagatcggtctgcgtcaaacattactttcaaagccctttaaaattctggatacaaatgcatgctcaccacaatttcagaatgctgttgttaaagacccccccatgtccattaatcgagttacctggagccctcatggagaattgattggagttgcattcacaaaatatttgatccgtgtatatgcatatcaaccaccaaatgagacacgacatgttctagagattgttgctcattctggaggtgtaaatgatatagcattctcacgaccaaacaagcaactttgtgtggtcacctgtggagatgataaactgataaaggtatggaatatgcatggacagaaattatttacatttgaagggcacaaggcgcctgtgtattctatatgtgcgcatcacaaacagagtattcagttcatcttctcaacttcccttgatggaaaaattaaggcctggctttatgacaatgtgggatctagggtggactatgaagctcctggcaagtggtgtactactttgctatatagtgctgatgggactaggttgttctcatgtggaacaagcaaagagggagactcatatttggttcagtggaatgaaaatgatggatctatcaagaggacatattctggattccgtaagaggtcagctggtgttgctggtgtagtgcagtttgatatagctcagaatcacattttggctgctggtgaagataacaagattaaattttgggatgttgataataataatatgctgatctgcaccgacgctgaaggaggcctcccagctcttcctcgcttgaggttcaataaagaaggcaatcttcttgctgttactacagtggacaatggttttaagatacttgcaaatgctgatggactcagaaatctacgcgcattaggtagcaggcctcctttcgaagcatttaggctacaatacgaagatgcttctatgaaggtctcaggtgctcctgttgttgctaccatatctcctaacataggccgaatggatcacttggataggaattctcctgcaaagccatctcctatgctgactggtggcgatacagcatcaagaagcatagatataaaggcaagaatctcagaagaaaagtctgataaagcaaaagcttcggaactaatggaggttctaaatccccaacaatgccgtgtagcaacaatgccagaaactcccgatcaggctagaaaggttgtccgacttctgtacacaaattctggtgttgggttgctagcactagggtcaaacgccattcaaaggctatggaaatggagtcgaaacgagcaaaatcctagtggaaaagccacagccagtgttgtgccacaccattggcagccaaatagcggtcttgtcatgacaaatgatacatcggataccaatccagaggaggcaatcccatgcattgcactctccaagaatgattcctatgtgatgtctgcttgtggtgggaaggtttctttgtttaccatgatgacatttaaggtgctgacaacattcatgccgccaccaccagcatcaacatttttagcatttcaccctcaagataataacatcatagcaataggaatggaagattcaaccattcacatatacgatgtcagggtagataaggtaaaaactgaactcaaaggacatcaaaagaggataactgggttggcattctccaccaaccttggcgtacttgtttcttcaggcgccgatgcacagctctgtgtgtggaccaatgacacctgggaaaaaaagagaacagtctcgatacaaatgctagctgggaaggctccttcaggaaatacacgggtccagtttagttctgaccaaaatcacttgctagtagtacaagagactcaactagccatatatgatgcatcaaaaatggagaggatctatcagtggataccgcaggacacattgtcagcttccatatcccatgcatcatactcatgtaacagccagctagttttttctgccttcattgatggtaacataggtgtttttgacgcggagaacttgagattaagatgccgaattgcgcaatcggtgataaacagcaatccacatgttcaccctcttgttgtcgccgcacatccgcacgagccaaaccaatttgcggtggggctgtcagatgggttcgttaaagtgctggagccattggagtccgaaggaaaatggggaacacctgctccggtgaccaatggcacccccaacggcaagacaccagcttcgtcgactacgagtaaccctgctacggaccaaatccaaagatagattgtatttcctaagcattcttctgtaagggctagtttggcatccctatttttctaaaaaaaattattttattaaggaaattagttcatttttctttgggaaaataaaaattccttagaaaaatgctgttgccaaactagccctaaactttctaattacaccgacttatctgtatgtgcatgctgttaggatgtcattgccatttgttgaaaaaaaaagatagaataggttcaagttcaggtgtggttagttttcagatagagatctcttccagatactaccctagtttttttaaggaaaggctgtagggaaaatccctacaacatgattttgttaaataatgaaaggaaggggacaaattagatcaagaaaagaaaaatgattcaaccggctatcgagaatttagccacaaagacaccctaagcctctgaccgctattaaacctaagcatttgcaacttcagcatgtcattgaagctgtccttccaagagaggaaagaagtggcaatgttcctgaagatgaagtcgttcctttgcttccaaatgcaccaaactatcactgct

SEQ ID NO: 71694 - DNA, 4312 bp, Zea Mays
tctctctcccacccaaccctcttccttccaccccatccccgcttctctctcgcctccgcttcgctcgcgcgagagggggccgacgacggaactctaggattcgcgcccgcccgcgcggccaagccaccaggatcgcgctccgcggactcgagggcgctagccaagctccagggcgcgcggatcgtgcaccgggcggggccggttaccgccgccatgtcatcgctcacccgcgacatcgtcttcctcgtcctccagttcctagacgaggagaagtttaaggagaccatgcataagtttgagcaagagtcggggttcttcttcaatatgaagtactttgaagcgaagggccatgctggggactgggatgaggtggagaaatacttgtcaggtttcaccaagatagatgacaataattattcgatgaagatcttctttgagattaggaaacagaagtatttggaagcgcttgataggcatgatggagcaaaggctttagatattcttgttaaggatcttaaagtcttttcgacattcaatgaggagtcatataaggaaataacacagcttctcacttttgagaattttagggaaaatgaacagttgtctaattatggggatactaaatcagctcgaactgttatgctggttgaactaaaaaaactcattaaagccaaccctcttctccaggaaaaacttgtcttcccgactcttaaggcatcacgcctccgaactttaattaatcaaagcttgaattggcagcatcaacattccactccaacttcctccacctagtccatctttagctcgttggctgacgaatacagccgtcccttcatctgttcagtctgctgttgtagcagcctcgtcaatacctgttccacccaatcaagttgtctccatgttgaaacgcccaactataacagactatcaaagtgcagtgcctgagcaactaatgaagcgcttgaggcctggtggacatggcattggtgagaccacatatcctactcccattcctcaacgtgcatggtcaatggatgatcttccaaggacagttgcttgttcattgtcacatggatctaatgtaactagcatggattttcatccaactcgccatacactgcttctagtgggatctgctaatggtgaatttacactttatgagatcggtctgcgtcaaacattactttcaaagccctttaaaattctggatacaaatgcatgctcaccacaatttcagaatgctgttgttaaagacccccccatgtccattaatcgagttacctggagccctcatggagaattgattggagttgcattcacaaaatatttgatccgtgtatatgcatatcaaccaccaaatgagacacgacatgttctagagattgttgctcattctggaggtgtaaatgatatagcattctcacgaccaaacaagcaactttgtgtggtcacctgtggagatgataaactgataaaggtaggagatgtgacttatggaaaattaatttactttttacttggcttgtctccttgaacttcattttcgttttttaggtatggaatatgcatggacagaaattatttacatttgaagggcacaaggcgcctgtgtattctatatgtgcgcatcacaaacagagtattcagtttaaatttagggattatggctatggagtttctactgcgactatggcatacaatatagtgatatgcctattcaagtggaaaaaagggagttcatcttctcaacttcccttgatggaaaaattaaggcctggctttatgacaatgtgggatctagggtggactatgaagctcctggcaagtggtgtactactttgctatatagtgctgatgggactaggttgttctcatgtggaacaagcaaagagggagactcatatttggttcagtggaatgaaaatgatggatctatcaagaggacatattctggattccgtaagaggtcagctggtgttgctggtgtagtgcagtttgatatagctcagaatcacattttggctgctggtgaagataacaagattaaattttgggatgttgataataataatatgctgatctgcaccgacgctgaaggaggcctcccagctcttcctcgcttgaggttcaataaagaaggcaatcttcttgctgttactacagtggacaatggttttaagatacttgcaaatgctgatggactcagaaatctacgcgcattaggtagcaggcctcctttcgaagcatttaggctacaatacgaagatgcttctatgaaggtctcaggtgctcctgttgttgctaccatatctcctaacataggccgaatggatcacttggataggaattctcctgcaaagccatctcctatgctgactggtggcgatacagcatcaagaagcatagatataaaggcaagaatctcagaagaaaagtctgataaagcaaaagcttcggaactaatggaggttctaaatccccaacaatgccgtgtagcaacaatgccagaaactcccgatcaggctagaaaggttgtccgacttctgtacacaaattctggtgttgggttgctagcactagggtcaaacgccattcaaaggctatggaaatggagtcgaaacgagcaaaatcctagtggaaaagccacagccagtgttgtgccacaccattggcagccaaatagcggtcttgtcatgacaaatgatacatcggataccaatccagaggaggcaatcccatgcattgcactctccaagaatgattcctatgtgatgtctgcttgtggtgggaaggtttctttgtttaccatgatgacatttaaggtgctgacaacattcatgccgccaccaccagcatcaacatttttagcatttcaccctcaagataataacatcatagcaataggaatggaagattcaaccattcacatatacgatgtcagggtagataaggtaaaaactgaactcaaaggacatcaaaagaggataactgggttggcattctccaccaaccttggcgtacttgtttcttcaggcgccgatgcacaggttactattagtaatgaatttcttgtttgtgcgtcccaagatgaccatgttttcaacaaccctcatctccttccctacctctcttgtttttctctctgaatttacttgcaccaatgaagcagtcgctgactttcatctattcagctctgtgtgtggaccaatgacacctgggaaaaaaagagaacagtctcgatacaaatgctagctgggaaggctccttcaggaaatacacgggtccagtttagttctgaccaaaatcacttgctagtagtacaagagactcaactagccatatatgatgcatcaaaaatggagaggatctatcagtggataccgcaggacacattgtcagcttccatatcccatgcatcatactcatgtaacagccagctagttttttctgccttcattgatggtaacataggtgtttttgacgcggagaacttgagattaagatgccgaattgcgcaatcggtgataaacagcaatccacatgttcaccctcttgttgtcgccgcacatccgcacgagccaaaccaatttgcggtggggctgtcagatgggttcgttaaagtgctggagccattggagtccgaaggaaaatggggaacacctgctccggtgaccaatggcacccccaacggcaagacaccagcttcgtcgactacgagtaaccctgctacggaccaaatccaaagatagattgtatttcctaagcattcttctgtaagggctagtttggcatccctatttttctaaaaaaaattattttattaaggaaattagttcatttttctttgggaaaataaaaattccttagaaaaatgctgttgccaaactagccctaaactttctaattacaccgacttatctgtatgtgcatgctgttaggatgtcattgccatttgttgaaaaaaaaagatagaataggttcaagttcaggtgtggttagttttcagatagagatctcttccagatactaccctagtttttttaaggaaaggctgtagggaaaatccctacaacatgattttgttaaataatgaaaggaaggggacaaattagatcaagaaaagaaaaatgattcaaccggctatcgagaatttagccacaaagacaccctaagcctctgaccgctattaaacctaagcatttgcaacttcagcatgtcattgaagctgtccttccaagagaggaaagaagtggcaatgttcctgaagatgaagtcgttcctttgcttccaaatgcaccaaactatcactgct

SEQ ID NO: 71695 - DNA, 4098 bp, Zea Mays
tctctctcccacccaaccctcttccttccaccccatccccgcttctctctcgcctccgcttcgctcgcgcgagagggggccgacgacggaactctaggattcgcgcccgcccgcgcggccaagccaccaggatcgcgctccgcggactcgagggcgctagccaagctccagggcgcgcggatcgtgcaccgggcggggccggttaccgccgccatgtcatcgctcacccgcgacatcgtcttcctcgtcctccagttcctagacgaggagaagtttaaggagaccatgcataagtttgagcaagagtcggggttcttcttcaatatgaagtactttgaagcgaagggccatgctggggactgggatgaggtggagaaatacttgtcaggtttcaccaagatagatgacaataattattcgatgaagatcttctttgagattaggaaacagaagtatttggaagcgcttgataggcatgatggagcaaaggctttagatattcttgttaaggatcttaaagtcttttcgacattcaatgaggagtcatataaggaaataacacagcttctcacttttgagaattttagggaaaatgaacagttgtctaattatggggatactaaatcagctcgaactgttatgctggttgaactaaaaaaactcattaaagccaaccctcttctccaggaaaaacttgtcttcccgactcttaaggcatcacgcctccgaactttaattaatcaaagcttgaattggcagcatcaacattgtaagaatcctcgtccaaatccagatatcaaaactttattcactgaccatacatgtactttacccaatggagctcctgcatcacgggtatctgtaccactggcagctgttccaaagccactccaacttcctccacctagtccatctttagctcgttggctgacgaatacagccgtcccttcatctgttcagtctgctgttgtagcagcctcgtcaatacctgttccacccaatcaagttgtctccatgttgaaacgcccaactataacagactatcaaagtgcagtgcctgagcaactaatgaagcgcttgaggcctggtggacatggcattggtgagaccacatatcctactcccattcctcaacgtgcatggtcaatggatgatcttccaaggacagttgcttgttcattgtcacatggatctaatgtaactagcatggattttcatccaactcgccatacactgcttctagtgggatctgctaatggtgaatttacactttatgagatcggtctgcgtcaaacattactttcaaagccctttaaaattctggatacaaatgcatgctcaccacaatttcagaatgctgttgttaaagacccccccatgtccattaatcgagttacctggagccctcatggagaattgattggagttgcattcacaaaatatttgatccgtgtatatgcatatcaaccaccaaatgagacacgacatgttctagagattgttgctcattctggaggtgtaaatgatatagcattctcacgaccaaacaagcaactttgtgtggtcacctgtggagatgataaactgataaaggtatggaatatgcatggacagaaattatttacatttgaagggcacaaggcgcctgtgtattctatatgtgcgcatcacaaacagagtattcagtttaaatttagggattatggctatggagtttctactgcgactatggcatacaatatagtgatatgcctattcaagtggaaaaaagggaggtccgcatgtggatgacttttaattcatcttctcaacttcccttgatggaaaaattaaggcctggctttatgacaatgtgggatctagggtggactatgaagctcctggcaagtggtgtactactttgctatatagtgctgatgggactaggttgttctcatgtggaacaagcaaagagggagactcatatttggttcagtggaatgaaaatgatggatctatcaagaggacatattctggattccgtaagaggtcagctggtgttgctggtgtagtgcagtttgatatagctcagaatcacattttggctgctggtgaagataacaagattaaattttgggatgttgataataataatatgctgatctgcaccgacgctgaaggaggcctcccagctcttcctcgcttgaggttcaataaagaaggcaatcttcttgctgttactacagtggacaatggttttaagatacttgcaaatgctgatggactcagaaatctacgcgcattaggtagcaggcctcctttcgaagcatttaggctacaatacgaagatgcttctatgaaggtctcaggtgctcctgttgttgctaccatatctcctaacataggccgaatggatcacttggataggaattctcctgcaaagccatctcctatgctgactggtggcgatacagcatcaagaagcatagatataaaggcaagaatctcagaagaaaagtctgataaagcaaaagcttcggaactaatggaggttctaaatccccaacaatgccgtgtagcaacaatgccagaaactcccgatcaggctagaaaggttgtccgacttctgtacacaaattctggtgttgggttgctagcactagggtcaaacgccattcaaaggctatggaaatggagtcgaaacgagcaaaatcctagtggaaaagccacagccagtgttgtgccacaccattggcagccaaatagcggtcttgtcatgacaaatgatacatcggataccaatccagaggaggcaatcccatgcattgcactctccaagaatgattcctatgtgatgtctgcttgtggtgggaaggtttctttgtttaccatgatgacatttaaggtgctgacaacattcatgccgccaccaccagcatcaacatttttagcatttcaccctcaagataataacatcatagcaataggaatggaagattcaaccattcacatatacgatgtcagggtagataaggtaaaaactgaactcaaaggacatcaaaagaggataactgggttggcattctccaccaaccttggcgtacttgtttcttcaggcgccgatgcacagctctgtgtgtggaccaatgacacctgggaaaaaaagagaacagtctcgatacaaatgctagctgggaaggctccttcaggaaatacacgggtccagtttagttctgaccaaaatcacttgctagtagtacaagagactcaactagccatatatgatgcatcaaaaatggagaggatctatcagtggataccgcaggacacattgtcagcttccatatcccatgcatcatactcatgtaacagccagctagttttttctgccttcattgatggtaacataggtgtttttgacgcggagaacttgagattaagatgccgaattgcgcaatcggtgataaacagcaatccacatgttcaccctcttgttgtcgccgcacatccgcacgagccaaaccaatttgcggtggggctgtcagatgggttcgttaaagtgctggagccattggagtccgaaggaaaatggggaacacctgctccggtgaccaatggcacccccaacggcaagacaccagcttcgtcgactacgagtaaccctgctacggaccaaatccaaagatagattgtatttcctaagctttctaattacaccgacttatctgtatgtgcatgctgttaggatgtcattgccatttgttgaaaaaaaaagatagaataggttcaagttcaggtgtggttagttttcagatagagatctcttccagatactaccctagtttttttaaggaaaggctgtagggaaaatccctacaacatgattttgttaaataatgaaaggaaggggacaaattagatcaagaaaagaaaaatgattcaaccggctatcgagaatttagccacaaagacaccctaagcctctgaccgctattaaacctaagcatttgcaacttcagcatgtcattgaagctgtccttccaagagaggaaagaagtggcaatgttcctgaagatgaagtcgttcctttgcttccaaatgcaccaaactatcactgct

SEQ ID NO: 71696 - DNA, 4506 bp, Zea Mays
tctctctcccacccaaccctcttccttccaccccatccccgcttctctctcgcctccgcttcgctcgcgcgagagggggccgacgacggaactctaggattcgcgcccgcccgcgcggccaagccaccaggatcgcgctccgcggactcgagggcgctagccaagctccagggcgcgcggatcgtgcaccgggcggggccggttaccgccgccatgtcatcgctcacccgcgacatcgtcttcctcgtcctccagttcctagacgaggagaagtttaaggagaccatgcataagtttgagcaagagtcggggttcttcttcaatatgaagtactttgaagcgaagggccatgctggggactgggatgaggtggagaaatacttgtcaggtttcaccaagatagatgacaataattattcgatgaagatcttctttgagattaggaaacagaagtatttggaagcgcttgataggcatgatggagcaaaggctttagatattcttgttaaggatcttaaagtcttttcgacattcaatgaggagtcatataaggaaataacacagcttctcacttttgagaattttagggaaaatgaacagttgtctaattatggggatactaaatcagctcgaactgttatgctggttgaactaaaaaaactcattaaagccaaccctcttctccaggaaaaacttgtcttcccgactcttaaggcatcacgcctccgaactttaattaatcaaagcttgaattggcagcatcaacattgtaagaatcctcgtccaaatccagatatcaaaactttattcactgaccatacatgtactttacccaatggagctcctgcatcacgggtatctgtaccactggcagctgttccaaagccactccaacttcctccacctagtccatctttagctcgttggctgacgaatacagccgtcccttcatctgttcagtctgctgttgtagcagcctcgtcaatacctgttccacccaatcaagttgtctccatgttgaaacgcccaactataacagactatcaaagtgcagtgcctgagcaactaatgaagcgcttgaggcctggtggacatggcattggtgaggtaattttgcatttgcacttagaaaatatgacatttttggattttgtatgaattttaataatcaatcattcttatgcagacctaggggtggtaatgggctctagattttatactataaaatttaagtatcgaatcgaattagaatcgagctctattcctatttattttgaactaaatctttttaagggccctaacttattgtgaagaaatatttggatcacgatccattatcgaccctatgcagaccacatatcctactcccattcctcaacgtgcatggtcaatggatgatcttccaaggacagttgcttgttcattgtcacatggatctaatgtaactagcatggattttcatccaactcgccatacactgcttctagtgggatctgctaatggtgaatttacactttatgagatcggtctgcgtcaaacattactttcaaagccctttaaaattctggatacaaatgcatgctcaccacaatttcagaatgctgttgttaaagacccccccatgtccattaatcgagttacctggagccctcatggagaattgattggagttgcattcacaaaatatttgatccgtgtatatgcatatcaaccaccaaatgagacacgacatgttctagagattgttgctcattctggaggtgtaaatgatatagcattctcacgaccaaacaagcaactttgtgtggtcacctgtggagatgataaactgataaaggtatggaatatgcatggacagaaattatttacatttgaagggcacaaggcgcctgtgtattctatatgtgcgcatcacaaacagagtattcagtttaaatttagggattatggctatggagtttctactgcgactatggcatacaatatagtgatatgcctattcaagtggaaaaaagggaggtccgcatgtggatgacttttaagtgaacaaatgttgattttagcagtatttatgttcatcttctcaacttcccttgatggaaaaattaaggcctggctttatgacaatgtgggatctagggtggactatgaagctcctggcaagtggtgtactactttgctatatagtgctgatgggactaggttgttctcatgtggaacaagcaaagagggagactcatatttggttcagtggaatgaaaatgatggatctatcaagaggacatattctggattccgtaagaggtcagctggtgttgctggtgtagtgcagtttgatatagctcagaatcacattttggctgctggtgaagataacaagattaaattttgggatgttgataataataatatgctgatctgcaccgacgctgaaggaggcctcccagctcttcctcgcttgaggttcaataaagaaggcaatcttcttgctgttactacagtggacaatggttttaagatacttgcaaatgctgatggactcagaaatctacgcgcattaggtagcaggcctcctttcgaagcatttaggctacaatacgaagatgcttctatgaaggtctcaggtgctcctgttgttgctaccatatctcctaacataggccgaatggatcacttggataggaattctcctgcaaagccatctcctatgctgactggtggcgatacagcatcaagaagcatagatataaaggcaagaatctcagaagaaaagtctgataaagcaaaagcttcggaactaatggaggttctaaatccccaacaatgccgtgtagcaacaatgccagaaactcccgatcaggctagaaaggttgtccgacttctgtacacaaattctggtgttgggttgctagcactagggtcaaacgccattcaaaggctatggaaatggagtcgaaacgagcaaaatcctagtggaaaagccacagccagtgttgtgccacaccattggcagccaaatagcggtcttgtcatgacaaatgatacatcggataccaatccagaggaggcaatcccatgcattgcactctccaagaatgattcctatgtgatgtctgcttgtggtgggaaggtttctttgtttaccatgatgacatttaaggtgctgacaacattcatgccgccaccaccagcatcaacatttttagcatttcaccctcaagataataacatcatagcaataggaatggaagattcaaccattcacatatacgatgtcagggtagataaggtaaaaactgaactcaaaggacatcaaaagaggataactgggttggcattctccaccaaccttggcgtacttgtttcttcaggcgccgatgcacagctctgtgtgtggaccaatgacacctgggaaaaaaagagaacagtctcgatacaaatgctagctgggaaggctccttcaggaaatacacgggtccagtttagttctgaccaaaatcacttgctagtagtacaagagactcaactagccatatatgatgcatcaaaaatggagaggatctatcagtggataccgcaggacacattgtcagcttccatatcccatgcatcatactcatgtaacagccagctagttttttctgccttcattgatggtaacataggtgtttttgacgcggagaacttgagattaagatgccgaattgcgcaatcggtgataaacagcaatccacatgttcaccctcttgttgtcgccgcacatccgcacgagccaaaccaatttgcggtggggctgtcagatgggttcgttaaagtgctggagccattggagtccgaaggaaaatggggaacacctgctccggtgaccaatggcacccccaacggcaagacaccagcttcgtcgactacgagtaaccctgctacggaccaaatccaaagatagattgtatttcctaagcattcttctgtaagggctagtttggcatccctatttttctaaaaaaaattattttattaaggaaattagttcatttttctttgggaaaataaaaattccttagaaaaatgctgttgccaaactagccctaaactttctaattacaccgacttatctgtatgtgcatgctgttaggatgtcattgccatttgttgaaaaaaaaagatagaataggttcaagttcaggtgtggttagttttcagatagagatctcttccagatactaccctagtttttttaaggaaaggctgtagggaaaatccctacaacatgattttgttaaataatgaaaggaaggggacaaattagatcaagaaaagaaaaatgattcaaccggctatcgagaatttagccacaaagacaccctaagcctctgaccgctattaaacctaagcatttgcaacttcagcatgtcattgaagctgtccttccaagagaggaaagaagtggcaatgttcctgaagatgaagtcgttcctttgcttccaaatgcaccaaactatcactgct

SEQ ID NO: 71697 - DNA, 4770 bp, Zea Mays
atgtcaaaacattttagagtcatatctagatttatccttaatatatttttgcaagtctttgacagatatttctatcttaaaagggttgacgcggtgcggcgggtgacagaggcgtacaaggggaggcgcctcatggtaggcgtcgacgacgtcgatctgttcaaggggatcgggctcaagtatcttgtgatggagcagctgctcgtggagcaccgggaactccgtggccgcgccgtgctggtgcagatcgccaaccctgcccgcagcgaagggcgcgacatgcagggcgtgcaggacgaggccagggccatcagcgcctgggtcaatgtgcgttttggcacccccgggtacacgtcgatcgtgctcatcgacggcccagtgacgtcgcaggagaaggccgcctactacgcagctgtcgagtgctgcttgctgagcgccgtgcgcgataggctcaactggatcccgtacatctatatggtatgccggcaggagagcaccgcgctcggagacgacgcgcccaagcggagcgccatcgtgctctctgagttcatcggttgttccccatccctcagcggtgcgatccgcgtgaacccgtggagcgtggagtccgtggcggaggccatgaacgtcgcgctgcggatgccggaggccgagcagcggttgcggcacgagaagcactacaagtacgtgagcacccacagcgtcgcctactggacgcggtccttcgactcggacctacaacatgcctgcaaggaccatttctcgcgtcggcattgggggatcgggttcggcatgagcttcaaggtggtggcccttagcccgaacttccggcggctctccgtggagcacattgtcccttcgtatcagaggacggagaaccggctgattctcctggactacgacagcaccgtgatgtcggagaattcgatcgaccggacgccgagcagtgaggtcatctctgtgttgaatcgtctgtgcgaggacccaaagaatagagtgttcatcgtgagcggacgggggaaggatgagctgagtaggtggttcacccccctgcgagaagctgggcatcgcggcggagcacggttacttcacaagggaaaatgaacagttgtctaattatggggatactaaatcagctcgaactgttatgctggttgaactaaaaaaactcattaaagccaaccctcttctccaggaaaaacttgtcttcccgactcttaaggcatcacgcctccgaactttaattaatcaaagcttgaattggcagcatcaacattgtaagaatcctcgtccaaatccagatatcaaaactttattcactgaccatacatgtactttacccaatggagctcctgcatcacgggtatctgtaccactggcagctgttccaaagccactccaacttcctccacctagtccatctttagctcgttggctgacgaatacagccgtcccttcatctgttcagtctgctgttgtagcagcctcgtcaatacctgttccacccaatcaagttgtctccatgttgaaacgcccaactataacagactatcaaagtgcagtgcctgagcaactaatgaagcgcttgaggcctggtggacatggcattggtgagaccacatatcctactcccattcctcaacgtgcatggtcaatggatgatcttccaaggacagttgcttgttcattgtcacatggatctaatgtaactagcatggattttcatccaactcgccatacactgcttctagtgggatctgctaatggtgaatttacactttatgagatcggtctgcgtcaaacattactttcaaagccctttaaaattctggatacaaatgcatgctcaccacaatttcagaatgctgttgttaaagacccccccatgtccattaatcgagttacctggagccctcatggagaattgattggagttgcattcacaaaatatttgatccgtgtatatgcatatcaaccaccaaatgagacacgacatgttctagagattgttgctcattctggaggtgtaaatgatatagcattctcacgaccaaacaagcaactttgtgtggtcacctgtggagatgataaactgataaaggtatggaatatgcatggacagaaattatttacatttgaagggcacaaggcgcctgtgtattctatatgtgcgcatcacaaacagagtattcagtttaaatttagggattatggctatggagtttctactgcgactatggcatacaatatagtgatatgcctattcaagtggaaaaaagggaggtccgcatgtggatgacttttaagtgaacaaatgttgattttagcagtatttatgttcatcttctcaacttcccttgatggaaaaattaaggcctggctttatgacaatgtgggatctagggtggactatgaagctcctggcaagtggtgtactactttgctatatagtgctgatgggactaggttgttctcatgtggaacaagcaaagagggagactcatatttggttcagtggaatgaaaatgatggatctatcaagaggacatattctggattccgtaagaggtcagctggtgttgctggtgtagtgcagtttgatatagctcagaatcacattttggctgctggtgaagataacaagattaaattttgggatgttgataataataatatgctgatctgcaccgacgctgaaggaggcctcccagctcttcctcgcttgaggttcaataaagaaggcaatcttcttgctgttactacagtggacaatggttttaagatacttgcaaatgctgatggactcagaaatctacgcgcattaggtagcaggcctcctttcgaagcatttaggctacaatacgaagatgcttctatgaaggtctcaggtgctcctgttgttgctaccatatctcctaacataggccgaatggatcacttggataggaattctcctgcaaagccatctcctatgctgactggtggcgatacagcatcaagaagcatagatataaaggcaagaatctcagaagaaaagtctgataaagcaaaagcttcggaactaatggaggttctaaatccccaacaatgccgtgtagcaacaatgccagaaactcccgatcaggctagaaaggttgtccgacttctgtacacaaattctggtgttgggttgctagcactagggtcaaacgccattcaaaggctatggaaatggagtcgaaacgagcaaaatcctagtggaaaagccacagccagtgttgtgccacaccattggcagccaaatagcggtcttgtcatgacaaatgatacatcggataccaatccagaggaggcaatcccatgcattgcactctccaagaatgattcctatgtgatgtctgcttgtggtgggaaggtttctttgtttaccatgatgacatttaaggtgctgacaacattcatgccgccaccaccagcatcaacatttttagcatttcaccctcaagataataacatcatagcaataggaatggaagattcaaccattcacatatacgatgtcagggtagataaggtaaaaactgaactcaaaggacatcaaaagaggataactgggttggcattctccaccaaccttggcgtacttgtttcttcaggcgccgatgcacagctctgtgtgtggaccaatgacacctgggaaaaaaagagaacagtctcgatacaaatgctagctgggaaggctccttcaggaaatacacgggtccagtttagttctgaccaaaatcacttgctagtagtacaagagactcaactagccatatatgatgcatcaaaaatggagaggatctatcagtggataccgcaggacacattgtcagcttccatatcccatgcatcatactcatgtaacagccagctagttttttctgccttcattgatggtaacataggtgtttttgacgcggagaacttgagattaagatgccgaattgcgcaatcggtgataaacagcaatccacatgttcaccctcttgttgtcgccgcacatccgcacgagccaaaccaatttgcggtggggctgtcagatgggttcgttaaagtgctggagccattggagtccgaaggaaaatggggaacacctgctccggtgaccaatggcacccccaacggcaagacaccagcttcgtcgactacgagtaaccctgctacggaccaaatccaaagatagattgtatttcctaagcattcttctgtaagggctagtttggcatccctatttttctaaaaaaaattattttattaaggaaattagttcatttttctttgggaaaataaaaattccttagaaaaatgctgttgccaaactagccctaaactttctaattacaccgacttatctgtatgtgcatgctgttaggatgtcattgccatttgttgaaaaaaaaagatagaataggttcaagttcaggtgtggttagttttcagatagagatctcttccagatactaccctagtttttttaaggaaaggctgtagggaaaatccctacaacatgattttgttaaataatgaaaggaaggggacaaattagatcaagaaaagaaaaatgattcaaccggctatcgagaatttagccacaaagacaccctaagcctctgaccgctattaaacctaagcatttgcaacttcagcatgtcattgaagctgtccttccaagagaggaaagaagtggcaatgttcctgaagatgaagtcgttcctttgcttccaaatgcaccaaactatcactgct

SEQ ID NO: 71698 - DNA, 887 bp, Zea Mays
gagatgaatattagagtatccaaacataagcattttgcaaaccgcgacaacaagagactaaaaaaaagcaaatttgccgtctgcaaaacccctcccacagccgtcgccccccgccagcccgcctgcgagagaagtccgcttcatccgttcgccgcctcaaggacgagatggacacatcaagccctgcagcacttgtcaatgcacagatgctgaacatgtttgttgggcgaagagtgcgcacggttgttcaagtccaacacaatgaaggtggagtgcttgtcgggcagtccaccgatggccatcagttatgtgtcaaaagtgccatggacgtccccgtttcacactttatggaggtttatggaattgctgaaaacagccagaccatccgtgctgaagtttgcacagattttggtcccaactttggtttttgatgagttgtgcaagctggcgagtggcaggttcaagcacttgttcctgtagagataatcatcgcatggaggatcttcagccaactgaagcttgtttgaaactgaatgtttcggctttaaatttaagatttggctacatgttccttcattgcatggaggaccttcagtaccctgttactcgtcattactggacttctattagcatgtataagcaacgtaggactgcgaatacaagcaaaatatgtcatgtagttgaagaacctatggtttttttctacctttaggcaatccaaccctaagctaagcaaaatatgtcatgtagttgaagaacctatggtctttttctacctttaggcaatccaaccctaagctttttatgttgctgtcgcttgcattgggaccctgagttgctacaattgtcatggagtttgatgagaggaaaaatgattctaatatgct

SEQ ID NO: 71699 - DNA, 4420 bp, Zea Mays
ggcggctctcctcgagcgcgtgcgcagcggctctcctccccacaggcagtcgtgcggcggcctcatccccgccggcgagcctccactcccctccgccggtacgcctctatcgccggtggcctccccctcggcagacagcctcgcctcgcttgcttctattgctgtgctccaccacggagccctaggtggagctacgaaccccgtgatccccgacagtgtggcaccggagctcggcggcgacagcgggcacatccccctcatgccctaggtggagcaacgaaccccaccgtgctcaacattgccccaagaatgcgactctcctcgccgcactgctctatctcggggacctcgcctagcattgccccctgccccgcgtcgacgaggtggagtccttcctcgcccgcaccttccggatgatccaggtgctactcgaggctgtatgcattgtgtgggggaataagggatatgtagctgcttacattttgaagagatttgattataccttaagcacgattgcaactgaaactttggctgtgggtgatgggttctgctattttggtatgttatcattcatctctatgatagagcagattcagaatggtgagtttggcaggggttaattgtttcaatttgttagaatttttcaaacgaaagttgtctcaatttttggatcattcttggttttatgacgaatgcccaaactacagattatctaatggtcaaactgaatatttgttttatagcaaaaaaactatctagaaaattacctctttcatgtttttgttcagcggcggtccacgcggctaccaatagggatgatacaggttttgatattcttttatttattaattggttcaattggagaattacctcaacttattgggattaatgttctttgttctttgatgaccccttgctgagtgaaaaatacctgtgtatgttacaaaataaactacttgtatgttaaaaaaagtttctccctgccattacattgacatctcaaactcctcgcacctgttgccttttggaacatatacgttataacccacattttgcattgtgatttctctactaccaacaccaattttcttagaaggctatttagcagtaatttttgtactagctacaagaaacccattctatgcaataaatatccatattacgtaggtctgcagattacggcatatgctgcaatagcaaatgacacatttgtggcatattgctttcctttcaaagctttgagaatcatgtagtcatgcattagattcacatgcaccaaatttaagctaactggaaagtgggatcatatttttttatctcgtgcaaataactattaaactgctcaagtttctttatttggtaattaattaaaattttcaaccatgtcatattgcatatcaattgccaactttttctacacagatgcacatgctcaattatgataatgtcatatggtctgtcaaccatatgtggtcaatgcaaactaaattgttttcttctttatatgttttgatttgattttttgtatttgtcactgggattatatttttctctcaacggttttgctggttgctgtttcaattcaagtctgcactgctaaggtgaatttgagtgacgagattgatttggaagattatgtttgcagaccgggtaagatcagtgttgctgatgttgagttggtttcatggcgcagaccaagatttttatgcatttgttgttttctaactattgtattgtcagggtacttttgtcctgccctagccaaagcattctccattcatttccataatactaatgctcttattcattcttacaagtaatttgtctcgcggaatacattaagatttgcatgacgtctaatagaatatgtttattgtattagtatgttggaaggggtgaaaatgaatcttggtatcttagatctgggttgcttcctgtcatagaatttggttacaatgtatcttttggtggaaatcatttttttgctatttgtgttccaaattctgcatgttgggtgagttagccaagtttgtttcatctatttatgagttctgacattgaaatgtttaccatgaacctcctcgctgacacgtcgcctcgcccccgagctgacttcctgacgccaccctcgcacaagatcccgatgtggcaatggcgaccagcgacgggcgctcaacgccaccgcgccgcctgcgaacccatggtgagaagtgtggtatcgatctagagccgaaggacttccccaacaccccttcctccatcggcgtgacatcggccagctcatctgcgacgacgaggcatcttcgaccgacttctcgacaccccatcctccatcaacgcggctccagtaccccttcctccatcggcgcagcagcatccaattcatctacgacgacaaggcatcttcgagcaaccacgccctactacaagtgccggtgtcatgcgcatgtgagatctagggagaggaagaggaggaagggttgtggggaccgggggtgcaagatggcggattcacctgcaactacaagaaaagaaagagcgagagatttacagaaaccttcagagccacggaggaggaggaggagattaggaggatctctacggcgctgacggattagttaaggaacgaaatatcacatcgtgtccggtaaccagattcagatgtgggcaccatgtgtgggtgcaaggccaggccgaggcgaaagagattcgacgattgagaatacatcaaagaataaaaatgtggaactcggattttcagatgaagagcgtgaccaagaatttcctgattttccatcatttattccattcttacctcctctgagtgcagctaacctaaaggtctactatgccacacgtttcaccatcatagttgggataatggtgttcggtggttttcttgcaccaatcgtaagtcacagttctcagttttggaaccaccgatggttattgtcatagttttgttttgccatatatagattgctttgaatgcttaccaagttgatgtgctctcatgcggctggaagttaaacttggtctaggggcacatcttatgaagactccatccgcagcgttcatctgtcgacgtagttgagatgaattctctatgcctacttctagagtgatgttcaaagaggttgacgctccttcaccatccccagctttgtggaatgggccacaggtagccatttaggatgacaaagccacaagggtgtccttcatcaaggctatgctagaagcctcagacttgtgtatgaggaaaattcataaaaatggtacacagaagctgggaagaaagtggaagaggaatttagcacttgccctctgtcagtcctaatgatgagcgttaagaacaacaccaagtcgggcagcggcaacagaggggatggggccaatgacggaggcggagaggagaacccatcgatttggtggcgtaagtgggagctcatcgaggccggtgcgtttgggcaggtctaccgcatgacttatttgcccttctagggatcagcagatcccacacctattacatgatatgtccttctagaatagaatctgctctctatcttctaaaccggtactgccttcttcaatatcagccaccggccggtccacctcttcaataatcgtccttcatcgcccttcagttgacctgagatctagaaggacacaacaggcaaggtggatgtattcgtagttgattatatgttaaaagcaaatttcggatgacattggtggagattgcttatctctaagacacatctactcattctttgaatggaaatcacatccacgttctagaaagtctatttttacttcaaaaattattacattgtggtgttcgacttcttcagtcaagcagcaatcatgcaacatgccttactgtagttttttatcactgcacatgttgctggataaatttatagactggaggattatagaggactaacaagtgctactgggagattctcgagcaccattgaactaagagattccaaatagttctttggagtctattgttgatgttggcggggataatctagcagagatttgtcagattttttgtgcaacacggaggctacatgaggcagcaacgatcccattcttctcgcatgccactttacacaagctaaggatagcttctggtctcactcatggttgtggcagggaaagccgagtcagtagggtttgtcatgtagctggagttatctcagaccgcatattagatgcagtgatgatgtttacatttaccgtgcaagcaagatgacttatattatgccttaggacaataagtattgttttcactctaatgaaatacttggtaaaaagttgtctctgtagttgtatatttgactgtgaatatttgaacccactattataattgttgctaattgaggtcagatttcagaggccaaataattct

SEQ ID NO: 71700 - DNA, 4480 bp, Zea Mays
ggcggctctcctcgagcgcgtgcgcagcggctctcctccccacaggcagtcgtgcggcggcctcatccccgccggcgagcctccactcccctccgccggtacgcctctatcgccggtggcctccccctcggcagacagcctcgcctcgcttgcttctattgctgtgctccaccacggagccctaggtggagctacgaaccccgtgatccccgacagtgtggcaccggagctcggcggcgacagcgggcacatccccctcatgccctaggtggagcaacgaaccccaccgtgctcaacattgccccaagaatgcgactctcctcgccgcactgctctatctcggggacctcgcctagcattgccccctgccccgcgtcgacgaggtggagtccttcctcgcccgcaccttccggatgatccaggtgctactcgaggctgtatgcattgtgtgggggaataagggatatgtagctgcttacattttgaagagatttgattataccttaagcacgattgcaactgaaactttggctgtgggtgatgggttctgctattttggtatgttatcattcatctctatgatagagcagattcagaatggtgagtttggcaggggttaattgtttcaatttgttagaatttttcaaacgaaagttgtctcaatttttggatcattcttggttttatgacgaatgcccaaactacagattatctaatggtcaaactgaatatttgttttatagcaaaaaaactatctagaaaattacctctttcatgtttttgttcagcggcggtccacgcggctaccaatagggatgatacaggttttgatattcttttatttattaattggttcaattggagaattacctcaacttattgggattaatgttctttgttctttgatgaccccttgctgagtgaaaaatacctgtgtatgttacaaaataaactacttgtatgttaaaaaaagtttctccctgccattacattgacatctcaaactcctcgcacctgttgccttttggaacatatacgttataacccacattttgcattgtgatttctctactaccaacaccaattttcttagaaggctatttagcagtaatttttgtactagctacaagaaacccattctatgcaataaatatccatattacgtaggtctgcagattacggcatatgctgcaatagcaaatgacacatttgtggcatattgctttcctttcaaagctttgagaatcatgtagtcatgcattagattcacatgcaccaaatttaagctaactggaaagtgggatcatatttttttatctcgtgcaaataactattaaactgctcaagtttctttatttggtaattaattaaaattttcaaccatgtcatattgcatatcaattgccaactttttctacacagatgcacatgctcaattatgataatgtcatatggtctgtcaaccatatgtggtcaatgcaaactaaattgttttcttctttatatgttttgatttgattttttgtatttgtcactgggattatatttttctctcaacggttttgctggttgctgtttcaattcaagtctgcactgctaaggtgaatttgagtgacgagattgatttggaagattatgtttgcagaccgggtaagatcagtgttgctgatgttgagttggtttcatggcgcagaccaagatttttatgcatttgttgttttctaactattgtattgtcagggtacttttgtcctgccctagccaaagcattctccattcatttccataatactaatgctcttattcattcttacaagtaatttgtctcgcggaatacattaagatttgcatgacgtctaatagaatatgtttattgtattagtatgttggaaggggtgaaaatgaatcttggtatcttagatctgggttgcttcctgtcatagaatttggttacaatgtatcttttggtggaaatcatttttttgctatttgtgttccaaattctgcatgttgggtgagttagccaagtttgtttcatctatttatgagttctgacattgaaatgtttaccatgaacctcctcgctgacacgtcgcctcgcccccgagctgacttcctgacgccaccctcgcacaagatcccgatgtggcaatggcgaccagcgacgggcgctcaacgccaccgcgccgcctgcgaacccatggtgagaagtgtggtatcgatctagagccgaaggacttccccaacaccccttcctccatcggcgtgacatcggccagctcatctgcgacgacgaggcatcttcgaccgacttctcgacaccccatcctccatcaacgcggctccagtaccccttcctccatcggcgcagcagcatccaattcatctacgacgacaaggcatcttcgagcaaccacgccctactacaagtggtgttagtccatctcagataagtggagtaatttgtttgtatctgtatcttctattttatttcttccctaatcctgattaatagcctaatcacgcgacaactaatacatgtcgatttctttccttagccggtgtcatgcgcatgtgagatctagggagaggaagaggaggaagggttgtggggaccgggggtgcaagatggcggattcacctgcaactacaagaaaagaaagagcgagagatttacagaaaccttcagagccacggaggaggaggaggagattaggaggatctctacggcgctgacggattagttaaggaacgaaatatcacatcgtgtccggtaaccagattcagatgtgggcaccatgtgtgggtgcaaggccaggccgaggcgaaagagattcgacgattgagaatacatcaaagaataaaaatgtggaactcggattttcagatgaagagcgtgaccaagaatttcctgattttccatcatttattccattcttacctcctctgagtgcagctaacctaaaggtctactatgccacacgtttcaccatcatagttgggataatggtgttcggtggttttcttgcaccaatcgtaagtcacagttctcagttttggaaccaccgatggttattgtcatagttttgttttgccatatatagattgctttgaatgcttaccaagttgatgtgctctcatgcggctggaagttaaacttggtctaggggcacatcttatgaagactccatccgcagcgttcatctgtcgacgtagttgagatgaattctctatgcctacttctagagtgatgttcaaagaggttgacgctccttcaccatccccagctttgtggaatgggccacaggtagccatttaggatgacaaagccacaagggtgtccttcatcaaggctatgctagaagcctcagacttgtgtatgaggaaaattcataaaaatggtacacagaagctgggaagaaagtggaagaggaatttagcacttgccctctgtcagtcctaatgatgagcgttaagaacaacaccaagtcgggcagcggcaacagaggggatggggccaatgacggaggcggagaggagaacccatcgatttggtggcgtaagtgggagctcatcgaggccggtgcgtttgggcaggtctaccgcatgacttatttgcccttctagggatcagcagatcccacacctattacatgatatgtccttctagaatagaatctgctctctatcttctaaaccggtactgccttcttcaatatcagccaccggccggtccacctcttcaataatcgtccttcatcgcccttcagttgacctgagatctagaaggacacaacagaggggcgagggttgttcagtgctttgacatgtgtgcaactattcaagcacaatggttagatgatatccccattcattttagattattacattgtggtgttcgacttcttcagtcaagcagcaatcatgcaacatgccttactgtagttttttatcactgcacatgttgctggataaatttatagactggaggattatagaggactaacaagtgctactgggagattctcgagcaccattgaactaagagattccaaatagttctttggagtctattgttgatgttggcggggataatctagcagagatttgtcagattttttgtgcaacacggaggctacatgaggcagcaacgatcccattcttctcgcatgccactttacacaagctaaggatagcttctggtctcactcatggttgtggcagggaaagccgagtcagtagggtttgtcatgtagctggagttatctcagaccgcatattagatgcagtgatgatgtttacatttaccgtgcaagcaagatgacttatattatgccttaggacaataagtattgttttcactctaatgaaatacttggtaaaaagttgtctctgtagttgtatatttgactgtgaatatttgaacccactattataattgttgctaattgaggtcagatttcagaggccaaataattct

SEQ ID NO: 71701 - DNA, 4677 bp, Zea Mays
ggcggctctcctcgagcgcgtgcgcagcggctctcctccccacaggcagtcgtgcggcggcctcatccccgccggcgagcctccactcccctccgccggtacgcctctatcgccggtggcctccccctcggcagacagcctcgcctcgcttgcttctattgctgtgctccaccacggagccctaggtggagctacgaaccccgtgatccccgacagtgtggcaccggagctcggcggcgacagcgggcacatccccctcatgccctaggtggagcaacgaaccccaccgtgctcaacattgccccaagaatgcgactctcctcgccgcactgctctatctcggggacctcgcctagcattgccccctgccccgcgtcgacgaggtggagtccttcctcgcccgcaccttccggatgatccagcggcggtccacgcggctaccaatagggatgatacagatcccgatgtggcaatggcgaccagcgacgggcgctcaacgccaccgcgccgcctgcgaacccatggtgagaagtgtggtatcgatctagagccgaaggacttccccaacaccccttcctccatcggcgtgacatcggccagctcatctgcgacgacgaggcatcttcgaccgacttctcgacaccccatcctccatcaacgcggctccagtaccccttcctccatcggcgcagcagcatccaattcatctacgacgacaaggcatcttcgagcaaccacgccctactacaagtggtgttagtccatctcagataagtggagtaatttgtttgtatctgtatcttctattttatttcttccctaatcctgattaatagcctaatcacgcgacaactaatacatgtcgatttctttccttagccggtgtcatgcgcatgtgagatctagggagaggaagaggaggaagggttgtggggaccgggggtgcaagatggcggattcacctgcaactacaagaaaagaaagagcgagagatttacagaaaccttcagagccacggaggaggaggaggagattaggaggatctctacggcgctgacggattagttaaggaacgaaatatcacatcgtgtccggtaaccagattcagatgtgggcaccatgtgtgggtgcaaggccaggccgaggcgaaagagattcgacgattgagaatacatcaaagaataaaaatgtggaactcggattttcagatgaagagcgtgaccaagaatttcctgattttccatcatttattccattcttacctcctctgagtgcagctaacctaaaggtctactatgccacacgtttcaccatcatagttgggataatggtgttcggtggttttcttgcaccaatcgtaagtcacagttctcagttttggaaccaccgatggttattgtcatagttttgttttgccatatatagattgctttgaatgcttaccaagttgatgtgctctcatgcggctggaagttaaacttggtctaggggcacatcttatgaagactccatccgcagcgttcatctgtcgacgtagttgagatgaattctctatgcctacttctagagtgatgttcaaagaggttgacgctccttcaccatccccagctttgtggaatgggccacaggtagccatttaggatgacaaagccacaagggtgtccttcatcaaggctatgctagaagcctcagacttgtgtatgaggaaaattcataaaaatggtacacagaagctgggaagaaagtggaagaggaatttagcacttgccctctgtcagtcctaatgatgagcgttaagaacaacaccaagtcgggcagcggcaacagaggggatggggccaatgacggaggcggagaggagaacccatcgatttggtggcgtaagtgggagctcatcgaggccggtgcgtttgggcaggtctaccgcatgacttatttgcccttctagggatcagcagatcccacacctattacatgatatgtccttctagaatagaatctgctctctatcttctaaaccggtactgccttcttcaatatcagccaccggccggtccacctcttcaataatcgtccttcatcgcccttcagttgtgagttgtgacatactatttatattcggatatgatctattacaaatatacatgcatattatagggtgtgcatctgtatacccatgttctttacaaggtccgtccttaggtgatatgagtagtaagtctaaacttgcttcttaccaagagttaggctgtatgtgtgtatgtatttttttagtacaatagtattcaaaatgtatgaggactctttctttttgattgttttgaacaatgggcgtatgaaccggtggaagaacaattcatttgatagttgtttgtgtccaaaatggaactaaatctaaaatttgtggagcaaaccactcaatccagatctctatttaatcaaacattttttttgttatgatgcagttccacacgtgaaatagccatatggatatgtaacaacataaatttgttcagtgggaaataagtttctataatacatttatgcacccaggtgacaagaaaaaaatattttgtcatttctataaaacatgatgcattttttctcaattcatagtgtgatgttattcctcttttgcctttagagaagcccataatacaaatggataagaagtcaccaaacatttctaaatcactggtcttcatccagtgacaacctttagtgtcgagctggtgtttgtgcttgagctttagtatgtctgcaacaagcctttaggaatgtcgatatgctcatatgcttagttgtgcatgagtatttttgttgcaaggtttagatgcagtgttctggtctttagtgcatgtattttatagaatataacacttctatattgtagaatgcaatctgatagtttacatagaaactgataaacttgattgatccttggcattatagtacaaaaagtgcaataccttgtgaattaattttgtacctcattgtcatttacgggttaactgtccatacattgtattacatgttttctacaacctgttcttatttctcaacgaacagtagcaatcattggtcaggacatgtagcttcatttgttaggacatgtagcttaatgctatcttgttgttttctactgttcataaacgcaggacctgagatctagaaggacacaacaggcaaggtggatgtattcgtagttgattatatgttaaaagcaaatttcggatgacattggtggagattgcttatctctaagacacatctactcattctttgaatggaaatcacatccacgttctagaaagtctatttttacttcaaaagtactccttctgttccaaataaattagtgttagcatctctgcactctattgcccacttcccccctcatcggtgttttttattgttgcatatcaattttgtggctcaaatgcccctttgaaacatatagcaccaaaattatcctaattaattaattggtttctaactggctactctatttgcaacaatggggatatataaccttaccatgtctgtttatcacagtgcatcttagattgcatcgtattgtaattgttttagttccttgacatactgtttgtgcaacaggaactgcttgatgtacttacggttgggtatctgtgtagatgtagctgccaagttgtctaaagaaaagttcctgacctttcacatgctgccacattgccacaataccttaagagcttttctatacttctatgatttgtgttttcgagatctgagttatttaaatgttgtctgctattttgaatttttatatgaagatcaaagttctcaagtgataaagtaattaatataacaagcggacaacacatagacaaactaattaatgtagcatatagacgaataaggaatcctgaaacattgaccgtgaagaaaattattgtgcacatatgcactctttctccaaaatttggcatttaatcttattgcaacatacttgtacagaggggcgagggttgttcagtgctttgacatgtgtgcaactattcaagcacaatggttagatgatatccccattcattttagattattacattgtggtgttcgacttcttcagtcaagcagcaatcatgcaacatgccttactgtagttttttatcactgcacatgttgctggataaatttatagactggaggattatagaggactaacaagtgctactgggagattctcgagcaccattgaactaagagattccaaatagttctttggagtctattgttgatgttggcggggataatctagcagagatttgtcagattttttgtgcaacacggaggctacatgaggcagcaacgatcccattcttctcgcatgccactttacacaagctaaggatagcttctggtctcactcatggttgtggcagggaaagccgagtcagtagggtttgtcatgtagctggagttatctcagaccgcatattagatgcagtgatgatgtttacatttaccgtgcaagcaagatgacttatattatgccttaggacaataagtattgttttcactctaatgaaatacttggtaaaaagttgtctctgtagttgtatatttgactgtgaatatttgaacccactattataattgttgctaattgaggtcagatttcagaggccaaataattct

SEQ ID NO: 71702 - DNA, 4143 bp, Zea Mays
ggcggctctcctcgagcgcgtgcgcagcggctctcctccccacaggcagtcgtgcggcggcctcatccccgccggcgagcctccactcccctccgccggtacgcctctatcgccggtggcctccccctcggcagacagcctcgcctcgcttgcttctattgctgtgctccaccacggagccctaggtggagctacgaaccccgtgatccccgacagtgtggcaccggagctcggcggcgacagcgggcacatccccctcatgccctaggtggagcaacgaaccccaccgtgctcaacattgccccaagaatgcgactctcctcgccgcactgctctatctcggggacctcgcctagcattgccccctgccccgcgtcgacgaggtggagtccttcctcgcccgcaccttccggatgatccagcggcggtccacgcggctaccaatagggatgatacagatcccgatgtggcaatggcgaccagcgacgggcgctcaacgccaccgcgccgcctgcgaacccatggtgagaagtgtggtatcgatctagagccgaaggacttccccaacaccccttcctccatcggcgtgacatcggccagctcatctgcgacgacgaggcatcttcgaccgacttctcgacaccccatcctccatcaacgcggctccagtaccccttcctccatcggcgcagcagcatccaattcatctacgacgacaaggcatcttcgagcaaccacgccctactacaagtggtgttagtccatctcagataagtggagtaatttgtttgtatctgtatcttctattttatttcttccctaatcctgattaatagcctaatcacgcgacaactaatacatgtcgatttctttccttagccggtgtcatgcgcatgtgagatctagggagaggaagaggaggaagggttgtggggaccgggggtgcaagatggcggattcacctgcaactacaagaaaagaaagagcgagagatttacagaaaccttcagagccacggaggaggaggaggagattaggaggatctctacggcgctgacggattagttaaggaacgaaatatcacatcgtgtccggtaaccagattcagatgtgggcaccatgtgtgggtgcaaggccaggccgaggcgaaagagattcgacgattgagaatacatcaaagaataaaaatgtggaactcggattttcagatgaagagcgtgaccaagaatttcctgattttccatcatttattccattcttacctcctctgagtgcagctaacctaaaggtctactatgccacacgtttcaccatcatagttgggataatggtgttcggtggttttcttgcaccaatcttaaacttggtctaggggcacatcttatgaagactccatccgcagcgttcatctgtcgacgtagttgagaagtgcactcaggttatacatccagtaaagagcaagacatttgaaagcttatgggccaactgtgttgctattgatgcaagcgaaagttggctgatgaattctctatgcctacttctagagtgatgttcaaagaggttgacgctccttcaccatccccagctttgtggaatgggccacaggtagccatttaggatgacaaagccacaagggtgtccttcatcaaggctatgctagaagcctcagacttgtgtatgaggaaaattcataaaaatggtacacagaagctgggaagaaagtggaagaggaatttagcacttgccctctgtcagtcctaatgatgagcgttaagaacaacaccaagtcgggcagcggcaacagaggggatggggccaatgacggaggcggagaggagaacccatcgatttggtggcgtaagtgggagctcatcgaggccgccaccggccggtccacctcttcaataatcgtccttcatcgcccttcagttttccacacgtgaaatagccatatggatatgtaacaacataaatttgttcagtgggaaataagtttctataatacatttatgcacccaggtgacaagaaaaaaatattttgtcatttctataaaacatgatgcattttttctcaattcatagtgtgatgttattcctcttttgcctttagagaagcccataatacaaatggataagaagtcaccaaacatttctaaatcactggtcttcatccagtgacaacctttagtgtcgagctggtgtttgtgcttgagctttagtatgtctgcaacaagcctttaggaatgtcgatatgctcatatgcttagttgtgcatgagtatttttgttgcaaggtttagatgcagtgttctggtctttagtgcatgtattttatagaatataacacttctatattgtagaatgcaatctgatagtttacatagaaactgataaacttgattgatccttggcattatagtacaaaaagtgcaataccttgtgaattaattttgtacctcattgtcatttacgggttaactgtccatacattgtattacatgttttctacaacctgttcttatttctcaacgaacagtagcaatcattggtcaggacatgtagcttcatttgttaggacatgtagcttaatgctatcttgttgttttctactgttcataaacgcaggacctgagatctagaaggacacaacaggcaaggtggatgtattcgtagttgattatatgttaaaagcaaatttcggatgacattggtggagattgcttatctctaagacacatctactcattctttgaatggaaatcacatccacgttctagaaagtctatttttacttcaaaagtactccttctgttccaaataaattagtgttagcatctctgcactctattgcccacttcccccctcatcggtgttttttattgttgcatatcaattttgtggctcaaatgcccctttgaaacatatagcaccaaaattatcctaattaattaattggtttctaactggctactctatttgcaacaatggggatatataaccttaccatgtctgtttatcacagtgcatcttagattgcatcgtattgtaattgttttagttccttgacatactgtttgtgcaacaggaactgcttgatgtacttacggttgggtatctgtgtagatgtagctgccaagttgtctaaagaaaagttcctgacctttcacatgctgccacattgccacaataccttaagagcttttctatacttctatgatttgtgttttcgagatctgagttatttaaatgttgtctgctattttgaatttttatatgaagatcaaagttctcaagtgataaagtaattaatataacaagcggacaacacatagacaaactaattaatgtagcatatagacgaataaggaatcctgaaacattgaccgtgaagaaaattattgtgcacatatgcactctttctccaaaatttggcatttaatcttattgcaacatacttgtacagaggggcgagggttgttcagtgctttgacatgtgtgcaactattcaagcacaatggttagatgatatccccattcattttagattattacattgtggtgttcgacttcttcagtcaagcagcaatcatgcaacatgccttactgtagttttttatcactgcacatgttgctggataaatttatagactggaggattatagaggactaacaagtgctactgggagattctcgagcaccattgaactaagagattccaaatagttctttggagtctattgttgatgttggcggggataatctagcagagatttgtcagattttttgtgcaacacggaggctacatgaggcagcaacgatcccattcttctcgcatgccactttacacaagctaaggatagcttctggtctcactcatggttgtggcagggaaagccgagtcagtagggtttgtcatgtagctggagttatctcagaccgcatattagatgcagtgatgatgtttacatttaccgtgcaagcaagatgacttatattatgccttaggacaataagtattgttttcactctaatgaaatacttggtaaaaagttgtctctgtagttgtatatttgactgtgaatatttgaacccactattataattgttgctaattgaggtcagatttcagaggccaaataattct

SEQ ID NO: 71703 - DNA, 4589 bp, Zea Mays
ggcggctctcctcgagcgcgtgcgcagcggctctcctccccacaggcagtcgtgcggcggcctcatccccgccggcgagcctccactcccctccgccggtacgcctctatcgccggtggcctccccctcggcagacagcctcgcctcgcttgcttctattgctgtgctccaccacggagccctaggtggagctacgaaccccgtgatccccgacagtgtggcaccggagctcggcggcgacagcgggcacatccccctcatgccctaggtggagcaacgaaccccaccgtgctcaacattgccccaagaatgcgactctcctcgccgcactgctctatctcggggacctcgcctagcattgccccctgccccgcgtcgacgaggtggagtccttcctcgcccgcaccttccggatgatccaggtgctactcgaggctgtatgcattgtgtgggggaataagggatatgtagctgcttacattttgaagagatttgattataccttaagcacgattgcaactgaaactttggctgtgggtgatgggttctgctattttggtatgttatcattcatctctatgatagagcagattcagaatggtgagtttggcaggggttaattgtttcaatttgttagaatttttcaaacgaaagttgtctcaatttttggatcattcttggttttatgacgaatgcccaaactacagattatctaatggtcaaactgaatatttgttttatagcaaaaaaactatctagaaaattacctctttcatgtttttgttcagcggcggtccacgcggctaccaatagggatgatacaggttttgatattcttttatttattaattggttcaattggagaattacctcaacttattgggattaatgttctttgttctttgatgaccccttgctgagtgaaaaatacctgtgtatgttacaaaataaactacttgtatgttaaaaaaagtttctccctgccattacattgacatctcaaactcctcgcacctgttgccttttggaacatatacgttataacccacattttgcattgtgatttctctactaccaacaccaattttcttagaaggctatttagcagtaatttttgtactagctacaagaaacccattctatgcaataaatatccatattacgtaggtctgcagattacggcatatgctgcaatagcaaatgacacatttgtggcatattgctttcctttcaaagctttgagaatcatgtagtcatgcattagattcacatgcaccaaatttaagctaactggaaagtgggatcatatttttttatctcgtgcaaataactattaaactgctcaagtttctttatttggtaattaattaaaattttcaaccatgtcatattgcatatcaattgccaactttttctacacagatgcacatgctcaattatgataatgtcatatggtctgtcaaccatatgtggtcaatgcaaactaaattgttttcttctttatatgttttgatttgattttttgtatttgtcactgggattatatttttctctcaacggttttgctggttgctgtttcaattcaagtctgcactgctaaggtgaatttgagtgacgagattgatttggaagattatgtttgcagaccgggtaagatcagtgttgctgatgttgagttggtttcatggcgcagaccaagatttttatgcatttgttgttttctaactattgtattgtcagggtacttttgtcctgccctagccaaagcattctccattcatttccataatactaatgctcttattcattcttacaagtaatttgtctcgcggaatacattaagatttgcatgacgtctaatagaatatgtttattgtattagtatgttggaaggggtgaaaatgaatcttggtatcttagatctgggttgcttcctgtcatagaatttggttacaatgtatcttttggtggaaatcatttttttgctatttgtgttccaaattctgcatgttgggtgagttagccaagtttgtttcatctatttatgagttctgacattgaaatgtttaccatgaacctcctcgctgacacgtcgcctcgcccccgagctgacttcctgacgccaccctcgcacaagatcccgatgtggcaatggcgaccagcgacgggcgctcaacgccaccgcgccgcctgcgaacccatggtgagaagtgtggtatcgatctagagccgaaggacttccccaacaccccttcctccatcggcgtgacatcggccagctcatctgcgacgacgaggcatcttcgaccgacttctcgacaccccatcctccatcaacgcggctccagtaccccttcctccatcggcgcagcagcatccaattcatctacgacgacaaggcatcttcgagcaaccacgccctactacaagtggtgttagtccatctcagataagtggagtaatttgtttgtatctgtatcttctattttatttcttccctaatcctgattaatagcctaatcacgcgacaactaatacatgtcgatttctttccttagccggtgtcatgcgcatgtgagatctagggagaggaagaggaggaagggttgtggggaccgggggtgcaagatggcggattcacctgcaactacaagaaaagaaagagcgagagatttacagaaaccttcagagccacggaggaggaggaggagattaggaggatctctacggcgctgacggattagttaaggaacgaaatatcacatcgtgtccggtaaccagattcagatgtgggcaccatgtgtgggtgcaaggccaggccgaggcgaaagagattcgacgattgagaatacatcaaagaataaaaatgtggaactcggattttcagatgaagagcgtgaccaagaatttcctgattttccatcatttattccattcttacctcctctgagtgcagctaacctaaaggtctactatgccacacgtttcaccatcatagttgggataatggtgttcggtggttttcttgcaccaatcgggcacatcttatgaagactccatccgcagcgttcatctgtcgacgtagttgagaagtgcactcaggttatacatccagtaaagagcaagacatttgaaagcttatgggccaactgtgttgctattgatgcaagcgaaagttggctgatgaattctctatgcctacttctagagtgatgttcaaagaggttgacgctccttcaccatccccagctttgtggaatgggccacaggtagccatttaggatgacaaagccacaagggtgtccttcatcaaggctatgctagaagcctcagacttgtgtatgaggaaaattcataaaaatggtacacagaagctgggaagaaagtggaagaggaatttagcacttgccctctgtcagtcctaatgatgagcgttaagaacaacaccaagtcgggcagcggcaacagaggggatggggccaatgacggaggcggagaggagaacccatcgatttggtggcgtaagtgggagctcatcgaggccggtgcgtttgggcaggtctaccgcatgacttatttgcccttctagggatcagcagatcccacacctattacatgatatgtccttctagaatagaatctgctctctatcttctaaaccggtactgccttcttcaatatcagccaccggccggtccacctcttcaataatcgtccttcatcgcccttcagttgacctgagatctagaaggacacaacaggcaaggtggatgtattcgtagttgattatatgttaaaagcaaatttcggatgacattggtggagattgcttatctctaagacacatctactcattctttgaatggaaatcacatccacgttctagaaagtctatttttacttcaaaaaggggcgagggttgttcagtgctttgacatgtgtgcaactattcaagcacaatggttagatgatatccccattcattttagattattacattgtggtgttcgacttcttcagtcaagcagcaatcatgcaacatgccttactgtagttttttatcactgcacatgttgctggataaatttatagactggaggattatagaggactaacaagtgctactgggagattctcgagcaccattgaactaagagattccaaatagttctttggagtctattgttgatgttggcggggataatctagcagagatttgtcagattttttgtgcaacacggaggctacatgaggcagcaacgatcccattcttctcgcatgccactttacacaagctaaggatagcttctggtctcactcatggttgtggcagggaaagccgagtcagtagggtttgtcatgtagctggagttatctcagaccgcatattagatgcagtgatgatgtttacatttaccgtgcaagcaagatgacttatattatgccttaggacaataagtattgttttcactctaatgaaatacttggtaaaaagttgtctctgtagttgtatatttgactgtgaatatttgaacccactattataattgttgctaattgaggtcagatttcagaggccaaataattct

SEQ ID NO: 71704 - DNA, 3274 bp, Zea Mays
catccccctcatgccctaggtggagcaacgaaccccgcgaggtcgtcctcaccctcggcctatggtggcagaccgtgctcaacattgccccaagaatgcgactctcctcgccgcactgctctatctcggggacctcgcctagcattgccccctgccccgcgtcgacgaggtggagtccttcctcgcccgcaccttccggatgatccaggtgctactcgaggctgtatgcattgtgtgggggaataagggatatgtagctgcttacattttgaagagatttgattataccttaagcacgattgcaactgaaactttggctgtgggtgatgggttctgctattttggtatgttatcattcatctctatgatagagcagattcagaatggtgagtttggcaggggttaattgtttcaatttgttagaatttttcaaacgaaagttgtctcaatttttggatcattcttggttttatgacgaatgcccaaactacagattatctaatggtcaaactgaatatttgttttatagcaaaaaaactatctagaaaattacctctttcatgtttttgttcagcggcggtccacgcggctaccaatagggatgatacaggttttgatattcttttatttattaattggttcaattggagaattacctcaacttattgggattaatgttctttgttctttgatgaccccttgctgagtgaaaaatacctgtgtatgttacaaaataaactacttgtatgttaaaaaaagtttctccctgccattacattgacatctcaaactcctcgcacctgttgccttttggaacatatacgttataacccacattttgcattgtgatttctctactaccaacaccaattttcttagaaggctatttagcagtaatttttgtactagctacaagaaacccattctatgcaataaatatccatattacgtaggtctgcagattacggcatatgctgcaatagcaaatgacacatttgtggcatattgctttcctttcaaagctttgagaatcatgtagtcatgcattagattcacatgcaccaaatttaagctaactggaaagtgggatcatatttttttatctcgtgcaaataactattaaactgctcaagtttctttatttggtaattaattaaaattttcaaccatgtcatattgcatatcaattgccaactttttctacacagatgcacatgctcaattatgataatgtcatatggtctgtcaaccatatgtggtcaatgcaaactaaattgttttcttctttatatgttttgatttgattttttgtatttgtcactgggattatatttttctctcaacggttttgctggttgctgtttcaattcaagtctgcactgctaaggtgaatttgagtgacgagattgatttggaagattatgtttgcagaccgggtaagatcagtgttgctgatgttgagttggtttcatggcgcagaccaagatttttatgcatttgttgttttctaactattgtattgtcagggtacttttgtcctgccctagccaaagcattctccattcatttccataatactaatgctcttattcattcttacaagtaatttgtctcgcggaatacattaagatttgcatgacgtctaatagaatatgtttattgtattagtatgttggaaggggtgaaaatgaatcttggtatcttagatctgggttgcttcctgtcatagaatttggttacaatgtatcttttggtggaaatcatttttttgctatttgtgttccaaattctgcatgttgggtgagttagccaagtttgtttcatctatttatgagttctgacattgaaatgtttaccatgaacctcctcgctgacacgtcgcctcgcccccgagctgacttcctgacgccaccctcgcacaagatcccgatgtggcaatggcgaccagcgacgggcgctcaacgccaccgcgccgcctgcgaacccatggtgagaagtgtggtatcgatctagagccgaaggacttccccaacaccccttcctccatcggcgtgacatcggccagctcatctgcgacgacgaggcatcttcgaccgacttctcgacaccccatcctccatcaacgcggctccagtaccccttcctccatcggcgcagcagcatccaattcatctacgacgacaaggcatcttcgagcaaccacgccctactacaagtggtgttagtccatctcagataagtggagtaatttgtttgtatctgtatcttctattttatttcttccctaatcctgattaatagcctaatcacgcgacaactaatacatgtcgatttctttccttagccggtgtcatgcgcatgtgagatctagggagaggaagaggaggaagggttgtggggaccgggggtgcaagatggcggattcacctgcaactacaagaaaagaaagagcgagagatttacagaaaccttcagagccacggaggaggaggaggagattaggaggatctctacggcgctgacggattagttaaggaacgaaatatcacatcgtgtccggtaaccagattcagatgtgggcaccatgtgtgggtgcaaggccaggccgaggcgaaagagattcgacgattgagaatacatcaaagaataaaaatgtggaactcggattttcagatgaagagcgtgaccaagaatttcctgattttccatcatttattccattcttacctcctctgagtgcagctaacctaaaggtctactatgccacacgtttcaccatcatagttgggataatggtgttcggtggttttcttgcaccaatcttaaacttggtctaggggcacatcttatgaagactccatccgcagcgttcatctgtcgacgtagttgagaagtgcactcaggttatacatccagtaaagagcaagacatttgaaagcttatgggccaactgtgttgctattgatgcaagcgaaagttggctgatgaattctctatgcctacttctagagtgatgttcaaagaggttgacgctccttcaccatccccagctttgtggaatgggccacaggtagccatttaggatgacaaagccacaagggtgtccttcatcaaggctatgctagaagcctcagacttgtgtatgaggaaaattcataaaaatggtacacagaagctgggaagaaagtggaagaggaatttagcacttgccctctgtcagtcctaatgatgagcgttaagaacaacaccaagatactgaaagcaaacatggctt

SEQ ID NO: 71705 - DNA, 2966 bp, Zea Mays
ggagtccttcctcgcccgcaccttccggatgatccagtctgcactgctaaggtgaatttgagtgacgagattgatttggaagattatgtttgcagaccggatcccgatgtggcaatggcgaccagcgacgggcgctcaacgccaccgcgccgcctgcgaacccatggtgagaagtgtggtatcgatctagagccgaaggacttccccaacaccccttcctccatcggcgtgacatcggccagctcatctgcgacgacgaggcatcttcgaccgacttctcgacaccccatcctccatcaacgcggctccagtaccccttcctccatcggcgcagcagcatccaattcatctacgacgacaaggcatcttcgagcaaccacgccctactacaagtgccggtgtcatgcgcatgtgagatctagggagaggaagaggaggaagggttgtggggaccgggggtgcaagatggcggattcacctgcaactacaagaaaagaaagagcgagagatttacagaaaccttcagagccacggaggaggaggaggagattaggaggatctctacggcgctgacggattagttaaggaacgaaatatcacatcgtgtccggtaaccagattcagatgtgggcaccatgtgtgggtgcaaggccaggccgaggcgaaagagattcgacgattgagaatacatcaaagaataaaaatgtggaactcggattttcagatgaagagcgtgaccaagaatttcctgattttccatcatttattccattcttacctcctctgagtgcagctaacctaaaggtctactatgccacacgtttcaccatcatagttgggataatggtgttcggtggttttcttgcaccaatcttaaacttggtctaggggcacatcttatgaagactccatccgcagcgttcatctgtcgacgtagttgagaagtgcactcaggttatacatccagtaaagagcaagacatttgaaagcttatgggccaactgtgttgctattgatgcaagcgaaagttggctgatgaattctctatgcctacttctagagtgatgttcaaagaggttgacgctccttcaccatccccagctttgtggaatgggccacaggtagccatttaggatgacaaagccacaagggtgtccttcatcaaggctatgctagaagcctcagacttgtgtatgaggaaaattcataaaaatggtacacagaagctgggaagaaagtggaagaggaatttagcacttgccctctgtcagtcctaatgatgagcgttaagaacaacaccaagtcgggcagcggcaacagaggggatggggccaatgacggaggcggagaggagaacccatcgatttggtggcgtaagtgggagctcatcgaggccgccaccggccggtccacctcttcaataatcgtccttcatcgcccttcagttgacctgagatctagaaggacacaacaggcaaggtggatgtattcgtagttgattatatgttaaaagcaaatttcggatgacattggtggagattgcttatctctaagacacatctactcattctttgaatggaaatcacatccacgttctagaaagtctatttttacttcaaaagtactccttctgttccaaataaattagtgttagcatctctgcactctattgcccacttcccccctcatcggtgttttttattgttgcatatcaattttgtggctcaaatgcccctttgaaacatatagcaccaaaattatcctaattaattaattggtttctaactggctactctatttgcaacaatggggatatataaccttaccatgtctgtttatcacagtgcatcttagattgcatcgtattgtaattgttttagttccttgacatactgtttgtgcaacaggaactgcttgatgtacttacggttgggtatctgtgtagatgtagctgccaagttgtctaaagaaaagttcctgacctttcacatgctgccacattgccacaataccttaagagcttttctatacttctatgatttgtgttttcgagatctgagttatttaaatgttgtctgctattttgaatttttatatgaagatcaaagttctcaagtgataaagtaattaatataacaagcggacaacacatagacaaactaattaatgtagcatatagacgaataaggaatcctgaaacattgaccgtgaagaaaattattgtgcacatatgcactctttctccaaaatttggcatttaatcttattgcaacatacttgtacagaggggcgagggttgttcagtgctttgacatgtgtgcaactattcaagcacaatggttagatgatatccccattcattttagattattacattgtggtgttcgacttcttcagtcaagcagcaatcatgcaacatgccttactgtagttttttatcactgcacatgttgctggataaatttatagactggaggattatagaggactaacaagtgctactgggagattctcgagcaccattgaactaagagattccaaatagttctttggagtctattgttgatgttggcggggataatctagcagagatttgtcagattttttgtgcaacacggaggctacatgaggcagcaacgatcccattcttctcgcatgccactttacacaagctaaggatagcttctggtctcactcatggttgtggcagggaaagccgagtcagtagggtttgtcatgtagctggagttatctcagaccgcatattagatgcagtgatgatgtttacatttaccgtgcaagcaagatgacttatattatgccttaggacaataagtattgttttcactctaatgaaatacttggtaaaaagttgtctctgtagttgtatatttgactgtgaatatttgaacccactattataattgttgctaattgaggtcagatttcagaggccaaataattct

SEQ ID NO: 71706 - DNA, 4101 bp, Zea Mays
cgcccgcaccttccggatgatccagtctgcactgctaaggtgaatttgagtgacgagattgatttggaagattatgtttgcagaccgggtaagatcagtgttgctgatgttgagttggtttcatggcgcagaccaagatttttatgcatttgttgttttctaactattgtattgtcagggtacttttgtcctgccctagccaaagcattctccattcatttccataatactaatgctcttattcattcttacaagtaatttgtctcgcggaatacattaagatttgcatgacgtctaatagaatatgtttattgtattagtatgttggaaggggtgaaaatgaatcttggtatcttagatctgggttgcttcctgtcatagaatttggttacaatgtatcttttggtggaaatcatttttttgctatttgtgttccaaattctgcatgttgggtgagttagccaagtttgtttcatctatttatgagttctgacattgaaatgtttaccatgaacctcctcgctgacacgtcgcctcgcccccgagctgacttcctgacgccaccctcgcacaagatcccgatgtggcaatggcgaccagcgacgggcgctcaacgccaccgcgccgcctgcgaacccatggtgagaagtgtggtatcgatctagagccgaaggacttccccaacaccccttcctccatcggcgtgacatcggccagctcatctgcgacgacgaggcatcttcgaccgacttctcgacaccccatcctccatcaacgcggctccagtaccccttcctccatcggcgcagcagcatccaattcatctacgacgacaaggcatcttcgagcaaccacgccctactacaagtggtgttagtccatctcagataagtggagtaatttgtttgtatctgtatcttctattttatttcttccctaatcctgattaatagcctaatcacgcgacaactaatacatgtcgatttctttccttagccggtgtcatgcgcatgtgagatctagggagaggaagaggaggaagggttgtggggaccgggggtgcaagatggcggattcacctgcaactacaagaaaagaaagagcgagagatttacagaaaccttcagagccacggaggaggaggaggagattaggaggatctctacggcgctgacggattagttaaggaacgaaatatcacatcgtgtccggtaaccagattcagatgtgggcaccatgtgtgggtgcaaggccaggccgaggcgaaagagatgaagagcgtgaccaagaatttcctgattttccatcatttattccattcttacctcctctgagtgcagctaacctaaaggtctactatgccacacgtttcaccatcatagttgggataatggtgttcggtggttttcttgcaccaatcattgctttgaatgcttaccaagttgatgtgctctcatgcggctggaagttaaacttggtctaggggcacatcttatgaagactccatccgcagcgttcatctgtcgacgtagttgagaagtgcactcaggttatacatccagtaaagagcaagacatttgaaagcttatgggccaactgtgttgctattgatgcaagcgaaagttggctgatgaattctctatgcctacttctagagtgatgttcaaagaggttgacgctccttcaccatccccagctttgtggaatgggccacaggtagccatttaggatgacaaagccacaagggtgtccttcatcaaggctatgctagaagcctcagacttgtgtatgaggaaaattcataaaaatggtacacagaagctgggaagaaagtggaagaggaatttagcacttgccctctgtcagtcctaatgatgagcgttaagaacaacaccaagtcgggcagcggcaacagaggggatggggccaatgacggaggcggagaggagaacccatcgatttggtggcgtaagtgggagctcatcgaggccggtgcgtttgggcaggtctaccgcatgacttatttgcccttctagggatcagcagatcccacacctattacatgatatgtccttctagaatagaatctgctctctatcttctaaaccggtactgccttcttcaatatcagccaccggccggtccacctcttcaataatcgtccttcatcgcccttcagttgtgagttgtgacatactatttatattcggatatgatctattacaaatatacatgcatattatagggtgtgcatctgtatacccatgttctttacaaggtccgtccttaggtgatatgagtagtaagtctaaacttgcttcttaccaagagttaggctgtatgtgtgtatgtatttttttagtacaatagtattcaaaatgtatgaggactctttctttttgattgttttgaacaatgggcgtatgaaccggtggaagaacaattcatttgatagttgtttgtgtccaaaatggaactaaatctaaaatttgtggagcaaaccactcaatccagatctctatttaatcaaacattttttttgttatgatgcagttccacacgtgaaatagccatatggatatgtaacaacataaatttgttcagtgggaaataagtttctataatacatttatgcacccaggtgacaagaaaaaaatattttgtcatttctataaaacatgatgcattttttctcaattcatagtgtgatgttattcctcttttgcctttagagaagcccataatacaaatggataagaagtcaccaaacatttctaaatcactggtcttcatccagtgacaacctttagtgtcgagctggtgtttgtgcttgagctttagtatgtctgcaacaagcctttaggaatgtcgatatgctcatatgcttagttgtgcatgagtatttttgttgcaaggtttagatgcagtgttctggtctttagtgcatgtattttatagaatataacacttctatattgtagaatgcaatctgatagtttacatagaaactgataaacttgattgatccttggcattatagtacaaaaagtgcaataccttgtgaattaattttgtacctcattgtcatttacgggttaactgtccatacattgtattacatgttttctacaacctgttcttatttctcaacgaacagtagcaatcattggtcaggacatgtagcttcatttgttaggacatgtagcttaatgctatcttgttgttttctactgttcataaacgcaggacctgagatctagaaggacacaacaggcaaggtggatgtattcgtagttgattatatgttaaaagcaaatttcggatgacattggtggagattgcttatctctaagacacatctactcattctttgaatggaaatcacatccacgttctagaaagtctatttttacttcaaaaaggggcgagggttgttcagtgctttgacatgtgtgcaactattcaagcacaatggttagatgatatccccattcattttagattattacattgtggtgttcgacttcttcagtcaagcagcaatcatgcaacatgccttactgtagttttttatcactgcacatgttgctggataaatttatagactggaggattatagaggactaacaagtgctactgggagattctcgagcaccattgaactaagagattccaaatagttctttggagtctattgttgatgttggcggggataatctagcagagatttgtcagattttttgtgcaacacggaggctacatgaggcagcaacgatcccattcttctcgcatgccactttacacaagctaaggatagcttctggtctcactcatggttgtggcagggaaagccgagtcagtagggtttgtcatgtagctggagttatctcagaccgcatattagatgcagtgatgatgtttacatttaccgtgcaagcaagatgacttatattatgccttaggacaataagtattgttttcactctaatgaaatacttggtaaaaagttgtctctgtagttgtatatttgactgtgaatatttgaacccactattataattgttgctaattgaggtcagatttcagaggccaaataattct

SEQ ID NO: 71707 - DNA, 4183 bp, Zea Mays
ggatgatccaggtgctactcgaggctgtatgcattgtgtgggggaataagggatatgtagctgcttacattttgaagagatttgattataccttaagcacgattgcaactgaaactttggctgtgggtgatgggttctgctattttggtatgttatcattcatctctatgatagagcagattcagaatggtgagtttggcaggggttaattgtttcaatttgttagaatttttcaaacgaaagttgtctcaatttttggatcattcttggttttatgacgaatgcccaaactacagattatctaatggtcaaactgaatatttgttttatagcaaaaaaactatctagaaaattacctctttcatgtttttgttcagcggcggtccacgcggctaccaatagggatgatacaggttttgatattcttttatttattaattggttcaattggagaattacctcaacttattgggattaatgttctttgttctttgatgaccccttgctgagtgaaaaatacctgtgtatgttacaaaataaactacttgtatgttaaaaaaagtttctccctgccattacattgacatctcaaactcctcgcacctgttgccttttggaacatatacgttataacccacattttgcattgtgatttctctactaccaacaccaattttcttagaaggctatttagcagtaatttttgtactagctacaagaaacccattctatgcaataaatatccatattacgtaggtctgcagattacggcatatgctgcaatagcaaatgacacatttgtggcatattgctttcctttcaaagctttgagaatcatgtagtcatgcattagattcacatgcaccaaatttaagctaactggaaagtgggatcatatttttttatctcgtgcaaataactattaaactgctcaagtttctttatttggtaattaattaaaattttcaaccatgtcatattgcatatcaattgccaactttttctacacagatgcacatgctcaattatgataatgtcatatggtctgtcaaccatatgtggtcaatgcaaactaaattgttttcttctttatatgttttgatttgattttttgtatttgtcactgggattatatttttctctcaacggttttgctggttgctgtttcaattcaagtctgcactgctaaggtgaatttgagtgacgagattgatttggaagattatgtttgcagaccgggtaagatcagtgttgctgatgttgagttggtttcatggcgcagaccaagatttttatgcatttgttgttttctaactattgtattgtcagggtacttttgtcctgccctagccaaagcattctccattcatttccataatactaatgctcttattcattcttacaagtaatttgtctcgcggaatacattaagatttgcatgacgtctaatagaatatgtttattgtattagtatgttggaaggggtgaaaatgaatcttggtatcttagatctgggttgcttcctgtcatagaatttggttacaatgtatcttttggtggaaatcatttttttgctatttgtgttccaaattctgcatgttgggtgagttagccaagtttgtttcatctatttatgagttctgacattgaaatgtttaccatgaacctcctcgctgacacgtcgcctcgcccccgagctgacttcctgacgccaccctcgcacaagatcccgatgtggcaatggcgaccagcgacgggcgctcaacgccaccgcgccgcctgcgaacccatggtgagaagtgtggtatcgatctagagccgaaggacttccccaacaccccttcctccatcggcgtgacatcggccagctcatctgcgacgacgaggcatcttcgaccgacttctcgacaccccatcctccatcaacgcggctccagtaccccttcctccatcggcgcagcagcatccaattcatctacgacgacaaggcatcttcgagcaaccacgccctactacaagtggtgttagtccatctcagataagtggagtaatttgtttgtatctgtatcttctattttatttcttccctaatcctgattaatagcctaatcacgcgacaactaatacatgtcgatttctttccttagccggtgtcatgcgcatgtgagatctagggagaggaagaggaggaagggttgtggggaccgggggtgcaagatggcggattcacctgcaactacaagaaaagaaagagcgagagatttacagaaaccttcagagccacggaggaggaggaggagattaggaggatctctacggcgctgacggattagttaaggaacgaaatatcacatcgtgtccggtaaccagattcagatgtgggcaccatgtgtgggtgcaaggccaggccgaggcgaaagagattcgacgattgagaatacatcaaagaataaaaatgtggaactcggattttcagatgaagagcgtgaccaagaatttcctgattttccatcatttattccattcttacctcctctgagtgcagctaacctaaaggtctactatgccacacgtttcaccatcatagttgggataatggtgttcggtggttttcttgcaccaatcattgctttgaatgcttaccaagttgatgtgctctcatgcggctggaagttaaacttggtctaggggcacatcttatgaagactccatccgcagcgttcatctgtcgacgtagttgagatgaattctctatgcctacttctagagtgatgttcaaagaggttgacgctccttcaccatccccagctttgtggaatgggccacaggtagccatttaggatgacaaagccacaagggtgtccttcatcaaggctatgctagaagcctcagacttgtgtatgaggaaaattcataaaaatggtacacagaagctgggaagaaagtggaagaggaatttagcacttgccctctgtcagtcctaatgatgagcgttaagaacaacaccaagtcgggcagcggcaacagaggggatggggccaatgacggaggcggagaggagaacccatcgatttggtggcgtaagtgggagctcatcgaggccggtgcgtttgggcaggtctaccgcatgacttatttgcccttctagggatcagcagatcccacacctattacatgatatgtccttctagaatagaatctgctctctatcttctaaaccggtactgccttcttcaatatcagccaccggccggtccacctcttcaataatcgtccttcatcgcccttcagttgtgagttgtgacatactatttatattcggatatgatctattacaaatatacatgcatattatagggtgtgcatctgtatacccatgttctttacaaggtccgtccttaggtgatatgagtattccacacgtgaaatagccatatggatatgtaacaacataaatttgttcagtgggaaataagtttctataatacatttatgcacccagaggggcgagggttgttcagtgctttgacatgtgtgcaactattcaagcacaatggttagatgatatccccattcattttagattattacattgtggtgttcgacttcttcagtcaagcagcaatcatgcaacatgccttactgtagttttttatcactgcacatgttgctggataaatttatagactggaggattatagaggactaacaagtgctactgggagattctcgagcaccattgaactaagagattccaaatagttctttggagtctattgttgatgttggcggggataatctagcagagatttgtcagattttttgtgcaacacggaggctacatgaggcagcaacgatcccattcttctcgcatgccactttacacaagctaaggatagcttctggtctcactcatggttgtggcagggaaagccgagtcagtagggtttgtcatgtagctggagttatctcagaccgcatattagatgcagtgatgatgtttacatttaccgtgcaagcaagatgacttatattatgccttaggacaataagtattgttttcactctaatgaaatacttggtaaaaagttgtctctgtagttgtatatttgactgtgaatatttgaacccactattataattgttgctaattgaggtcagatttcagaggccaaataattct

SEQ ID NO: 71708 - DNA, 3423 bp, Zea Mays
gctgacttcctgacgccaccctcgcacaagatcccgatgtggcaatggcgaccagcgacgggcgctcaacgccaccgcgccgcctgcgaacccatggtgagaagtgtggtatcgatctagagccgaaggacttccccaacaccccttcctccatcggcgtgacatcggccagctcatctgcgacgacgaggcatcttcgaccgacttctcgacaccccatcctccatcaacgcggctccagtaccccttcctccatcggcgcagcagcatccaattcatctacgacgacaaggcatcttcgagcaaccacgccctactacaagtggtgttagtccatctcagataagtggagtaatttgtttgtatctgtatcttctattttatttcttccctaatcctgattaatagcctaatcacgcgacaactaatacatgtcgatttctttccttagccggtgtcatgcgcatgtgagatctagggagaggaagaggaggaagggttgtggggaccgggggtgcaagatggcggattcacctgcaactacaagaaaagaaagagcgagagatttacagaaaccttcagagccacggaggaggaggaggagattaggaggatctctacggcgctgacggattagttaaggaacgaaatatcacatcgtgtccggtaaccagattcagatgtgggcaccatgtgtgggtgcaaggccaggccgaggcgaaagagattcgacgattgagaatacatcaaagaataaaaatgtggaactcggattttcagatgaagagcgtgaccaagaatttcctgattttccatcatttattccattcttacctcctctgagtgcagctaacctaaaggtctactatgccacacgtttcaccatcatagttgggataatggtgttcggtggttttcttgcaccaatcttaaacttggtctaggggcacatcttatgaagactccatccgcagcgttcatctgtcgacgtagttgagaagtgcactcaggttatacatccagtaaagagcaagacatttgaaagcttatgggccaactgtgttgctattgatgcaagcgaaagttggctgatgaattctctatgcctacttctagagtgatgttcaaagaggttgacgctccttcaccatccccagctttgtggaatgggccacaggtagccatttaggatgacaaagccacaagggtgtccttcatcaaggctatgctagaagcctcagacttgtgtatgaggaaaattcataaaaatggtacacagaagctgggaagaaagtggaagaggaatttagcacttgccctctgtcagtcctaatgatgagcgttaagaacaacaccaagtcgggcagcggcaacagaggggatggggccaatgacggaggcggagaggagaacccatcgatttggtggcgtaagtgggagctcatcgaggccgccaccggccggtccacctcttcaataatcgtccttcatcgcccttcagttgtgagttgtgacatactatttatattcggatatgatctattacaaatatacatgcatattatagggtgtgcatctgtatacccatgttctttacaaggtccgtccttaggtgatatgagtagtaagtctaaacttgcttcttaccaagagttaggctgtatgtgtgtatgtatttttttagtacaatagtattcaaaatgtatgaggactctttctttttgattgttttgaacaatgggcgtatgaaccggtggaagaacaattcatttgatagttgtttgtgtccaaaatggaactaaatctaaaatttgtggagcaaaccactcaatccagatctctatttaatcaaacattttttttgttatgatgcagttccacacgtgaaatagccatatggatatgtaacaacataaatttgttcagtgggaaataagtttctataatacatttatgcacccaggtgacaagaaaaaaatattttgtcatttctataaaacatgatgcattttttctcaattcatagtgtgatgttattcctcttttgcctttagagaagcccataatacaaatggataagaagtcaccaaacatttctaaatcactggtcttcatccagtgacaacctttagtgtcgagctggtgtttgtgcttgagctttagtatgtctgcaacaagcctttaggaatgtcgatatgctcatatgcttagttgtgcatgagtatttttgttgcaaggtttagatgcagtgttctggtctttagtgcatgtattttatagaatataacacttctatattgtagaatgcaatctgatagtttacatagaaactgataaacttgattgatccttggcattatagtacaaaaagtgcaataccttgtgaattaattttgtacctcattgtcatttacgggttaactgtccatacattgtattacatgttttctacaacctgttcttatttctcaacgaacagtagcaatcattggtcaggacatgtagcttcatttgttaggacatgtagcttaatgctatcttgttgttttctactgttcataaacgcaggacctgagatctagaaggacacaacaggcaaggtggatgtattcgtagttgattatatgttaaaagcaaatttcggatgacattggtggagattgcttatctctaagacacatctactcattctttgaatggaaatcacatccacgttctagaaagtctatttttacttcaaaaaggggcgagggttgttcagtgctttgacatgtgtgcaactattcaagcacaatggttagatgatatccccattcattttagattattacattgtggtgttcgacttcttcagtcaagcagcaatcatgcaacatgccttactgtagttttttatcactgcacatgttgctggataaatttatagactggaggattatagaggactaacaagtgctactgggagattctcgagcaccattgaactaagagattccaaatagttctttggagtctattgttgatgttggcggggataatctagcagagatttgtcagattttttgtgcaacacggaggctacatgaggcagcaacgatcccattcttctcgcatgccactttacacaagctaaggatagcttctggtctcactcatggttgtggcagggaaagccgagtcagtagggtttgtcatgtagctggagttatctcagaccgcatattagatgcagtgatgatgtttacatttaccgtgcaagcaagatgacttatattatgccttaggacaataagtattgttttcactctaatgaaatacttggtaaaaagttgtctctgtagttgtatatttgactgtgaatatttgaacccactattataattgttgctaattgaggtcagatttcagaggccaaataattct

SEQ ID NO: 71709 - DNA, 2584 bp, Zea Mays
gtgaaaatgaatcttggtatcttagatctgggttgcttcctgtcatagaatttggttacaatgtatcttttggtggaaatcatttttttgctatttgtgttccaaattctgcatgttgggtgagttagccaagtttgtttcatctatttatgagttctgacattgaaatgtttaccatgaacctcctcgctgacacgtcgcctcgcccccgagctgacttcctgacgccaccctcgcacaagatcccgatgtggcaatggcgaccagcgacgggcgctcaacgccaccgcgccgcctgcgaacccatggtgagaagtgtggtatcgatctagagccgaaggacttccccaacaccccttcctccatcggcgtgacatcggccagctcatctgcgacgacgaggcatcttcgaccgacttctcgacaccccatcctccatcaacgcggctccagtaccccttcctccatcggcgcagcagcatccaattcatctacgacgacaaggcatcttcgagcaaccacgccctactacaagtggtgttagtccatctcagataagtggagtaatttgtttgtatctgtatcttctattttatttcttccctaatcctgattaatagcctaatcacgcgacaactaatacatgtcgatttctttccttagccggtgtcatgcgcatgtgagatctagggagaggaagaggaggaagggttgtggggaccgggggtgcaagatggcggattcacctgcaactacaagaaaagaaagagcgagagatttacagaaaccttcagagccacggaggaggaggaggagattaggaggatctctacggcgctgacggattagttaaggaacgaaatatcacatcgtgtccggtaaccagattcagatgtgggcaccatgtgtgggtgcaaggccaggccgaggcgaaagagattcgacgattgagaatacatcaaagaataaaaatgtggaactcggattttcagatgaagagcgtgaccaagaatttcctgattttccatcatttattccattcttacctcctctgagtgcagctaacctaaaggtctactatgccacacgtttcaccatcatagttgggataatggtgttcggtggttttcttgcaccaatcttaaacttggtctaggggcacatcttatgaagactccatccgcagcgttcatctgtcgacgtagttgagaagtgcactcaggttatacatccagtaaagagcaagacatttgaaagcttatgggccaactgtgttgctattgatgcaagcgaaagttggctgatgaattctctatgcctacttctagagtgatgttcaaagaggttgacgctccttcaccatccccagctttgtggaatgggccacaggtagccatttaggatgacaaagccacaagggtgtccttcatcaaggctatgctagaagcctcagacttgtgtatgaggaaaattcataaaaatggtacacagaagctgggaagaaagtggaagaggaatttagcacttgccctctgtcagtcctaatgatgagcgttaagaacaacaccaagtcgggcagcggcaacagaggggatggggccaatgacggaggcggagaggagaacccatcgatttggtggcgtaagtgggagctcatcgaggccggtgcgtttgggcagccaccggccggtccacctcttcaataatcgtccttcatcgcccttcagttgacctgagatctagaaggacacaacaggcaaggtggatgtattcgtagttgattatatgttaaaagcaaatttcggatgacattggtggagattgcttatctctaagacacatctactcattctttgaatggaaatcacatccacgttctagaaagtctatttttacttcaaaaaggggcgagggttgttcagtgctttgacatgtgtgcaactattcaagcacaatggttagatgatatccccattcattttagattattacattgtggtgttcgacttcttcagtcaagcagcaatcatgcaacatgccttactgtagttttttatcactgcacatgttgctggataaatttatagactggaggattatagaggactaacaagtgctactgggagattctcgagcaccattgaactaagagattccaaatagttctttggagtctattgttgatgttggcggggataatctagcagagatttgtcagattttttgtgcaacacggaggctacatgaggcagcaacgatcccattcttctcgcatgccactttacacaagctaaggatagcttctggtctcactcatggttgtggcagggaaagccgagtcagtagggtttgtcatgtagctggagttatctcagaccgcatattagatgcagtgatgatgtttacatttaccgtgcaagcaagatgacttatattatgccttaggacaataagtattgttttcactctaatgaaatacttggtaaaaagttgtctctgtagttgtatatttgactgtgaatatttgaacccactattataattgttgctaattgaggtcagatttcagaggccaaataattct

SEQ ID NO: 71710 - DNA, 2175 bp, Zea Mays
taccatgaacctcctcgctgacacgtcgcctcgcccccgagctgacttcctgacgccaccctcgcacaagatcccgatgtggcaatggcgaccagcgacgggcgctcaacgccaccgcgccgcctgcgaacccatggtgagaagtgtggtatcgatctagagccgaaggacttccccaacaccccttcctccatcggcgtgacatcggccagctcatctgcgacgacgaggcatcttcgaccgacttctcgacaccccatcctccatcaacgcggctccagtaccccttcctccatcggcgcagcagcatccaattcatctacgacgacaaggcatcttcgagcaaccacgccctactacaagtggtgttagtccatctcagataagtggagtaatttgtttgtatctgtatcttctattttatttcttccctaatcctgattaatagcctaatcacgcgacaactaatacatgtcgatttctttccttagccggtgtcatgcgcatgtgagatctagggagaggaagaggaggaagggttgtggggaccgggggtgcaagatggcggattcacctgcaactacaagaaaagaaagagcgagagatttacagaaaccttcagagccacggaggaggaggaggagattaggaggatctctacggcgctgacggattagttaaggaacgaaatatcacatcgtgtccggtaaccagattcagatgtgggcaccatgtgtgggtgcaaggccaggccgaggcgaaagagattcgacgattgagaatacatcaaagaataaaaatgtggaactcggattttcagatgaagagcgtgaccaagaatttcctgattttccatcatttattccattcttacctcctctgagtgcagctaacctaaaggtctactatgccacacgtttcaccatcatagttgggataatggtgttcggtggttttcttgcaccaatcttaaacttggtctaggggcacatcttatgaagactccatccgcagcgttcatctgtcgacgtagttgagaagtgcactcaggttatacatccagtaaagagcaagacatttgaaagcttatgggccaactgtgttgctattgatgcaagcgaaagttggctgatgaattctctatgcctacttctagagtgatgttcaaagaggttgacgctccttcaccatccccagctttgtggaatgggccacaggtagccatttaggatgacaaagccacaagggtgtccttcatcaaggctatgctagaagcctcagacttgtgtatgaggaaaattcataaaaatggtacacagaagctgggaagaaagtggaagaggaatttagcacttgccctctgtcagtcctaatgatgagcgttaagaacaacaccaagtcgggcagcggcaacagaggggatggggccaatgacggaggcggagaggagaacccatcgatttggtggcgtaagtgggagctcatcgaggccgccaccggccggtccacctcttcaataatcgtccttcatcgcccttcagttgacctgagatctagaaggacacaacaggcaagattattacattgtggtgttcgacttcttcagtcaagcagcaatcatgcaacatgccttactgtagttttttatcactgcacatgttgctggataaatttatagactggaggattatagaggactaacaagtgctactgggagattctcgagcaccattgaactaagagattccaaatagttctttggagtctattgttgatgttggcggggataatctagcagagatttgtcagattttttgtgcaacacggaggctacatgaggcagcaacgatcccattcttctcgcatgccactttacacaagctaaggatagcttctggtctcactcatggttgtggcagggaaagccgagtcagtagggtttgtcatgtagctggagttatctcagaccgcatattagatgcagtgatgatgtttacatttaccgtgcaagcaagatgacttatattatgccttaggacaataagtattgttttcactctaatgaaatacttggtaaaaagttgtctctgtagttgtatatttgactgtgaatatttgaacccactattataattgttgctaattgaggtcagatttcagaggccaaataattct

SEQ ID NO: 71711 - DNA, 1716 bp, Zea Mays
agaagagccactgcttgatgtatctgctgggaagaaagtggaagaggaatttagcacttgccctctgtcagtcctaatgatgagcgttaagaacaacaccaagtcgggcagcggcaacagaggggatggggccaatgacggaggcggagaggagaacccatcgatttggtggcgtaagtgggagctcatcgaggccggacctgagatctagaaggacacaacaggcaaggtggatgtattcgtagttgattatatgttaaaagcaaatttcggatgacattggtggagattgcttatctctaagacacatctactcattctttgaatggaaatcacatccacgttctagaaagtctatttttacttcaaaagtactccttctgttccaaataaattagtgttagcatctctgcactctattgcccacttcccccctcatcggtgttttttattgttgcatatcaattttgtggctcaaatgcccctttgaaacatatagcaccaaaattatcctaattaattaattggtttctaactggctactctatttgcaacaatggggatatataaccttaccatgtctgtttatcacagtgcatcttagattgcatcgtattgtaattgttttagttccttgacatactgtttgtgcaacaggaactgcttgatgtacttacggttgggtatctgtgtagatgtagctgccaagttgtctaaagaaaagttcctgacctttcacatgctgccacattgccacaataccttaagagcttttctatacttctatgatttgtgttttcgagatctgagttatttaaatgttgtctgctattttgaatttttatatgaagatcaaagttctcaagtgataaagtaattaatataacaagcggacaacacatagacaaactaattaatgtagcatatagacgaataaggaatcctgaaacattgaccgtgaagaaaattattgtgcacatatgcactctttctccaaaatttggcatttaatcttattgcaacatacttgtacagaggggcgagggttgttcagtgctttgacatgtgtgcaactattcaagcacaatggttagatgatatccccattcattttagattattacattgtggtgttcgacttcttcagtcaagcagcaatcatgcaacatgccttactgtagttttttatcactgcacatgttgctggataaatttatagactggaggattatagaggactaacaagtgctactgggagattctcgagcaccattgaactaagagattccaaatagttctttggagtctattgttgatgttggcggggataatctagcagagatttgtcagattttttgtgcaacacggaggctacatgaggcagcaacgatcccattcttctcgcatgccactttacacaagctaaggatagcttctggtctcactcatggttgtggcagggaaagccgagtcagtagggtttgtcatgtagctggagttatctcagaccgcatattagatgcagtgatgatgtttacatttaccgtgcaagcaagatgacttatattatgccttaggacaataagtattgttttcactctaatgaaatacttggtaaaaagttgtctctgtagttgtatatttgactgtgaatatttgaacccactattataattgttgctaattgaggtcagatttcagaggccaaataattct

SEQ ID NO: 71712 - DNA, 1263 bp, Zea Mays
caggagtccaggcttcgagcaacgagcgggcgaggctggaactggaacgctggatgcaagcctgatctactctgcccttaacctagctggttgagcaaatattcttccaccaatggcgagagaaccgagtcctgaaatagatgatgaactttacaatgaagtttatgggaaagcatacagcggcccagttgcatcagctacaaatagtgtgactcctaaaggaaatgctgagaagaggcccctgactcgtgataagtcagatgatgaagatgaggccccagatcctaatgctgttcccacggacttcactagccgagaggctaaggtctgggaggctaaagctaaggctacagaaaggaactggaagaagaggaaggaggaagaaatgatttgtaaaatatgtggagacccaggccattttactcagggttgcccctccacacttggggcaaataagagaaatgcagacttttttgaaagagttccagcaagagataagcaagtcagagatcttttcaatgagagggtaataagccagattgagaaagatgtggggtgtaaaatcagaatggatgagaagttcctgtttgtcagtggaaaggatagattaatattatccaaaggtgtttctgctgtgcataaaattattcaagagggtaagggtaaacatagtccaagcagtccgaaacacgatcgctctaggtcgcctgtacgaaacactactgagtttcgttccaaacactctgattctcatcgctcacctagcccaagaaattttgattctcaatggtcccatagtccaagaaatgcatcactctctcaaagtaaaggatactataatgaaagacatcgagatggtcgcttacacaacaatatgcccaagttttcgaaaggatctccacaagctcatgccaactttggagcaaaaggccgtccagcccaatcaaaatctccacgccatacctcttatcttgatgaattacctagaacacatggcgagaataaccaatttgctgcatcacgagtgcccaatgattggggaattgagaggcatggagcagatgccagttcaagtcttaggtttgacatgccatcccaccaacagaccttggaagaacttgagatggagtttaaaaaagaagctacacaattagctagagctcgtgaccaagaggaggatgaagagaactataggcatcgagagattttcaggtgtctacaactgaaccaaacaaaccctaagaaggaatcaaataaaacgag

SEQ ID NO: 71713 - DNA, 2222 bp, Zea Mays
caggagtccaggcttcgagcaacgagcgggcgaggctggaactggaacgctggatgcaagcctgatctactctgcccttaacctagctggtacgatccgcgcgtgtgttctggggcgctctcctcctcctcctccgtctctcccttctccactctcccccctctccgtctctctgtcctttctgggtcgacggctgggcgccgccgcccttcgtcaggtcttcgccggcggcgattacacaccaggttgagcaaatattcttccaccaatggcgagagaaccgagtcctgaaatagatgatgaactttacaatgaagtttatgggaaagcatacagcggcccagttgcatcagctacaaatagtgtgactcctaaaggaaatgctgagaagaggcccctgactcgtgataagtcagatgatgaagatgaggccccagatcctaatgctgttcccacggacttcactagccgagaggctaaggtctgggaggctaaagctaaggctacagaaaggaactggaagaagaggaaggaggaagaaatgatttgtaaaatatgtggagacccaggccattttactcagggttgcccctccacacttggggcaaataagagaaatgcagacttttttgaaagagttccagcaagagataagcaagtcagagatcttttcaatgagagggtaataagccagattgagaaagatgtggggtgtaaaatcagaatggatgagaagttcctgtttgtcagtggaaaggatagattaatattatccaaaggtgtttctgctgtgcataaaattattcaagagggtaagggtaaacatagtccaagcagtccgaaacacgatcgctctaggtcgcctgtacgaaacactactgagtttcgttccaaacactctgattctcatcgctcacctagcccaagaaattttgattctcaatggtcccatagtccaagaaatgcatcactctctcaaagtaaaggatactataatgaaagacatcgagatggtcgcttacacaacaatatgcccaagttttcgaaaggatctccacaagctcatgccaactttggagcaaaaggccgtccagcccaatcaaaatctccacgccatacctcttatcttgatgaattacctagaacacatggcgagaataaccaatttgctgcatcacgagtgcccaatgattggggaattgagaggcatggagcagatgccagttcaagtcttaggtttgacatgccatcccaccaacagaccttggaagaacttgagatggagtttaaaaaagaagctacacaattagctagagctcgtgaccaagaggaggatgaagagaactataggcatcgagagtcgctgagagtgattagagaaaattacatggagagagtgattaccttgaggaatgtgcatgcaaagaagtgggaagaatttcttgacacctttaaaagtcaacaacaagcacagccttcatacatacaaaccggatatctaggttttgagcagagaacggcacatatttcagctacacatcaaccaatggattcgaagagcacatatccgtatgcttctgatagctattcagccccaaaggctcatgcagcatatgggcgattttgtgaggaatcagtgtcaatggtgcgcttagacctacttatcacccattgctgttatgtagcttgaggaggtaagcattcatatataggcagaactgtctcccaattactttctttgcagcgtctacaaccgcaacggactgtggagctgtttcaggcatcgtaacaagctgctttccaacgaactaaactgaaatgctataaaaaaacattgacctgtatgactgttttatctgcttggaaaaaatctccctgagttggcgtttatgtgaacctagtattttttttgtcaaacctggtatatcgctatgctgggtctatccgaatggttgtttgcatcatcccattgttttggaaggtttggcacacgatatgaaagttagaacatgtggaacagtcagctatttcgtgaaatttggtcagaacttgatggcactcgttgctgtagtggtgactaggccagtgccttcggattggtactgttttgtgtcaatctcaacaggcactgcactgtcccatatacattggaatgtttgattggtggatggaggttgtattgtaaatcctggctgagtgaaaatcgaattttagaagaaaaa

SEQ ID NO: 71714 - DNA, 2066 bp, Zea Mays
caggagtccaggcttcgagcaacgagcgggcgaggctggaactggaacgctggatgcaagcctgatctactctgcccttaacctagctggttgagcaaatattcttccaccaatggcgagagaaccgagtcctgaaatagatgatgaactttacaatgaagtttatgggaaagcatacagcggcccagttgcatcagctacaaatagtgtgactcctaaaggaaatgctgagaagaggcccctgactcgtgataagtcagatgatgaagatgaggccccagatcctaatgctgttcccacggacttcactagccgagaggctaaggtctgggaggctaaagctaaggctacagaaaggaactggaagaagaggaaggaggaagaaatgatttgtaaaatatgtggagacccaggccattttactcagggttgcccctccacacttggggcaaataagagaaatgcagacttttttgaaagagttccagcaagagataagcaagtcagagatcttttcaatgagagggtaataagccagattgagaaagatgtggggtgtaaaatcagaatggatgagaagttcctgtttgtcagtggaaaggatagattaatattatccaaaggtgtttctgctgtgcataaaattattcaagagggtaagggtaaacatagtccaagcagtccgaaacacgatcgctctaggtcgcctgtacgaaacactactgagtttcgttccaaacactctgattctcatcgctcacctagcccaagaaattttgattctcaatggtcccatagtccaagaaatgcatcactctctcaaagtaaaggatactataatgaaagacatcgagatggtcgcttacacaacaatatgcccaagttttcgaaaggatctccacaagctcatgccaactttggagcaaaaggccgtccagcccaatcaaaatctccacgccatacctcttatcttgatgaattacctagaacacatggcgagaataaccaatttgctgcatcacgagtgcccaatgattggggaattgagaggcatggagcagatgccagttcaagtcttaggtttgacatgccatcccaccaacagaccttggaagaacttgagatggagtttaaaaaagaagctacacaattagctagagctcgtgaccaagaggaggatgaagagaactataggcatcgagagtcgctgagagtgattagagaaaattacatggagagagtgattaccttgaggaatgtgcatgcaaagaagtgggaagaatttcttgacacctttaaaagtcaacaacaagcacagccttcatacatacaaaccggatatctaggttttgagcagagaacggcacatatttcagctacacatcaaccaatggattcgaagagcacatatccgtatgcttctgatagctattcagccccaaaggctcatgcagcatatgggcgattttgtgaggaatcagtgtcaatggtgcgcttagacctacttatcacccattgctgttatgtagcttgaggaggtaagcattcatatataggcagaactgtctcccaattactttctttgcagcgtctacaaccgcaacggactgtggagctgtttcaggcatcgtaacaagctgctttccaacgaactaaactgaaatgctataaaaaaacattgacctgtatgactgttttatctgcttggaaaaaatctccctgagttggcgtttatgtgaacctagtattttttttgtcaaacctggtatatcgctatgctgggtctatccgaatggttgtttgcatcatcccattgttttggaaggtttggcacacgatatgaaagttagaacatgtggaacagtcagctatttcgtgaaatttggtcagaacttgatggcactcgttgctgtagtggtgactaggccagtgccttcggattggtactgttttgtgtcaatctcaacaggcactgcactgtcccatatacattggaatgtttgattggtggatggaggttgtattgtaaatcctggctgagtgaaaatcgaattttagaagaaaaa

SEQ ID NO: 71715 - DNA, 2178 bp, Zea Mays
caggagtccaggcttcgagcaacgagcgggcgaggctggaactggaacgctggatgcaagcctgatctactctgcccttaacctagctggttgagcaaatattcttccaccaatggcgagagaaccgagtcctgaaatagatgatgaactttacaatgaagtttatgggaaagcatacagcggcccagttgcatcagctacaaatagtgtgactcctaaaggaaatgctgagaagaggcccctgactcgtgataagtcagatgatgaagatgaggccccagatcctaatgctgttcccacggacttcactagccgagaggctaaggtctgggaggctaaagctaaggctacagaaaggaactggaagaagaggaaggaggaagaaatgatttgtaaaatatgtggagacccaggccattttactcagttggaaagtaggccatgtttacttgacaggaaaatcctgcaggtggttgcccctccacacttggggcaaataagagaaatgcagacttttttgaaagagttccagcaagagataagcaagtcagagatcttttcaatgagagggtaataagccagattgagaaagatgtggggtgtaaaatcagaatggatgagaagttcctgtttgtcagtggaaaggatagattaatattatccaaaggtgtttctgctgtgcataaaattattcaagagggtaagggtaaacatagtccaagcagtccgaaacacgatcgctctaggtcgcctgtacgaaacactactgagtttcgttccaaacactctgattctcatcgctcacctagcccaagaaattttgattctcaatggtcccatagtccaagaaatgcatcactctctcaaagtaaaggatactataatgaaagacatcgagatggtcgcttacacaacaatatgcccaagttttcgaaaggatctccacaagctcatgccaactttggagcaaaaggccgtccagcccaatcaaaatctccacgccatacctcttatcttgatgaattacctagaacacatggcgagaataaccaatttgctgcatcacgagtgcccaatgattggggaattgagaggcatggagcagatgccagttcaagtcttaggtttgacatgccatcccaccaacagaccttggaagaacttgagatggagtttaaaaaagaagctacacaattagctagagctcgtgaccaagaggaggatgaagagaactataggcatcgagagtcgctgagagtgattagagaaaattacatggagagagtgattaccttgaggaatgtgcatgcaaagaagtgggaagaatttcttgacacctttaaaagtcaacaacaagcacagccttcatacatacaaaccggatatctaggttttgagcagagaacggcacatatttcagctacacatcaaccaatggattcgaagagcacatatccgtatgcttctgatagctattcagccccaaaggctcatgcagcatatggtgagtttcaacatgagaggcatgatgatcttgggagggcctataggcgatattagctgtgaatagtgggcgattttgtgaggaatcagtgtcaatggtgcgcttagacctacttatcacccattgctgttatgtagcttgaggaggtaagcattcatatataggcagaactgtctcccaattactttctttgcagcgtctacaaccgcaacggactgtggagctgtttcaggcatcgtaacaagctgctttccaacgaactaaactgaaatgctataaaaaaacattgacctgtatgactgttttatctgcttggaaaaaatctccctgagttggcgtttatgtgaacctagtattttttttgtcaaacctggtatatcgctatgctgggtctatccgaatggttgtttgcatcatcccattgttttggaaggtttggcacacgatatgaaagttagaacatgtggaacagtcagctatttcgtgaaatttggtcagaacttgatggcactcgttgctgtagtggtgactaggccagtgccttcggattggtactgttttgtgtcaatctcaacaggcactgcactgtcccatatacattggaatgtttgattggtggatggaggttgtattgtaaatcctggctgagtgaaaatcgaattttagaagaaaaa

SEQ ID NO: 71716 - DNA, 2368 bp, Zea Mays
caggagtccaggcttcgagcaacgagcgggcgaggctggaactggaacgctggatgcaagcctgatctactctgcccttaacctagctggttgagcaaatattcttccaccaatggcgagagaaccgagtcctgaaatagatgatgaactttacaatgaagtttatgggaaagcatacagcggcccagttgcatcagctacaaatagtgtgactcctaaaggaaatgctgagaagaggcccctgactcgtgataagtcagatgatgaagatgaggccccagatcctaatgctgttcccacggacttcactagccgagaggctaaggtctgggaggctaaagctaaggctacagaaaggaactggaagaagaggaaggaggaagaaatgatttgtaaaatatgtggagacccaggccattttactcagggttgcccctccacacttggggcaaataagagaaatgcagacttttttgaaagagttccagcaagagataagcaagtcagagatcttttcaatgagagggtaataagccagattgagaaagatgtggggtgtaaaatcagaatggatgagaagttcctgtttgtcagtggaaaggatagattaatattatccaaaggtgtttctgctgtgcataaaattattcaagagggtaagggtaaacatagtccaagcagtccgaaacacgatcgctctaggtcgcctgtacgaaacactactgagtttcgttccaaacactctgattctcatcgctcacctagcccaagaaattttgattctcaatggtcccatagtccaagaaatgcatcactctctcaaagtaaaggatactataatgaaagacatcgagatggtcgcttacacaacaatatgcccaagttttcgaaaggatctccacaagctcatgccaactttggagcaaaaggccgtccagcccaatcaaaatctccacgccatacctcttatcttgatgaattacctagaacacatggcgagaataaccaatttgctgcatcacgagtgcccaatgattggggaattgagaggcatggagcagatgccagttcaagtcttaggtttgacatgccatcccaccaacagaccttggaagaacttgagatggagtttaaaaaagaagctacacaattagctagagctcgtgaccaagaggaggatgaagagaactataggcatcgagagtcgctgagagtgattagagaaaattacatggagagagtgattaccttgaggaatgtgcatgcaaagaagtgggaagaatttcttgacacctttaaaagtcaacaacaagcacagccttcatacatacaaaccggatatctaggttttgagcagagaacggcacatatttcagctacacatcaaccaatggattcgaagagcacatatccgtatgcttctgatagctattcagccccaaaggctcatgcagcatatggtgagtttcaacatgagaggcatgatgatcttgggagggcctataggcgatattagctgtgaatagtggtgagttattgagttaattacccatttcagatttttgatgttaagccctgcagttctaatgtagctagagataatcatttcgttgtttgagcaattggtgtcctgctaggtaagctaattaaagagctgtgactgttaatagctacaggcttgggaagcctccgtcttattagaaaatgttgaccaaatgttcccttcctcttttgagtcctaaaagaggttccaaattttcagggcgattttgtgaggaatcagtgtcaatggtgcgcttagacctacttatcacccattgctgttatgtagcttgaggaggtaagcattcatatataggcagaactgtctcccaattactttctttgcagcgtctacaaccgcaacggactgtggagctgtttcaggcatcgtaacaagctgctttccaacgaactaaactgaaatgctataaaaaaacattgacctgtatgactgttttatctgcttggaaaaaatctccctgagttggcgtttatgtgaacctagtattttttttgtcaaacctggtatatcgctatgctgggtctatccgaatggttgtttgcatcatcccattgttttggaaggtttggcacacgatatgaaagttagaacatgtggaacagtcagctatttcgtgaaatttggtcagaacttgatggcactcgttgctgtagtggtgactaggccagtgccttcggattggtactgttttgtgtcaatctcaacaggcactgcactgtcccatatacattggaatgtttgattggtggatggaggttgtattgtaaatcctggctgagtgaaaatcgaattttagaagaaaaa

SEQ ID NO: 71717 - DNA, 2524 bp, Zea Mays
caggagtccaggcttcgagcaacgagcgggcgaggctggaactggaacgctggatgcaagcctgatctactctgcccttaacctagctggtacgatccgcgcgtgtgttctggggcgctctcctcctcctcctccgtctctcccttctccactctcccccctctccgtctctctgtcctttctgggtcgacggctgggcgccgccgcccttcgtcaggtcttcgccggcggcgattacacaccaggttgagcaaatattcttccaccaatggcgagagaaccgagtcctgaaatagatgatgaactttacaatgaagtttatgggaaagcatacagcggcccagttgcatcagctacaaatagtgtgactcctaaaggaaatgctgagaagaggcccctgactcgtgataagtcagatgatgaagatgaggccccagatcctaatgctgttcccacggacttcactagccgagaggctaaggtctgggaggctaaagctaaggctacagaaaggaactggaagaagaggaaggaggaagaaatgatttgtaaaatatgtggagacccaggccattttactcagggttgcccctccacacttggggcaaataagagaaatgcagacttttttgaaagagttccagcaagagataagcaagtcagagatcttttcaatgagagggtaataagccagattgagaaagatgtggggtgtaaaatcagaatggatgagaagttcctgtttgtcagtggaaaggatagattaatattatccaaaggtgtttctgctgtgcataaaattattcaagagggtaagggtaaacatagtccaagcagtccgaaacacgatcgctctaggtcgcctgtacgaaacactactgagtttcgttccaaacactctgattctcatcgctcacctagcccaagaaattttgattctcaatggtcccatagtccaagaaatgcatcactctctcaaagtaaaggatactataatgaaagacatcgagatggtcgcttacacaacaatatgcccaagttttcgaaaggatctccacaagctcatgccaactttggagcaaaaggccgtccagcccaatcaaaatctccacgccatacctcttatcttgatgaattacctagaacacatggcgagaataaccaatttgctgcatcacgagtgcccaatgattggggaattgagaggcatggagcagatgccagttcaagtcttaggtttgacatgccatcccaccaacagaccttggaagaacttgagatggagtttaaaaaagaagctacacaattagctagagctcgtgaccaagaggaggatgaagagaactataggcatcgagagtcgctgagagtgattagagaaaattacatggagagagtgattaccttgaggaatgtgcatgcaaagaagtgggaagaatttcttgacacctttaaaagtcaacaacaagcacagccttcatacatacaaaccggatatctaggttttgagcagagaacggcacatatttcagctacacatcaaccaatggattcgaagagcacatatccgtatgcttctgatagctattcagccccaaaggctcatgcagcatatggtgagtttcaacatgagaggcatgatgatcttgggagggcctataggcgatattagctgtgaatagtggtgagttattgagttaattacccatttcagatttttgatgttaagccctgcagttctaatgtagctagagataatcatttcgttgtttgagcaattggtgtcctgctaggtaagctaattaaagagctgtgactgttaatagctacaggcttgggaagcctccgtcttattagaaaatgttgaccaaatgttcccttcctcttttgagtcctaaaagaggttccaaattttcagggcgattttgtgaggaatcagtgtcaatggtgcgcttagacctacttatcacccattgctgttatgtagcttgaggaggtaagcattcatatataggcagaactgtctcccaattactttctttgcagcgtctacaaccgcaacggactgtggagctgtttcaggcatcgtaacaagctgctttccaacgaactaaactgaaatgctataaaaaaacattgacctgtatgactgttttatctgcttggaaaaaatctccctgagttggcgtttatgtgaacctagtattttttttgtcaaacctggtatatcgctatgctgggtctatccgaatggttgtttgcatcatcccattgttttggaaggtttggcacacgatatgaaagttagaacatgtggaacagtcagctatttcgtgaaatttggtcagaacttgatggcactcgttgctgtagtggtgactaggccagtgccttcggattggtactgttttgtgtcaatctcaacaggcactgcactgtcccatatacattggaatgtttgattggtggatggaggttgtattgtaaatcctggctgagtgaaaatcgaattttagaagaaaaa

SEQ ID NO: 71718 - DNA, 1536 bp, Zea Mays
atatctctggtcccttttctgttggttattgctgtgctagagtattacttgtttggtccttttgcagctcaagctcatgccaactttggagcaaaaggccgtccagcccaatcaaaatctccacgccatacctcttatcttgatgaattacctagaacacatggcgagaataaccaatttgctgcatcacgagtgcccaatgattggggaattgagaggcatggagcagatgccagttcaagtcttaggtttgacatgccatcccaccaacagaccttggaagaacttgagatggagtttaaaaaagaagctacacaattagctagagctcgtgaccaagaggaggatgaagagaactataggcatcgagagtcgctgagagtgattagagaaaattacatggagagagtgattaccttgaggaatgtgcatgcaaagaagtgggaagaatttcttgacacctttaaaagtcaacaacaagcacagccttcatacatacaaaccggatatctaggttttgagcagagaacggcacatatttcagctacacatcaaccaatggattcgaagagcacatatccgtatgcttctgatagctattcagccccaaaggctcatgcagcatatggtgagtttcaacatgagaggcatgatgatcttgggagggcctataggcgatattagctgtgaatagtggtgagttattgagttaattacccatttcagatttttgatgttaagccctgcagttctaatgtagctagagataatcatttcgttgtttgagcaattggtgtcctgctaggtaagctaattaaagagctgtgactgttaatagctacaggcttgggaagcctccgtcttattagaaaatgttgaccaaatgttcccttcctcttttgagtcctaaaagaggttccaaattttcagggcgattttgtgaggaatcagtgtcaatggtgcgcttagacctacttatcacccattgctgttatgtagcttgaggaggtaagcattcatatataggcagaactgtctcccaattactttctttgcagcgtctacaaccgcaacggactgtggagctgtttcaggcatcgtaacaagctgctttccaacgaactaaactgaaatgctataaaaaaacattgacctgtatgactgttttatctgcttggaaaaaatctccctgagttggcgtttatgtgaacctagtattttttttgtcaaacctggtatatcgctatgctgggtctatccgaatggttgtttgcatcatcccattgttttggaaggtttggcacacgatatgaaagttagaacatgtggaacagtcagctatttcgtgaaatttggtcagaacttgatggcactcgttgctgtagtggtgactaggccagtgccttcggattggtactgttttgtgtcaatctcaacaggcactgcactgtcccatatacattggaatgtttgattggtggatggaggttgtattgtaaatcctggctgagtgaaaatcgaattttagaagaaaaa

SEQ ID NO: 71719 - DNA, 1357 bp, Zea Mays
cttgatcattgctcaaacaagactgtctcgaatatgtgcccgaatatgaagtgtttccgccttttaattggtcagaaaggatgttttgaacacatcatgctgtataagttggatggcctgcaatttttctcatgccaactttggagcaaaaggccgtccagcccaatcaaaatctccacgccatacctcttatcttgatgaattacctagaacacatggcgagaataaccaatttgctgcatcacgagtgcccaatgattggggaattgagaggcatggagcagatgccagttcaagtcttaggtttgacatgccatcccaccaacagaccttggaagaacttgagatggagtttaaaaaagaagctacacaattagctagagctcgtgaccaagaggaggatgaagagaactataggcatcgagagtcgctgagagtgattagagaaaattacatggagagagtgattaccttgaggaatgtgcatgcaaagaagtgggaagaatttcttgacacctttaaaagtcaacaacaagcacagccttcatacatacaaaccggatatctaggttttgagcagagaacggcacatatttcagctacacatcaaccaatggattcgaagagcacatatccgtatgcttctgatagctattcagccccaaaggctcatgcagcatatggtgagtttcaacatgagaggcatgatgatcttgggagggcctataggcgatattagctgtgaatagtgggcgattttgtgaggaatcagtgtcaatggtgcgcttagacctacttatcacccattgctgttatgtagcttgaggaggtaagcattcatatataggcagaactgtctcccaattactttctttgcagcgtctacaaccgcaacggactgtggagctgtttcaggcatcgtaacaagctgctttccaacgaactaaactgaaatgctataaaaaaacattgacctgtatgactgttttatctgcttggaaaaaatctccctgagttggcgtttatgtgaacctagtattttttttgtcaaacctggtatatcgctatgctgggtctatccgaatggttgtttgcatcatcccattgttttggaaggtttggcacacgatatgaaagttagaacatgtggaacagtcagctatttcgtgaaatttggtcagaacttgatggcactcgttgctgtagtggtgactaggccagtgccttcggattggtactgttttgtgtcaatctcaacaggcactgcactgtcccatatacattggaatgtttgattggtggatggaggttgtattgtaaatcctggctgagtgaaaatcgaattttagaagaaaaa

SEQ ID NO: 71720 - DNA, 1332 bp, Zea Mays
ccgccttcaggaggaggttgcagtgatggcggcaggttgccccaagaggcgtgtccccccagtatcttccctgcggcaacaaagaggaatgaaacattgccaatgcaaaatccctaagggaaatggagcatttgcaaacggtgaaccctatgatgccctggaagcttaagcacttgaaagcatcacgacatttcaaaattcagagaaaggatcaggagcatggttcctgcaggccaggaagctgacaacagctccaaaccaaacaaatttaaggtctttaatctgtacgccctccttcctagtcatcctgaggcaccaaccgacaggaccgcttgcaattgaatagcctcgaaacatccaaacagcacacgatcagtctctggtaggcgccaagtcactaaccaatggacccgctggcacatgatggagtaaattggaatgtccaaataggatgattgtgtcgcaagggctcacatcatggcatgacagctgactgaagtgaggatatggtaagcatctagcttgtcgtatatcacaattctttctgtaaaggtggatgcaagaatttagagatcttttgttggttcgaagcagtttgggcggaaaatattatgtgtgttttcttctaaaagcaggtgttatctacttacaagtagaagtaggttttttcatctcattcaatggtcacaaaagaattttcccttcatggcatgttaaacaaatagatgtcctcaatgacaacccaatttttttaaaaaaaaactactaatttttttttaaaaactactaaacagaaaaataatgtaacactggaactctagaagtgtgatgattattctggattggtgagagcgtcagacacctacaattaaggcacacttttcatatatttactactacctccattcacaaatatatgacgctgttgactttttcaataactttaatcactcgtcttatttaaaatatttattcgaaaatataaaattaagtcacgctcaaaagattttgagtgataaaacaaatcacaacaaaataaatgataactcattttttaataaaacgaatggtcaaagtttttgaaaaatcaacggtggcatatgtttgtgaacacttgactgagtgggtggcatacataactcttaaatttttatattcattgttttcgtttaggttggagctttataaagaatattgtaaacaatctctacgcattaaatagaatgcagaaaattaattgtttatgaagcaaaatccaactagtaatttctagattaggcatgcaatcatacagttaactataacaatattgtgtttgataagaatctcatg

SEQ ID NO: 71721 - DNA, 1735 bp, Zea Mays
cggcaggttgccccaagaggcgtgtccccccagtatcttccctgcggcaacaaagaggaatgaaacattgccaatgcaaaatccctaaggtaagtgtcatggaactcattaagagatgatttggtggacagggatcacaagaggatccatgaggagcaatccccagctgatttggtgacccgggatcccgggaggattggtttatttccccctcaatcccctccaatcctcccgtgatccccttgtcaccaaatcaactcatgggagacaaatccccttgctagaaggggattcctccttagggcttgttcggttctacctcaatccatatggattgaggggttttaatccatagtaagtcaaaatctcttccaatccgtatcaatctcctccaatccatatggattgaaaataaccgaacaagccctcatggatcccctcgtgatcgggttttgtctctcatggatcccctcatgatccctaaccaccaatcagccactaaaggatgatttggtgaccagggaaatggagcatttgcaaacggtgaaccctatgatgccctggaagcttaagcacttgaaagcatcacgacatttcaaaattcagagaaaggatcaggagcatggttcctgcaggccaggaagctgacaacagctccaaaccaaacaaatttaaggtctttaatctgtacgccctccttcctagtcatcctgaggcaccaaccgacaggaccgcttgcaattgaatagcctcgaaacatccaaacagcacacgatcagtctctggtaggcgccaagtcactaaccaatggacccgctggcacatgatggagtaaattggaatgtccaaataggatgattgtgtcgcaagggctcacatcatggcatgacagctgactgaagtgaggatatggtaagcatctagcttgtcgtatatcacaattctttctgtaaaggtggatgcaagaatttagagatcttttgttggttcgaagcagtttgggcggaaaatattatgtgtgttttcttctaaaagcaggtgttatctacttacaagtagaagtaggttttttcatctcattcaatggtcacaaaagaattttcccttcatggcatgttaaacaaatagatgtcctcaatgacaacccaatttttttaaaaaaaaactactaatttttttttaaaaactactaaacagaaaaataatgtaacactggaactctagaagtgtgatgattattctggattggtgagagcgtcagacacctacaattaaggcacacttttcatatatttactactacctccattcacaaatatatgacgctgttgactttttcaataactttaatcactcgtcttatttaaaatatttattcgaaaatataaaattaagtcacgctcaaaagattttgagtgataaaacaaatcacaacaaaataaatgataactcattttttaataaaacgaatggtcaaagtttttgaaaaatcaacggtggcatatgtttgtgaacacttgactgagtgggtggcatacataactcttaaatttttatattcattgttttcgtttaggttggagctttataaagaatattgtaaacaatctctacgcattaaatagaatgcagaaaattaattgtttatgaagcaaaatccaactagtaatttctagattaggcatgcaatcatacagttaactataacaatattgtgtttgataagaatctcatg

SEQ ID NO: 71722 - DNA, 3569 bp, Zea Mays
gccctgccttccatcgtcgcccccatgccacgctccccttccatcctcgctcacttccagccgcccccattcccagttgaaggagccgtccaagaaccgggaaccccatctgggatcaggagcagccgtgtcgcgccactcgtgcgcctgcgcctcgaacctgactttggacgacgccgacggggaccaccctccctccgcatcgaagccgatgagcctctggtggtggtgtccgcggtcgattgaccgattgagccaccgaacagcaccaatcgagcggcattagccccgacctgaagcacacctggccggaatccaaaggatatcgtgcccccgccccgcatcgcgcgatgctcgttgctgagctcccgatgacccacctctcccggagaggacatccctcttctgcatcgacgtcgaactcgaggtccacgccaagatgaagtccgctgccgtagcgtcctcggatccacgtccaccgcgtcgccgtagtccgtaggaggtcgccgccgccgagcaagctgctgtcaccaacgacagcgaggccgccacgctccgcagcgaggttgagcgcctcgagggtctcctcgccgcggagaaggctagccatgaggaggagatgcgcaggggtgcatggctcggggaccagctgcagaccgcgtaccaggagaaggccgccctcgaggaggagatcgagaccctgaagggttccgccactgccgagggcaagggcatggaagagggatgtgattctgttgctgctagggccaggacgcctaaggatcagggcgtggtgcctcccgcactggtccgcggctgctggagcagctgccacggctggcatcgcagtggtcttgtttaacctcaagaggtaatctggtggtccgatgcgcggaagttttgatctgctgctatggcctatatgagaataggcctacatgtatggcaagtacctttactttctgaagttttcaatggtaataagagtcgtgaacacaaacatgaggtataattgagttcttgtctgatcttttgagttgcacctgatcttttgagttcttgtcttggttcgttcttgattcttggacgaggtgggatttggagagccaagggcggcgcggcagcagcgggtttctcggtcggactagattgtttccatcgagatggtgggcggcggagggcattcgtcgatggaccaccctggcgccaaggacctcgagcgcggcgagctgcgccgtggcgcgcctgagtttgcggacggcgacgatggagacggggaagaaagccagtacttctcggacgcggaggaccggtcgtggccgtcgcactcgcgccacgactccaccgcctacgaggactacgtctcgctgtgcgtgtccgcccgcgcgagctccgtcgacgccgacgccgatgccgacggcgaggccgtcagacaacactgcaggaagtcgtcgtgcgtgtcagagggctcgctggacgacgttgacctggaggccggactgagcgagatcatcaaggccagccctgagaaggccgaacagaactgtcgcatttgccaccttggcctggagagcacggcggtcgagtccggtgccggcatcacgctcggctgctcctgcaagggggacttatcctacgcccacaagcagtgcgccgacacctggttcaagatcagaggcaacaagtgctcgacatgcaaatatgtgatctcctctgatgatccggaagattgggactataggcagttggataatccacgtcacttgctgcatggtattgtacatgacaatgggtttggtcaccttgttcggataaatgtgtgttagggtcaagaaatactttctatatgtagatatggatctaattctctaacctcctaacaaacctgctacttctcttatccaaaatcttgtaaatagaattagtgtaagtaattctgcatttttataagcttcttctcatggtcccatgactacccaatgtgagaacaaagggggcatcggccctgaaaaccacgcagacaattgacttcttttttttattcatcattttttgctcgtaaggcttgttctacaagtgtttattatactatactatactcattcagatatatgcctttttgcactttgtttcctgtagtttagtcaccttaggaggtgttatcgataattcttagatcttgtctgtacatgatccctcattcactactagcttccttagcaactcacatttgtattatggttcagaaatgcctccacaataaccaatgacttgtctctggtatgatgtccactagcatgaatccaccataaggatgtttagaaattcattgcatttgctataactgagatttcggatccactggcatcattgtggcttgcatgtcagtactttgtacagtagtaaatatagtaacatatatcattttatgttttgtgatagttccatttttacacttacagagtgttgagtatatacttcaaatttgcttttaggctgggtgagaagtacaaatcaatacatctctgtagctcactgaattaactgatttttccttttagtgcaaatatattatatatgtttgccagaagatcattttgctcttgttttaatccatgtatggtaacttgcactgacattctaagtttgattattggatattattgcctttctttccattttccccaatactcatgagtccatggcagccatcatccagtaagttatctggctatcatttagttgcttcatgtagcagaatgcttcaatagctttggcaatatctataagcttttggatttcaggttcctaagcttgtgattttcagctcttgtattaggctataaatgatatgttgttatcccattttcagcaaatcagaacattcatccagatgaggactaacttgaaggtggtcgataactctggggccaagtgagtgatgtgcatccagtccctgagggggaagaaaggagcaaggctcggggacatgatcatcggatccgtaaaggaggcccagcctcgtggcaaggtcaagaaagaagacgtagtctacggcgtggtcgtccgcgccgccatgaagaaagggcgcagcgacggcagcgaggtccagttcgacgacaacgaggtggtcctcgtgaacaagaagggtgagctgatcggcacccgcgtcttcggccccgtcccccacgagctgaggaagaagaagcacctcaagatcctggccctggctgaacacatcgtttgaggtgtgtcgcagagccaagagccaagtgtttatgggaatgtttttttgtctgtgttctctgtttgaataatgcattgtgaaacgatagcatggaccgtttgaactattttgatgatattgctcgcccatttggatggccaatacgtgttgtgatctattctggagtttcattttttggttacaagctgctttcacatgtatgcagatatccttgtctgcgagttcgtctatgtgatgaacttcgaattagttgccaatagcataatcctattaatcctgattgtatatgtcatacaatttacaaattaatctgtgtaaaatt

SEQ ID NO: 71723 - DNA, 3684 bp, Zea Mays
gccctgccttccatcgtcgcccccatgccacgctccccttccatcctcgctcacttccagccgcccccattcccagttgaaggagccgtccaagaaccgggaaccccatctgggatcaggagcagccgtgtcgcgccactcgtgcgcctgcgcctcgaacctgactttggacgacgccgacggggaccaccctccctccgcatcgaagccgatgagcctctggtggtggtgtccgcggtcgattgaccgattgagccaccgaacagcaccaatcgagcggcattagccccgacctgaagcacacctggccggaatccaaaggatatcgtgcccccgccccgcatcgcgcgatgctcgttgctgagctcccgatgacccacctctcccggagaggacatccctcttctgcatcgacgtcgaactcgaggtccacgccaagatgaagtccgctgccgtagcgtcctcggatccacgtccaccgcgtcgccgtagtccgtaggaggtcgccgccgccgagcaagctgctgtcaccaacgacagcgaggccgccacgctccgcagcgaggttgagcgcctcgagggtctcctcgccgcggagaaggctagccatgaggaggagatgcgcaggggtgcatggctcggggaccagctgcagaccgcgtaccaggagaaggccgccctcgaggaggagatcgagaccctgaagggttccgccactgccgagggcaagggcatggaagagggatgtgattctgttgctgctagggccaggacgcctaaggatcagggcgtggtgcctcccgcactggtccgcggctgctggagcagctgccacggctggcatcgcagtggtcttgtttaacctcaagaggtaatctggtggtccgatgcgcggaagttttgatctgctgctatggcctatatgagaataggcctacatgtatggcaagtacctttactttctgaagttttcaatggtaataagagtcgtgaacacaaacatgaggtataattgagttcttgtctgatcttttgagttgcacctgatcttttgagttcttgtcttggttcgttcttgattcttggacgaggtgggatttggagagccaagggcggcgcggcagcagcgggtttctcggtcggactagattgtttccatcgagatggtgggcggcggagggcattcgtcgatggaccaccctggcgccaaggacctcgagcgcggcgagctgcgccgtggcgcgcctgagtttgcggacggcgacgatggagacggggaagaaagccagtacttctcggacgcggaggaccggtcgtggccgtcgcactcgcgccacgactccaccgcctacgaggactacgtctcgctgtgcgtgtccgcccgcgcgagctccgtcgacgccgacgccgatgccgacggcgaggccgtcagacaacactgcaggaagtcgtcgtgcgtgtcagagggctcgctggacgacgttgacctggaggccggactgagcgagatcatcaaggccagccctgagaaggccgaacagaactgtcgcatttgccaccttggcctggagagcacggcggtcgagtccggtgccggcatcacgctcggctgctcctgcaagggggacttatcctacgcccacaagcagtgcgccgacacctggttcaagatcagaggcaacaagctggagtagacaccctgtttgtggaaggaggtaccatttcataattcggaatgaatacaaaacctgcaagcattgtgaccattgtgggcttatggcccagtcgtttggaacacggtgctcgacatgcaaatatgtgatctcctctgatgatccggaagattgggactataggcagttggataatccacgtcacttgctgcatggtattgtacatgacaatgggtttggtcaccttgttcggataaatgtgtgttagggtcaagaaatactttctatatgtagatatggatctaattctctaacctcctaacaaacctgctacttctcttatccaaaatcttgtaaatagaattagtgtaagtaattctgcatttttataagcttcttctcatggtcccatgactacccaatgtgagaacaaagggggcatcggccctgaaaaccacgcagacaattgacttcttttttttattcatcattttttgctcgtaaggcttgttctacaagtgtttattatactatactatactcattcagatatatgcctttttgcactttgtttcctgtagtttagtcaccttaggaggtgttatcgataattcttagatcttgtctgtacatgatccctcattcactactagcttccttagcaactcacatttgtattatggttcagaaatgcctccacaataaccaatgacttgtctctggtatgatgtccactagcatgaatccaccataaggatgtttagaaattcattgcatttgctataactgagatttcggatccactggcatcattgtggcttgcatgtcagtactttgtacagtagtaaatatagtaacatatatcattttatgttttgtgatagttccatttttacacttacagagtgttgagtatatacttcaaatttgcttttaggctgggtgagaagtacaaatcaatacatctctgtagctcactgaattaactgatttttccttttagtgcaaatatattatatatgtttgccagaagatcattttgctcttgttttaatccatgtatggtaacttgcactgacattctaagtttgattattggatattattgcctttctttccattttccccaatactcatgagtccatggcagccatcatccagtaagttatctggctatcatttagttgcttcatgtagcagaatgcttcaatagctttggcaatatctataagcttttggatttcaggttcctaagcttgtgattttcagctcttgtattaggctataaatgatatgttgttatcccattttcagcaaatcagaacattcatccagatgaggactaacttgaaggtggtcgataactctggggccaagtgagtgatgtgcatccagtccctgagggggaagaaaggagcaaggctcggggacatgatcatcggatccgtaaaggaggcccagcctcgtggcaaggtcaagaaagaagacgtagtctacggcgtggtcgtccgcgccgccatgaagaaagggcgcagcgacggcagcgaggtccagttcgacgacaacgaggtggtcctcgtgaacaagaagggtgagctgatcggcacccgcgtcttcggccccgtcccccacgagctgaggaagaagaagcacctcaagatcctggccctggctgaacacatcgtttgaggtgtgtcgcagagccaagagccaagtgtttatgggaatgtttttttgtctgtgttctctgtttgaataatgcattgtgaaacgatagcatggaccgtttgaactattttgatgatattgctcgcccatttggatggccaatacgtgttgtgatctattctggagtttcattttttggttacaagctgctttcacatgtatgcagatatccttgtctgcgagttcgtctatgtgatgaacttcgaattagttgccaatagcataatcctattaatcctgattgtatatgtcatacaatttacaaattaatctgtgtaaaatt

SEQ ID NO: 71724 - DNA, 3694 bp, Zea Mays
gccctgccttccatcgtcgcccccatgccacgctccccttccatcctcgctcacttccagccgcccccattcccagttgaaggagccgtccaagaaccgggaaccccatctgggatcaggagcagccgtgtcgcgccactcgtgcgcctgcgcctcgaacctgactttggacgacgccgacggggaccaccctccctccgcatcgaagccgatgagcctctggtggtggtgtccgcggtcgattgaccgattgagccaccgaacagcaccaatcgagcggcattagccccgacctgaagcacacctggccggaatccaaaggatatcgtgcccccgccccgcatcgcgcgatgctcgttgctgagctcccgatgacccacctctcccggagaggacatccctcttctgcatcgacgtcgaactcgaggtccacgccaagatgaagtccgctgccgtagcgtcctcggatccacgtccaccgcgtcgccgtagtccgtaggaggtcgccgccgccgagcaagctgctgtcaccaacgacagcgaggccgccacgctccgcagcgaggttgagcgcctcgagggtctcctcgccgcggagaaggctagccatgaggaggagatgcgcaggggtgcatggctcggggaccagctgcagaccgcgtaccaggagaaggccgccctcgaggaggagatcgagaccctgaagggttccgccactgccgagggcaagggcatggaagagggatgtgattctgttgctgctagggccaggacgcctaaggatcagggcgtggtgcctcccgcactggtccgcggctgctggagcagctgccacggctggcatcgcagtggtcttgtttaacctcaagaggtaatctggtggtccgatgcgcggaagttttgatctgctgctatggcctatatgagaataggcctacatgtatggcaagtacctttactttctgaagttttcaatggtaataagagtcgtgaacacaaacatgaggtataattgagttcttgtctgatcttttgagttgcacctgatcttttgagttcttgtcttggttcgttcttgattcttggacgaggtgggatttggagagccaagggcggcgcggcagcagcgggtttctcggtcggactagattgtttccatcgagatggtgggcggcggagggcattcgtcgatggaccaccctggcgccaaggacctcgagcgcggcgagctgcgccgtggcgcgcctgagtttgcggacggcgacgatggagacggggaagaaagccagtacttctcggacgcggaggaccggtcgtggccgtcgcactcgcgccacgactccaccgcctacgaggactacgtctcgctgtgcgtgtccgcccgcgcgagctccgtcgacgccgacgccgatgccgacggcgaggccgtcagacaacactgcaggaagtcgtcgtgcgtgtcagagggctcgctggacgacgttgacctggaggccggactgagcgagatcatcaaggccagccctgagaaggccgaacagaactgtcgcatttgccaccttggcctggagagcacggcggtcgagtccggtgccggcatcacgctcggctgctcctgcaagggggacttatcctacgcccacaagcagtgcgccgacacctggttcaagatcagaggcaacaaatgccaatcggctggagtagacaccctgtttgtggaaggaggtaccatttcataattcggaatgaatacaaaacctgcaagcattgtgaccattgtgggcttatggcccagtcgtttggaacacggtgctcgacatgcaaatatgtgatctcctctgatgatccggaagattgggactataggcagttggataatccacgtcacttgctgcatggtattgtacatgacaatgggtttggtcaccttgttcggataaatgtgtgttagggtcaagaaatactttctatatgtagatatggatctaattctctaacctcctaacaaacctgctacttctcttatccaaaatcttgtaaatagaattagtgtaagtaattctgcatttttataagcttcttctcatggtcccatgactacccaatgtgagaacaaagggggcatcggccctgaaaaccacgcagacaattgacttcttttttttattcatcattttttgctcgtaaggcttgttctacaagtgtttattatactatactatactcattcagatatatgcctttttgcactttgtttcctgtagtttagtcaccttaggaggtgttatcgataattcttagatcttgtctgtacatgatccctcattcactactagcttccttagcaactcacatttgtattatggttcagaaatgcctccacaataaccaatgacttgtctctggtatgatgtccactagcatgaatccaccataaggatgtttagaaattcattgcatttgctataactgagatttcggatccactggcatcattgtggcttgcatgtcagtactttgtacagtagtaaatatagtaacatatatcattttatgttttgtgatagttccatttttacacttacagagtgttgagtatatacttcaaatttgcttttaggctgggtgagaagtacaaatcaatacatctctgtagctcactgaattaactgatttttccttttagtgcaaatatattatatatgtttgccagaagatcattttgctcttgttttaatccatgtatggtaacttgcactgacattctaagtttgattattggatattattgcctttctttccattttccccaatactcatgagtccatggcagccatcatccagtaagttatctggctatcatttagttgcttcatgtagcagaatgcttcaatagctttggcaatatctataagcttttggatttcaggttcctaagcttgtgattttcagctcttgtattaggctataaatgatatgttgttatcccattttcagcaaatcagaacattcatccagatgaggactaacttgaaggtggtcgataactctggggccaagtgagtgatgtgcatccagtccctgagggggaagaaaggagcaaggctcggggacatgatcatcggatccgtaaaggaggcccagcctcgtggcaaggtcaagaaagaagacgtagtctacggcgtggtcgtccgcgccgccatgaagaaagggcgcagcgacggcagcgaggtccagttcgacgacaacgaggtggtcctcgtgaacaagaagggtgagctgatcggcacccgcgtcttcggccccgtcccccacgagctgaggaagaagaagcacctcaagatcctggccctggctgaacacatcgtttgaggtgtgtcgcagagccaagagccaagtgtttatgggaatgtttttttgtctgtgttctctgtttgaataatgcattgtgaaacgatagcatggaccgtttgaactattttgatgatattgctcgcccatttggatggccaatacgtgttgtgatctattctggagtttcattttttggttacaagctgctttcacatgtatgcagatatccttgtctgcgagttcgtctatgtgatgaacttcgaattagttgccaatagcataatcctattaatcctgattgtatatgtcatacaatttacaaattaatctgtgtaaaatt

SEQ ID NO: 71725 - DNA, 1735 bp, Zea Mays
agcccctctactcatgaattctgtccagccaccacccaccccctgtgcagtggagcctaccactaccagcctcagcctacttcgtagtagtccccgaagccgcgagtcgcgcatacctttaccgcacgccgagaaaggatggcgtcgtggtcgtcgccctcagccgccgccaacgccgcctcgggcgcccgattcggccccttcccgagcggagggcagcggctcgcgccgtgtccgtcgctcgtccgcggaactcccgccccgacgctcgtcctcaggccccacccggacggccgtggccatggcctcctcgcgcacaccgcctcccctccctccttgcggtgccgcgccgtcgccgccgaggtcgggggcctcaacatcgccaacgacgtcacccagctcatcggcaacacaccaatggtgtatctcaacaacgtcgtcaagggctctgtcgccaatgtcgctgctaagctcgagattatggagccctgctgtagcgtcaaggacagggtacagtatgataaatgatgctgaacagaagggcttgattactcctggaaagagtgttttggtggaagcaacaagtggaaacacaggcattggtcttgctttcattgctgcttccaaaggatataagctgatactaacaatgccttcatcaatgagcatggagagaagagtcctccttagagcttttggtgccgaacttgtccttactgatgctgcaaaagggatgaaaggggccttagataaggctacagagattttaaacaagacaccaaattcttacatgcttcaacagttcgataaccctgccaaccctcaggtacattatgagactactggtccagagatctgggaggattcaaaggggaaggtggatatattcattggtggaattggaacaggggggacaatatctggtgccggccgttttctcaaggagaaaaatcctggaattaaggttattggtattgagccttctgaaagtaacatactctccggtggaaaacctggtccacataagatccagggaatcggcgcaggatttgttccaaggaacttggatagcgatattcttgatgaagtaattgagatatcaagtgatgaagctgttgagacagcaaaacagttggctgttcaggaaggattactggttggaatctcctctggagcagccgccgctgctgccataaaggttgccaaaagaccagagaatgctggaaagctgatagtggttgtgtttccgagcttcggcgagaggtacctttcatctgtcctctatcagtccataagagaagaatgtgagaacatgcaacctgagccatgagggagccgtcactttaagcgggcatagtaaatgtttctgaaataagacgcgtagccagcatcagtttgctccacttggaatcatttggccatgctcactctatcctttcgctagcctctatgaccggacctaaactggtgtgtgagaaacatccacgactgtcctcccaactgctttcctaaagccaaacgataacactctcaataattgtctatacgattgaagctgatttgattggtaattgtaaacagcttgtctttggatctttgaagtcaaacaaagtcagttggttgaatcagatggatattgtatgccttttgtgtgtgtgtgtgtgtgaaaaaaaaatctgagttgtgtcattgacggatttccccccaggtggagacgcaacacatctgaagtcct

SEQ ID NO: 71726 - DNA, 2287 bp, Zea Mays
agcccctctactcatgaattctgtccagccaccacccaccccctgtgcagtggagcctaccactaccagcctcagcctacttcgtagtagtccccgaagccgcgagtcgcgcatacctttaccgcacgccgagaaaggatggcgtcgtggtcgtcgccctcagccgccgccaacgccgcctcgggcgcccgattcggccccttcccgagcggagggcagcggctcgcgccgtgtccgtcgctcgtccgcggaactcccgccccgacgctcgtcctcaggccccacccggacggccgtggccatggcctcctcgcgcacaccgcctcccctccctccttgcggtgccgcgccgtcgccgccgaggtcgggggcctcaacatcgccaacgacgtcacccagctcatcggcaacacaccaatggtgtatctcaacaacgtcgtcaagggctctgtcgccaatgtcgctgctaagctcgagattatggagccctgctgtagcgtcaaggacaggatagggtacagtatgataaatgatgctgaacagaagggcttgattactcctggaaagagtgttttggtggaagcaacaagtggaaacacaggcattggtcttgctttcattgctgcttccaaaggatataagctgatactaacaatgccttcatcaatgagcatggagagaagagtcctccttagagcttttggtgccgaacttgtccttactgatgctgcaaaagggatgaaaggggccttagataaggctacagagattttaaacaagacaccaaattcttacatgcttcaacagttcgataaccctgccaaccctcaggtacattatgagactactggtccagagatctgggaggattcaaaggggaaggtggatatattcattggtggaattggaacaggggggacaatatctggtgccggccgttttctcaaggagaaaaatcctggaattaaggttattggtattgagccttctgaaagtaacatactctccggtggaaaacctggtccacataagatccagggaatcggcgcaggatttgttccaaggaacttggatagcgatattcttgatgaagtaattgagatatcaagtgatgaagctgttgagacagcaaaacagttggctgttcaggaaggattactggtatcataatttttaatgttgcttccttttgtattgtgcctaggacattgttttgacatattgctgttttttgagacatggtccttaatttgcaaacattcaaatttttagtgcaggcaagacaggcctgctaatgtcctcttttttttctcgctgtgtaattgtgttgctatttaagtgcatgcacttgcttctcaaatatgtggatagaatcaatttgtgggcaccattttttagccttaccttatgtgtttattgaaagttagtattttcttagtggttaacttggacaaacctgatcttttgttcttaaagggttctggtcaattttcactgttatattaaaacaaacgcaaagtagaacaattgtaattggctagcaagatatgtgacagtatatgaacttaggaactaacaaaaccatattcaagcagtgtcgcgcttggtagttttgtttgatctacggccaagagcatcatttttttttccttttgaaatgaaactgagaattgtcatgccatataaaagatgagtgaatattgtgtaggttggaatctcctctggagcagccgccgctgctgccataaaggttgccaaaagaccagagaatgctggaaagctgatagtggttgtgtttccgagcttcggcgagaggtacctttcatctgtcctctatcagtccataagagaagaatgtgagaacatgcaacctgagccatgagggagccgtcactttaagcgggcatagtaaatgtttctgaaataagacgcgtagccagcatcagtttgctccacttggaatcatttggccatgctcactctatcctttcgctagcctctatgaccggacctaaactggtgtgtgagaaacatccacgactgtcctcccaactgctttcctaaagccaaacgataacactctcaataattgtctatacgattgaagctgatttgattggtaattgtaaacagcttgtctttggatctttgaagtcaaacaaagtcagttggttgaatcagatggatattgtatgccttttgtgtgtgtgtgtgtgtgaaaaaaaaatctgagttgtgtcattgacggatttccccccaggtggagacgcaacacatctgaagtcct

SEQ ID NO: 71727 - DNA, 871 bp, Zea Mays
ctctgcccaataagttatgcagttgggagtaggttgcatccaaggataacaacattcagaaatactgagatagataaatggcagaggaaaatacaggtgacaacgggtgctgctgcacttaaaggaaagctacatgcatttaatcagaacattagtgaccaagttgctggttacatgagagatccaagccggatgattaacaggatgtacttgaccaactctgctgttagtgtatttggaaaggatgtgggagaacctggaacagctgaggaggggcacaatatggaaggtgatcctgaacttattgacgattctgagttttatcaacaacttctcaaggagtttcttgagtcatgtgataagggggcctcagagtcggcaatttatgctctaaaaaagcagcaggttaaaaagaggaagcttgttgatcgtcgtgcttcaaaaagcagaaagatacggtaccatgtccatgagaaggtcactaatttcatggccccagagcccatggttctgcctccaatggctccgaagttgtttgagaatttgtttgggaatgccagctagaattcattaaagcttggattcactaaagcttgaattcattaaagcatgaattcgttaaagcttgaattcgttaaagcttggaatgtcagctagaattcacattacttgatgcaacttttttgtacttttgtagattgcaagtaggtcagtaggtatgatgttttgagtcgaaagttttgatgacctaccagttttgtgcgagacaagcacaaagtgccatggacaggtgggtcctcgctgaatcgatgttacctacaagattctcaaaaatgagagggagcctacgaaattcttacatgagtttgga

SEQ ID NO: 71728 - DNA, 419 bp, Zea Mays
ctagttgtttctgtttcacttgccaagccagaaccttctttctattgctataccagagtttcggtgtatcttttgcttccttaacaaaaatcttcctacgtttttccgcatgcaatggagagatttagcatcttatagctttcctcctctcagcgccaaaagcatcctacatcacaagaaaaagcattagagtccattttgttccatacacgccatgtatattttcatgctaataatatttcatagatccatatccataattaacccccacagtgtacaagttctggaccagacgacatggaaggtataagaaaaaagaaaaaaaattgtatgtgtgtggaagtgcagtacaaaagctaataacctggtagtgaacataattttaacatttagaaggaatcaatagaattctcaaaaac

SEQ ID NO: 71729 - DNA, 2710 bp, Zea Mays
cgtttctgagttcatcatttcacaatgacagccggtacttatttctgatagtcacgaatataagtcctttaaacgcacacatgagaaaacttctattctaagatttttctggcacgctcagcgaggatatcacaaatatgttttgagttgggcaagctgtctcaaactctgctcaagaaatctggagggctcttctcttctctgcctgtccgccgcaccagctccagcctgcagccagccggcggagaaaagcaggggattcgactggagtcaccctcggagcttgcatctggcagtccagagcacagcaaaagcaaagcacccgattcgattcctaggcaccaggcttttccatccatgtcttccttgctcgacctttcctcatctcctttccatcttcccctggctcctctcgacctttccggtggttggaggaccagaagctgagctagccgcccaccttccggacgctgatgtgattgacccagtcggctggttaggaatttagcatcgcgatacctccagcggtccagcccagcttccagcacggcagtcggttgagtcaccgtccgccactccgttagcagctgccggtcgatcttgccgcgcaagcagcagaaaggccggcccagcggcgctttcttcagccatggcgtgcgcggcggcgcacatgttcgtgtacaacgccactctctgcgcctgcgaccctgggtactacctcttcaccaattccaccggcggcggcaacgcaagcagcgccagtaccagctgcgtgtcattgccccgcagcggcgacgggttcggcgactggcaggtcggatccgtaggcgcgtcccggaaccagagcttctacttcctgaccccggtcctctctctcgacgtcgtccgccgcctcacccagtcccaggccgtcatcctctgggtcgcgctcctcacgctgctctcctggctcgccttctgcgccgccgccaggttcgccggccaggaccccgagcgccacaagaagctcttcggcgcccggttctgggtcagccgcctcgactgcatcttcgacaacaaccactatgcgaatgatcagaaagtactgaggaaaagaaaaacagagctgggcggcacgttctcagtggctaccttgatactattccttggattagtcatagttctgctgtatcaagccatcaacaggcgtaacgcccaagtacatcgagtgaaaccagctaatgctccggatttgctagatttcgtgaatgaccttgagtttcacataaccactgtctcaagcatgtcttgcgcccaagtagtggcaccttctacaatagcaatgggaactcctgggtttatggacttcagggtactgccactgtcaacactcttgacctacagttgccagaacacgagtgagggcccatcaattacactaaagtgcaatggctgccgaatccctccaagagaccactatgtatcctggcagtttgttgacctgccaaggcaaccggctgccgctgttggcttccaatttaacttgactgcgagggaacatggagattataaagatatgagctttatatacaaccaccttcatggcttgaagctcttgcagccacttgttcaggacttcactcaaggttctatcttatcagatctgagcagcttgaatgcttccttgcacaaccctagagatggagttataaatactacactcttcataagttatctttctgactatattgtggagatcagcaatgagaatgtgcttggcccagtcagtattcttgcgagtattggtggcctgtatgccttcagtgttgcattttttctctgtctcatggctcaatgtgaaggcagaataaagaagcttcgtgacgaggataccagaatgctgaaaatcctgagcaaacaacgcgctcaacgaaattggaacaaggttcggaagtttgtcatgtacacatggggtccaagcaacttggatccaaccgatagaagtggaaagtggcctgaaggctcggtgatggattccatccatggatccttccacaagataagaaaaccaactagaagaggaacctctaacgggagcaaacctaaggagcccgctgacatggcagttgaaattgaaagagttggggagacacagcagccaagcagttctaggtagccttggtggatggaggttcaggacatgtcggttcattgctgcagtacctctgaccatgatttgcaatacgaccatactcccggagtggagctgtctatatcaagagtgtaggtagaggcaagtcagcaagtgactaaaactgtacaggatcagtttgaagagtcgtagcaacagggttcaagggcgtgttgaatggccagttgatgagcagcaagtaatctgcttgatgagttggggagttccgttgctggtttaagctggagctggctgcttgtgaagtccggtcaggtgtcagtcttgttattcttttttatttcatttcatgagaagggatagatattatttccttgatttgtacatttcacctcctttgatgccaaattgtaatttggaagaaatcaggaagaagcaaggaaagaccgctattattcgtaggaaggtttgctacatgagtacagggcacgcatagcataggatatgagtacaggggctgcacaggatctgtttggtttggttggctgtataagcctattcaaagtgcaaatttcatttgag

SEQ ID NO: 71730 - DNA, 2722 bp, Zea Mays
acacatgagaaaacttctattctaagatttttctggcacgctcagcgaggatatcacaaatatgttttgagttgggcaagctgtctcaaactctgctcaagaaatctggagggctcttctcttctctgcctgtccgccgcaccagctccagcctgcagccagccggcggagaaaagcaggggattcgactggagtcaccctcggagcttgcatctggcagtccagagcacagcaaaagcaaagcacccgattcgattcctaggcaccaggcttttccatccatgtcttccttgctcgacctttcctcatctcctttccatcttcccctggctcctctcgacctttccggtggttggaggaccagaagctgagctagccgcccaccttccggacgctgatgtgattgacccagtcggctggttaggaatttagcatcgcgatacctccagcggtccagcccagcttccagcacggcagtcggttgagtcaccgtccgccactccgttagcagctgccggtcgatcttgccgcgcaagcagcagaaaggccggcccagcggcgctttcttcagccatggcgtgcgcggcggcgcacatgttcgtgtacaacgccactctctgcgcctgcgaccctgggtactacctcttcaccaattccaccggcggcggcaacgcaagcagcgccagtaccagctgcgtgtcattgccccgcagcggcgacgggttcggcgactggcaggtcggatccgtaggcgcgtcccggaaccagagcttctacttcctgaccccggtcctctctctcgacgtcgtccgccgcctcacccagtcccaggccgtcatcctctgggtcgcgctcctcacgctgctctcctggctcgccttctgcgccgccgccaggttcgccggccaggaccccgagcgccacaagaagctcttcggcgcccggttctgggtcagccgcctcgactgcatcttcgacaacaaccactatgcgaatgatcagaaagtactgaggaaaagaaaaacagagctgggcggcacgttctcagtggctaccttgatactattccttggattagtcatagttctgctgtatcaagccatcaacaggcgtaacgcccaagtacatcgagtgaaaccagctaatgctccggatttgctagatttcgtgaatgaccttgagtttcacataaccactgtctcaagcatgtcttgcgcccaagtagtggcaccttctacaatagcaatgggaactcctgggtttatggacttcagggtactgccactgtcaacactcttgacctacagttgccagaacacgagtgagggcccatcaattacactaaagtgcaatggctgccgaatccctccaagagaccactatgtatcctggcagtttgttgacctgccaaggcaaccggctgccgctgttggcttccaatttaacttgactgcgagggaacatggagattataaagatatgagctttgtgagtggtactttaagctctgacaactatgatgatgccaagctgaaaacattcagagggccggattccaatgtgctcaaaattcaattgtttcctcagatatacaaccaccttcatggcttgaagctcttgcagccacttgttcaggacttcactcaaggttctatcttatcagatctgagcagcttgaatgcttccttgcacaaccctagagatggagttataaatactacactcttcataagttatctttctgactatattgtggagatcagcaatgagaatgtgcttggcccagtcagtattcttgcgagtattggtggcctgtatgccttcagtgttgcattttttctctgtctcatggctcaatgtgaaggcagaataaagaagcttcgtgacgaggataccagaatgctgaaaatcctgagcaaacaacgcgctcaacgaaattggaacaaggttcggaagtttgtcatgtacacatggggtccaagcaacttggatccaaccgatagaagtggaaagtggcctgaaggctcggtgatggattccatccatggatccttccacaagataagaaaaccaactagaagaggaacctctaacgggagcaaacctaaggagcccgctgacatggcagttgaaattgaaagagttggggagacacagcagccaagcagttctaggtagccttggtggatggaggttcaggacatgctgcagtacctctgaccatgatttgcaatacgaccatactcccggagtggagctgtctatatcaagagtgtaggtagaggcaagtcagcaagtgactaaaactgtacaggatcagtttgaagagtcgtagcaacagggttcaagggcgtgttgaatggccagttgatgagcagcaagtaatctgcttgatgagttggggagttccgttgctggtttaagctggagctggctgcttgtgaagtccggtcaggtgtcagtcttgttattcttttttatttcatttcatgagaagggatagatattatttccttgatttgtacatttcacctcctttgatgccaaattgtaatttggaagaaatcaggaagaagcaaggaaagaccgctattattcgtaggaaggtttgctacatgagtacagggcacgcatagcataggatatgagtacaggggctgcacaggatctgtttggtttggttggctgtataagcctattcaaagtgcaaatttcatttgag

SEQ ID NO: 71731 - DNA, 2722 bp, Zea Mays
agaaaacttctattctaagatttttctggcacgctcagcgaggatatcacaaatatgttttgagttgggcaagctgtctcaaactctgctcaagaaatctggagggctcttctcttctctgcctgtccgccgcaccagctccagcctgcagccagccggcggagaaaagcaggggattcgactggagtcaccctcggagcttgcatctggcagtccagagcacagcaaaagcaaagcacccgattcgattcctaggcaccaggcttttccatccatgtcttccttgctcgacctttcctcatctcctttccatcttcccctggctcctctcgacctttccggtggttggaggaccagaagctgagctagccgcccaccttccggacgctgatgtgattgacccagtcggctggttaggaatttagcatcgcgatacctccagcggtccagcccagcttccagcacggcagtcggttgagtcaccgtccgccactccgttagcagctgccggtcgatcttgccgcgcaagcagcagaaaggccggcccagcggcgctttcttcagccatggcgtgcgcggcggcgcacatgttcgtgtacaacgccactctctgcgcctgcgaccctgggtactacctcttcaccaattccaccggcggcggcaacgcaagcagcgccagtaccagctgcgtgtcattgccccgcagcggcgacgggttcggcgactggcaggtcggatccgtaggcgcgtcccggaaccagagcttctacttcctgaccccggtcctctctctcgacgtcgtccgccgcctcacccagtcccaggccgtcatcctctgggtcgcgctcctcacgctgctctcctggctcgccttctgcgccgccgccaggttcgccggccaggaccccgagcgccacaagaagctcttcggcgcccggttctgggtcagccgcctcgactgcatcttcgacaacaaccactatgcgaatgatcagaaagtactgaggaaaagaaaaacagagctgggcggcacgttctcagtggctaccttgatactattccttggattagtcatagttctgctgtatcaagccatcaacaggcgtaacgcccaagtacatcgagtgaaaccagctaatgctccggatttgctagatttcgtgaatgaccttgagtttcacataaccactgtctcaagcatgtcttgcgcccaagtagtggcaccttctacaatagcaatgggaactcctgggtttatggacttcagggtactgccactgtcaacactcttgacctacagttgccagaacacgagtgagggcccatcaattacactaaagtgcaatggctgccgaatccctccaagagaccactatgtatcctggcagtttgttgacctgccaaggcaaccggctgccgctgttggcttccaatttaacttgactgcgagggaacatggagattataaagatatgagctttgtgagtggtactttaagctctgacaactatgatgatgccaagctgaaaacattcagagggccggattccaatgtgctcaaaattcaattgtttcctcagatatacaaccaccttcatggcttgaagctcttgcagccacttgttcaggacttcactcaaggttctatcttatcagatctgagcagcttgaatgcttccttgcacaaccctagagatggagttataaatactacactcttcataagttatctttctgactatattgtggagatcagcaatgagaatgtgcttggcccagtattcttgcgagtattggtggcctgtatgccttcagtgttgcattttttctctgtctcatggctcaatgtgaaggcagaataaagaagcttcgtgacgaggataccagaatgctgaaaatcctgagcaaacaacgcgctcaacgaaattggaacaaggttcggaagtttgtcatgtacacatggggtccaagcaacttggatccaaccgatagaagtggaaagtggcctgaaggctcggtgatggattccatccatggatccttccacaagataagaaaaccaactagaagaggaacctctaacgggagcaaacctaaggagcccgctgacatggcagttgaaattgaaagagttggggagacacagcagccaagcagttctaggtagccttggtggatggaggttcaggacatgtcggttcattgctgcagtacctctgaccatgatttgcaatacgaccatactcccggagtggagctgtctatatcaagagtgtaggtagaggcaagtcagcaagtgactaaaactgtacaggatcagtttgaagagtcgtagcaacagggttcaagggcgtgttgaatggccagttgatgagcagcaagtaatctgcttgatgagttggggagttccgttgctggtttaagctggagctggctgcttgtgaagtccggtcaggtgtcagtcttgttattcttttttatttcatttcatgagaagggatagatattatttccttgatttgtacatttcacctcctttgatgccaaattgtaatttggaagaaatcaggaagaagcaaggaaagaccgctattattcgtaggaaggtttgctacatgagtacagggcacgcatagcataggatatgagtacaggggctgcacaggatctgtttggtttggttggctgtataagcctattcaaagtgcaaatttcatttgag

SEQ ID NO: 71732 - DNA, 2678 bp, Zea Mays
cacaaatatgttttgagttgggcaagctgtctcaaactctgctcaagaaatctggagggctcttctcttctctgcctgtccgccgcaccagctccagcctgcagccagccggcggagaaaagcaggggattcgactggagtcaccctcggagcttgcatctggcagtccagagcacagcaaaagcaaagcacccgattcgattcctaggcaccaggcttttccatccatgtcttccttgctcgacctttcctcatctcctttccatcttcccctggctcctctcgacctttccggtggttggaggaccagaagctgagctagccgcccaccttccggacgctgatgtgattgacccagtcggctggttaggaatttagcatcgcgatacctccagcggtccagcccagcttccagcacggcagtcggttgagtcaccgtccgccactccgttagcagctgccggtcgatcttgccgcgcaagcagcagaaaggccggcccagcggcgctttcttcagccatggcgtgcgcggcggcgcacatgttcgtgtacaacgccactctctgcgcctgcgaccctgggtactacctcttcaccaattccaccggcggcggcaacgcaagcagcgccagtaccagctgcgtgtcattgccccgcagcggcgacgggttcggcgactggcaggtcggatccgtaggcgcgtcccggaaccagagcttctacttcctgaccccggtcctctctctcgacgtcgtccgccgcctcacccagtcccaggccgtcatcctctgggtcgcgctcctcacgctgctctcctggctcgccttctgcgccgccgccaggttcgccggccaggaccccgagcgccacaagaagctcttcggcgcccggttctgggtcagccgcctcgactgcatcttcgacaacaaccactatgcgaatgatcagaaagtactgaggaaaagaaaaacagagctgggcggcacgttctcagtggctaccttgatactattccttggattagtcatagttctgctgtatcaagccatcaacaggcgtaacgcccaagtacatcgagtgaaaccagctaatgctccggatttgctagatttcgtgaatgaccttgagtttcacataaccactgtctcaagcatgtcttgcgcccaagtagtggcaccttctacaatagcaatgggaactcctgggtttatggacttcagggtactgccactgtcaacactcttgacctacagttgccagaacacgagtgagggcccatcaattacactaaagtgcaatggctgccgaatccctccaagagaccactatgtatcctggcagtttgttgacctgccaaggcaaccggctgccgctgttggcttccaatttaacttgactgcgagggaacatggagattataaagatatgagctttgtgagtggtactttaagctctgacaactatgatgatgccaagctgaaaacattcagagggccggattccaatgtgctcaaaattcaattgtttcctcagatatacaaccaccttcatggcttgaagctcttgcagccacttgttcaggacttcactcaaggttctatcttatcagatctgagcagcttgaatgcttccttgcacaaccctagagatggagttataaatactacactcttcataagttatctttctgactatattgtggagatcagcaatgagaatgtgcttggcccagtcagtattcttgcgagtattggtggcctgtatgccttcagtgttgcattttttctctgtctcatggctcaagtgaaggcagaataaagaagcttcgtgacgaggataccagaatgctgaaaatcctgagcaaacaacgcgctcaacgaaattggaacaaggttcggaagtttgtcatgtacacatggggtccaagcaacttggatccaaccgatagaagtggaaagtggcctgaaggctcggtgatggattccatccatggatccttccacaagataagaaaaccaactagaagaggaacctctaacgggagcaaacctaaggagcccgctgacatggcagttgaaattgaaagagttggggagacacagcagccaagcagttctaggtagccttggtggatggaggttcaggacatgtcggttcattgctgcagtacctctgaccatgatttgcaatacgaccatactcccggagtggagctgtctatatcaagagtgtaggtagaggcaagtcagcaagtgactaaaactgtacaggatcagtttgaagagtcgtagcaacagggttcaagggcgtgttgaatggccagttgatgagcagcaagtaatctgcttgatgagttggggagttccgttgctggtttaagctggagctggctgcttgtgaagtccggtcaggtgtcagtcttgttattcttttttatttcatttcatgagaagggatagatattatttccttgatttgtacatttcacctcctttgatgccaaattgtaatttggaagaaatcaggaagaagcaaggaaagaccgctattattcgtaggaaggtttgctacatgagtacagggcacgcatagcataggatatgagtacaggggctgcacaggatctgtttggtttggttggctgtataagcctattcaaagtgcaaatttcatttgag

SEQ ID NO: 71733 - DNA, 2557 bp, Zea Mays
ctcaaactctgctcaagaaatctggagggctcttctcttctctgcctgtccgccgcaccagctccagcctgcagccagccggcggagaaaagcaggggattcgactggagtcaccctcggagcttgcatctggcagtccagagcacagcaaaagcaaagcacccgattcgattcctaggcaccaggcttttccatccatgtcttccttgctcgacctttcctcatctcctttccatcttcccctggctcctctcgacctttccggtggttggaggaccagaagctgagctagccgcccaccttccggacgctgatgtgattgacccagtcggctggttaggaatttagcatcgcgatacctccagcggtccagcccagcttccagcacggcagtcggttgagtcaccgtccgccactccgttagcagctgccggtcgatcttgccgcgcaagcagcagaaaggccggcccagcggcgctttcttcagccatggcgtgcgcggcggcgcacatgttcgtgtacaacgccactctctgcgcctgcgaccctgggtactacctcttcaccaattccaccggcggcggcaacgcaagcagcgccagtaccagctgcgtgtcattgccccgcagcggcgacgggttcggcgactggcaggtcggatccgtaggcgcgtcccggaaccagagcttctacttcctgaccccggtcctctctctcgacgtcgtccgccgcctcacccagtcccaggccgtcatcctctgggtcgcgctcctcacgctgctctcctggctcgccttctgcgccgccgccaggttcgccggccaggaccccgagcgccacaagaagctcttcggcgcccggttctgggtcagccgcctcgactgcatcttcgacaacaaccactatgcgtctgctgtatcaagccatcaacaggcgtaacgcccaagtacatcgagtgaaaccagctaatgctccggatttgctagatttcgtgaatgaccttgagtttcacataaccactgtctcaagcatgtcttgcgcccaagtagtggcaccttctacaatagcaatgggaactcctgggtttatggacttcagggtactgccactgtcaacactcttgacctacagttgccagaacacgagtgagggcccatcaattacactaaagtgcaatggctgccgaatccctccaagagaccactatgtatcctggcagtttgttgacctgccaaggcaaccggctgccgctgttggcttccaatttaacttgactgcgagggaacatggagattataaagatatgagctttgtgagtggtactttaagctctgacaactatgatgatgccaagctgaaaacattcagagggccggattccaatgtgctcaaaattcaattgtttcctcagatatacaaccaccttcatggcttgaagctcttgcagccacttgttcaggacttcactcaaggttctatcttatcagatctgagcagcttgaatgcttccttgcacaaccctagagatggagttataaatactacactcttcataagttatctttctgactatattgtggagatcagcaatgagaatgtgcttggcccagtcagtattcttgcgagtattggtggcctgtatgccttcagtgttgcattttttctctgtctcatggctcaatgtgaaggcagaataaagaagcttcgtgacgaggataccagaatgctgaaaatcctgagcaaacaacgcgctcaacgaaattggaacaaggttcggaagtttgtcatgtacacatggggtccaagcaacttggatccaaccgatagaagtggaaagtggcctgaaggctcggtgatggattccatccatggatccttccacaagataagaaaaccaactagaagaggaacctctaacgggagcaaacctaaggagcccgctgacatggcagttgaaattgaaagagttggggagacacagcagccaagcagttctaggtagccttggtggatggaggttcaggacatgtcggttcattgctgcagtacctctgaccatgatttgcaatacgaccatactcccggagtggagctgtctatatcaagagtgtaggtagaggcaagtcagcaagtgactaaaactgtacaggatcagtttgaagagtcgtagcaacagggttcaagggcgtgttgaatggccagttgatgagcagcaagtaatctgcttgatgagttggggagttccgttgctggtttaagctggagctggctgcttgtgaagtccggtcaggtgtcagtcttgttattcttttttatttcatttcatgagaagggatagatattatttccttgatttgtacatttcacctcctttgatgccaaattgtaatttggaagaaatcaggaagaagcaaggaaagaccgctattattcgtaggaaggtttgctacatgagtacagggcacgcatagcataggatatgagtacaggggctgcacaggatctgtttggtttggttggctgtataagcctattcaaagtgcaaatttcatttgag

SEQ ID NO: 71734 - DNA, 2657 bp, Zea Mays
ctcaaactctgctcaagaaatctggagggctcttctcttctctgcctgtccgccgcaccagctccagcctgcagccagccggcggagaaaagcaggggattcgactggagtcaccctcggagcttgcatctggcagtccagagcacagcaaaagcaaagcacccgattcgattcctaggcaccaggcttttccatccatgtcttccttgctcgacctttcctcatctcctttccatcttcccctggctcctctcgacctttccggtggttggaggaccagaagctgagctagccgcccaccttccggacgctgatgtgattgacccagtcggctggttaggaatttagcatcgcgatacctccagcggtccagcccagcttccagcacggcagtcggttgagtcaccgtccgccactccgttagcagctgccggtcgatcttgccgcgcaagcagcagaaaggccggcccagcggcgctttcttcagccatggcgtgcgcggcggcgcacatgttcgtgtacaacgccactctctgcgcctgcgaccctgggtactacctcttcaccaattccaccggcggcggcaacgcaagcagcgccagtaccagctgcgtgtcattgccccgcagcggcgacgggttcggcgactggcaggtcggatccgtaggcgcgtcccggaaccagagcttctacttcctgaccccggtcctctctctcgacgtcgtccgccgcctcacccagtcccaggccgtcatcctctgggtcgcgctcctcacgctgctctcctggctcgccttctgcgccgccgccaggttcgccggccaggaccccgagcgccacaagaagctcttcggcgcccggttctgggtcagccgcctcgactgcatcttcgacaacaaccactatgcgaatgatcagaaagtactgaggaaaagaaaaacagagctgggcggcacgttctcagtggctaccttgatactattccttggattagtcatagttctgctgtatcaagccatcaacaggcgtaacgcccaagtacatcgagtgaaaccagctaatgctccggatttgctagatttcgtgaatgaccttgagtttcacataaccactgtctcaagcatgtcttgcgcccaagtagtggcaccttctacaatagcaatgggaactcctgggtttatggacttcagggtactgccactgtcaacactcttgacctacagttgccagaacacgagtgagggcccatcaattacactaaagtgcaatggctgccgaatccctccaagagaccactatgtatcctggcagtttgttgacctgccaaggcaaccggctgccgctgttggcttccaatttaacttgactgcgagggaacatggagattataaagatatgagctttgtgagtggtactttaagctctgacaactatgatgatgccaagctgaaaacattcagagggccggattccaatgtgctcaaaattcaattgtttcctcagatatacaaccaccttcatggcttgaagctcttgcagccacttgttcaggacttcactcaaggttctatcttatcagatctgagcagcttgaatgcttccttgcacaaccctagagatggagttataaatactacactcttcataagttatctttctgactatattgtggagatcagcaatgagaatgtgcttggcccagtcagtattcttgcgagtattggtggcctgtatgccttcagtgttgcattttttctctgtctcatggctcaatgtgaaggcagaataaagaagcttcgtgacgaggataccagaatgctgaaaatcctgagcaaacaacgcgctcaacgaaattggaacaaggttcggaagtttgtcatgtacacatggggtccaagcaacttggatccaaccgatagaagtggaaagtggcctgaaggctcggtgatggattccatccatggatccttccacaagataagaaaaccaactagaagaggaacctctaacgggagcaaacctaaggagcccgctgacatggcagttgaaattgaaagagttggggagacacagcagccaagcagttctaggtagccttggtggatggaggttcaggacatgtcggttcattgtaatgctgctgcagtacctctgaccatgatttgcaatacgaccatactcccggagtggagctgtctatatcaagagtgtaggtagaggcaagtcagcaagtgactaaaactgtacaggatcagtttgaagagtcgtagcaacagggttcaagggcgtgttgaatggccagttgatgagcagcaagtaatctgcttgatgagttggggagttccgttgctggtttaagctggagctggctgcttgtgaagtccggtcaggtgtcagtcttgttattcttttttatttcatttcatgagaagggatagatattatttccttgatttgtacatttcacctcctttgatgccaaattgtaatttggaagaaatcaggaagaagcaaggaaagaccgctattattcgtaggaaggtttgctacatgagtacagggcacgcatagcataggatatgagtacaggggctgcacaggatctgtttggtttggttggctgtataagcctattcaaagtgcaaatttcatttgag

SEQ ID NO: 71735 - DNA, 2558 bp, Zea Mays
ctcaaactctgctcaagaaatctggagggctcttctcttctctgcctgtccgccgcaccagctccagcctgcagccagccggcggagaaaagcaggggattcgactggagtcaccctcggagcttgcatctggcagtccagagcacagcaaaagcaaagcacccgattcgattcctaggcaccaggcttttccatccatgtcttccttgctcgacctttcctcatctcctttccatcttcccctggctcctctcgacctttccggtggttggaggaccagaagctgagctagccgcccaccttccggacgctgatgtgattgacccagtcggctggttaggaatttagcatcgcgatacctccagcggtccagcccagcttccagcacggcagtcggttgagtcaccgtccgccactccgttagcagctgccggtcgatcttgccgcgcaagcagcagaaaggccggcccagcggcgctttcttcagccatggcgtgcgcggcggcgcacatgttcgtgtacaacgccactctctgcgcctgcgaccctgggtactacctcttcaccaattccaccggcggcggcaacgcaagcagcgccagtaccagctgcgtgtcattgccccgcagcggcgacgggttcggcgactggcaggtcggatccgtaggcgcgtcccggaaccagagcttctacttcctgaccccggtcctctctctcgacgtcgtccgccgcctcacccagtcccaggccgtcatcctctgggtcgcgctcctcacgctgctctcctggctcgccttctgcgccgccgccaggttcgccggccaggaccccgagcgccacaagaagctcttcggcgcccggttctgggtcagccgcctcgactgcatcttcgacaacaaccactatgcgaatgatcagaaagtactgaggaaaagaaaaacagagctgggcggcacgttctcagtggctaccttgatactattccttggattagtcatagttctgctgtatcaagccatcaacaggcgtaacgcccaagtacatcgagtgaaaccagctaatgctccggatttgctagatttcgtgaatgaccttgagtttcacataaccactgtctcaagcatgtcttgcgcccaagtagtggcaccttctacaatagcaatgggaactcctgggtttatggacttcagggtactgccactgtcaacactcttgacctacagttgccagaacacgagtgagggcccatcaattacactaaagtgcaatggctgccgaatccctccaagagaccactatgtatcctggcagtttgttgacctgccaaggcaaccggctgccgctgttggcttccaatttaacttgactgcgagggaacatggagattataaagatatgagctttgtgagtggtactttaagctctgacaactatgatgatgccaagctgaaaacattcagagggccggattccaatgtgctcaaaattcaattgtttcctcagatatacaaccaccttcatggcttgaagctcttgcagccacttgttcaggacttcactcaaggttctatcttatcagatctgagcagcttgaatgcttccttgcacaaccctagagatggagttataaatactacactcttcataagttatctttctgactatattgtggagatcagcaatgagaatgtgcttggcccagtcagtattcttgcgagtattggtggcctgtatgccttcagtgttgcattttttctctgtctcatggctcaatgtgaaggcagaataaagaagcttcgtgacgaggataccagaatgctgaaaatcctgagcaaacaacgcgctcaacgaaattggaacaaggttcggaagtttgtcatgtacacatggggtccaagcaacttggatccaaccgatagaagtggaaagtggcctgaaggctcggtgatggattccatccatggatccttccacaagataagaaaaccaactagaagaggaacctctaacgggagcaaacctaaggagcccgctgacatggctgcagtacctctgaccatgatttgcaatacgaccatactcccggagtggagctgtctatatcaagagtgtaggtagaggcaagtcagcaagtgactaaaactgtacaggatcagtttgaagagtcgtagcaacagggttcaagggcgtgttgaatggccagttgatgagcagcaagtaatctgcttgatgagttggggagttccgttgctggtttaagctggagctggctgcttgtgaagtccggtcaggtgtcagtcttgttattcttttttatttcatttcatgagaagggatagatattatttccttgatttgtacatttcacctcctttgatgccaaattgtaatttggaagaaatcaggaagaagcaaggaaagaccgctattattcgtaggaaggtttgctacatgagtacagggcacgcatagcataggatatgagtacaggggctgcacaggatctgtttggtttggttggctgtataagcctattcaaagtgcaaatttcatttgag

SEQ ID NO: 71736 - DNA, 1604 bp, Zea Mays
cctgaccgtcccgtactgtcgcacgaaccctaactactagccgtccctgccgccttccccttcggaggtactactggattcaacaacaaccccctctcgcgggtcccgggccgacgcgacgaaagacaaaggcagcggaggtggcgctgcagtccaccagttcttgggctcttggcaacgtcgccatcgtcatcggccatggttcttggcaacgtcgccatcgtcatcggctccggaattgtcggatcagtacttacaggcgttcttgaccaagagtgcaaagccaggcaaggatgggccgtctaccagcagtccacatactgctgagttgttcagccaggtcaatcatctcagagaggagctgcaaatgttgtctaaatcaaatcatgtttccattgtcactgttgatggtagacctggccctggtgcatacggtataacagctgttgttattggaggagctattggctatttattcataagatggaaggggtggaaactttctgatatgatgtttgtgacgaagcgtgggttatcagatgcttgcaatgtagtggggaaacaagtggatcaggtttcagaaagtgttaatgttgcaaagaaacatcttgctggaaggattgatcgtgtagattgtagtttagatgaatgccaagaaattacagaagccacaaaggaagaggttacaatcatccatggagatctaagtgccttccagaaggaaatggaaacagttcatctcgtagttcgtagtctggagacaaagcttggacgcctagcttatactcaagatcggacaacacgaggaatatatgatttgtgtgaattcactaaaagattggatcagagcccgaaagctgatactcgtcaggttacatcatcaacttctcgtcctgctattgaatcctcagagagaattgttagggttgcttctttacccctggctttggaaccggagtctcctagaattgaggcacctaaggttgtgcgctcatctacagtcatgtcagcatcgggtcttagtttgctagctggaactacaataccacctaaaagagatcaaccgggtgtgtacagcagagcaagttcaatgaaggaaggatcctctgagttgccgagtggcgtgcgaaactcagcagaaccaagccccaggagatctggtgcttcaaccctgtttggagggcttgggtttctaaggaactacaccagctgagatgtatgtgctcagataggtgttttttttcccaaggagaccagcagtttgagctgtatatgtaggtagtaggtaatagggcagttgccaaaaggacggctcccttttcctattgggaattgcgaatttttgtaggaactaataccttgcagagcaatgcctcgatgccaagatacaaactttaaatttaatgttgggttagatgctggaagagaaacatcctattgtatattgcagtggaatgtactgctggaatacatgtttgggaaggagcaattacaactaagtttgtgcttttggtggactggactctacttgctggctgatgttaggatagcatgcactgtatgcagctgcaggctgcagccatgtctggaatacacggttggat

SEQ ID NO: 71737 - DNA, 1590 bp, Zea Mays
ccgtactgtcgcacgaaccctaactactagccgtccctgccgccttccccttcggaggtactactggattcaacaacaaccccctctcgcgggtcccgggccgacgcgacgaaagacaaaggcagcggaggtggcgctgcagtccaccagttcttgggctcttggcaacgtcgccatcgtcatcggccatggttcttggcaacgtcgccatcgtcatcggctccggaattgtcggatcagtacttacaggcggtgagtttggccttcccgacttcagggatgcaatctctggtgctttcaagttcttgaccaagagtgcaaagccaggcaaggatgggccgtctaccagcagtccacatactgctgagttgttcagccaggtcaatcatctcagagaggagctgcaaatgttgtctaaatcaaatcatgtttccattgtcactgttgatggtagacctggccctggtgcatacggtataacagctgttgttattggaggagctattggctatttattcataagatggaaggggtggaaactttctgatatgatgtttgtgacgaagcgtgggttatcagatgcttgcaatgtagtggggaaacaagtggatcaggtttcagaaagtgttaatgttgcaaagaaacatcttgctggaaggattgatcgtgtagattgtagtttagatgaatgccaagaaattacagaagccacaaaggaagaggttacaatcatccatggagatctaagtgccttccagaaggaaatggaaacagttcatctcgtagttcgtagtctggagacaaagcttggacgcctagcttatactcaagatcggacaacacgaggaatatatgatttgtgtgaattcactaaaagattggatcagagcccgaaagctgatactcgtcaggttgcttctttacccctggctttggaaccggagtctcctagaattgaggcacctaaggttgtgcgctcatctacagtcatgtcagcatcgggtcttagtttgctagctggaactacaataccacctaaaagagatcaaccgggtgtgtacagcagagcaagttcaatgaaggaaggatcctctgagttgccgagtggcgtgcgaaactcagcagaaccaagccccaggagatctggtgcttcaaccctgtttggagggcttgggtttctaaggaactacaccagctgagatgtatgtgctcagataggtgttttttttcccaaggagaccagcagtttgagctgtatatgtaggtagtaggtaatagggcagttgccaaaaggacggctcccttttcctattgggaattgcgaatttttgtaggaactaataccttgcagagcaatgcctcgatgccaagatacaaactttaaatttaatgttgggttagatgctggaagagaaacatcctattgtatattgcagtggaatgtactgctggaatacatgtttgggaaggagcaattacaactaagtttgtgcttttggtggactggactctacttgctggctgatgttaggatagcatgcactgtatgcagctgcaggctgcagccatgtctggaatacacggttggat

SEQ ID NO: 71738 - DNA, 1513 bp, Zea Mays
gtacgcgacgcatgttgtcccttggggaattgtcggatcagtacttacaggcggtgagtttggccttcccgacttcagggatgcaatctctggtgctttcaagttcttgaccaagagtgcaaagccaggcaaggatgggccgtctaccagcagtccacatactgctgagttgttcagccaggtcaatcatctcagagaggagctgcaaatgttgtctaaatcaaatcatgtttccattgtcactgttgatggtagacctggccctggtgcatacggtataacagctgttgttattggaggagctattggctatttattcataagatggaaggggtggaaactttctgatatgatgtttgtgacgaagcgtgggttatcagatgcttgcaatgtagtggggaaacaagtggatcaggtttcagaaagtgttaatgttgcaaagaaacatcttgctggaaggattgatcgtgtagattgtagtttagatgaatgccaagaaattacagaagccacaaaggaagaggttacaatcatccatggagatctaagtgccttccagaaggaaatggaaacagttcatctcgtagttcgtagtctggagacaaagcttggacgcctagcttatactcaagatcggacaacacgaggaatatatgatttgtgtgaattcactaaaagattggatcagagcccgaaagctgatactcgtcaggttacatcatcaacttctcgtcctgctattgaatcctcagagagaattgttagggtaaaattattgagataccttacatttttaaaatttgaatcttcactaattgatccccacatacacaggttgcttctttacccctggctttggaaccggagtctcctagaattgaggcacctaaggttgtgcgctcatctacagtcatgtcagcatcgggtcttagtttgctagctggaactacaataccacctaaaagagatcaaccgggtgtgtacagcagagcaagttcaatgaaggaaggatcctctgagttgccgagtggcgtgcgaaactcagcagaaccaagccccaggagatctggtgcttcaaccctgtttggagggcttgggtttctaaggaactacaccagctgagatgtatgtgctcagataggtgttttttttcccaaggagaccagcagtttgagctgtatatgtaggtagtaggtaatagggcagttgccaaaaggacggctcccttttcctattgggaattgcgaatttttgtaggaactaataccttgcagagcaatgcctcgatgccaagatacaaactttaaatttaatgttgggttagatgctggaagagaaacatcctattgtatattgcagtggaatgtactgctggaatacatgtttgggaaggagcaattacaactaagtttgtgcttttggtggactggactctacttgctggctgatgttaggatagcatgcactgtatgcagctgcaggctgcagccatgtctggaatacacggttggat

SEQ ID NO: 71739 - DNA, 1814 bp, Zea Mays
gccatcgccatcgccgccgtcaattgctgccgggagtctccggctacatcgcggcggagaagaagaaggttgttgacaagatgcaatcaggtggggccaagaacaatcggcgagctgagttgccaactattggccttgccgagcaagtgatagaggaacttgaaacactgaaagccaaagatgtagactggcagggaaaatgctctggcacagtatatattgctggaagtgagtctgagggtcattttcaattgataaacaaggcgtactctatgttttcacacaccaatccgctccatcaagatgtatttaagagcgtagcaaacatggaagctgaagtcgttgcaatgacagcggctttacttggcagcaaagaaaaatcatctggtggacaaatttgcggcaacatgacatcaggtggaactgaaagcatattattagcagtcaaaacatcacgtgactatatgcgatcaaagaaaggaattacaaggcctgaaatgataattgctgaatcagcacattctgcatatgacaaagctgctcaatacttcaatattaaagtgcggcgtgtacctgtgaacaaagagtttcttgcagatgtgaaaggattcaaacgatgcataaatggaaacaccataatgatggttggatctacaccaggatttccgcatggtttaattgatcctattgaggaacttggggaactggcttcgcgctatgacatttgcttgcatgttgatttatgccttggtggctttgtgctgccttttgctcataagcttgggtaccctattcctccctttgatttttctgtcaagggtgttacatccatctcatctgatgttcataagtacggattagcaccaaaaggcacaagcattgtcctgtacagaaatcatgaaattagaaagcatcagtttgttgctgttactgagtggaccggtggcctttacgtttctcccacaattgctggaagcaggccaggtggattgatagcgggagcttgggctgctatgatgtctctcggactgaacggctacttggacagtacaagccgtatcatggatgtttcaaagaaaatacaaagagggattggagagatcccagggttgtttgtgatagggaaaccggatatgaccgttgtggcgttcggctcagacgttgtcgacatatttgaggtgaacgacataatgtcatcaaaaggttggcatctcaatgctctgcagagacctaacagcttgcatatctgtgtgacccttcaacacacgactgtttacgaccaattcctgaaggatctgcaagactctgtcaacactgtgaaagcaaacccaggcccgattagcggcggaaaggctcctatctacggcgccgcagggaagatgccggacagaggcacggtgagggagctgctcgtggagttcatggacagctcttgctgaattcattatggcttgtgagaagaatttgttcttgtacatgaaacttctatttctttttcaactgaaaaggcagagctcctaccatttgtttaaaaaaaaaacattatggcttgtgaaaaacagtcgcagggctgtgatttgttggcctaggtatacaaagttgtcattaggaaaagcggggaaagtcattgaggcgatacaaccacatgtattcacgattacaagaagtttgtccgtatgattgtatatcaatatcacagcatgcatacgcaatgtgtctggttatatatttatctgttcctataaaacattggttgcatttcacgcgtactcacccccgtgaattctcggtaaaataaagatagaaatgactaa

SEQ ID NO: 71740 - DNA, 1916 bp, Zea Mays
taagcaataagcaagaaacttccacagctttgctttccgtcaacatatctttgacgtatgcggcttgagaaaaaagatgccttttctgctaaagtgccgaagtcccgtacgcagcttcgttgtcggcactgttcacatggtcacggtgccgttgcaccttgcaccacggagttgttgacaagatgcaatcaggtggggccaagaacaatcggcgagctgagttgccaactattggccttgccgagcaagtgatagaggaacttgaaacactgaaagccaaagatgtagactggcagggaaaatgctctggcacagtatatattgctggaagtgagtctgagggtcattttcaattgataaacaaggcgtactctatgttttcacacaccaatccgctccatcaagatgtatttaagagcgtagcaaacatggaagctgaagtcgttgcaatgacagcggctttacttggcagcaaagaaaaatcatctggtggacaaatttgcggcaacatgacatcaggtggaactgaaagcatattattagcagtcaaaacatcacgtgactatatgcgatcaaagaaaggaattacaaggcctgaaatgataattgctgaatcagcacattctgcatatgacaaagctgctcaatacttcaatattaaagtgcggcgtgtacctgtgaacaaagagtttcttgcagatgtgaaaggattcaaacgatgcataaatggaaacaccataatgatggttggatctacaccaggatttccgcatggtttaattgatcctattgaggaacttggggaactggcttcgcgctatgacatttgcttgcatgttgatttatgccttggtggctttgtgctgccttttgctcataagcttgggtaccctattcctccctttgatttttctgtcaagggtgttacatccatctcatctgatgttcataagtacggattagcaccaaaaggcacaagcattgtcctgtacagaaatcatgaaattagaaagcatcagtttgttgctgttactgagtggaccggtggcctttacgtttctcccacaattgctggaagcaggccaggtggattgatagcgggagcttgggctgctatgatgtctctcggactgaacggctacttggacagtacaagccgtatcatggatgtttcaaagaaaatacaaagagggattggagagatcccagggttgtttgtgatagggaaaccggatatgaccgttgtggcgttcggctcagacgttgtcgacatatttgaggtgaacgacataatgtcatcaaaaggttggcatctcaatgctctgcagagacctaacagcttgcatatctgtgtgacccttcaacacacgactgtttacgaccaattcctgaaggatctgcaagactctgtcaacactgtgaaagcaaacccaggcccgattagcggcggaaaggctcctatctacggcgccgcagggaagatgccggacagaggcacggtgagggagctgctcgtggagttcatggacagctcttgctgaattcattatggcttgtgagaagaatttgttcttgtacatgaaacttctatttctttttcaactgaaaaggcagagctcctaccatttgtttaaaaaaaaaacattatggcttgtgaaaaacagtcgcagggctgtgatttgttggcctaggtatacaaagttgtcattaggaaaagcggggaaagtcattgaggcgatacaaccacatgtattcacgattacaagaagtttgtccgtatgattgtatatcaatatcacagcatgcatacgcaatgtgtctggttatatatttatctgttcctataaaacattggttgcatttcacgcgtactcacccccgtgaattctcggtaaaataaagatagaaatgactaa

SEQ ID NO: 71741 - DNA, 1904 bp, Zea Mays
atcaatctcgtttattactaattctgagatttgacatctacatgcatgaaacatggttgttgacaagatgcaatcaggtggggccaagaacaatcggcgagctgagttgccaactattggccttgccgagcaagtgatagaggaacttgaaacactgaaagccaaagatgtagactggcagggaaaatgctctggcacagtatatattgctggaagtgagtctgagggtcattttcaattgataaacaaggcgtactctatgttttcacacaccaatccgctccatcaagatgtatttaagagcgtagcaaacatggaagctgaagtcgttgcaatgacagcggctttacttggcagcaaagaaaaatcatctggtggacaaatttgcggcaacatgacatcaggtggaactgaaagcatattattagcagtcaaaacatcacgtgactatatgcgatcaaagaaaggaattacaaggcctgaaatgtgagataatggttgattatgtttgatttgcttgacaagtacctttttcttttgaaagttttacaacctcctatctatggtgagaaaaggttgttttgcacaggataattgctgaatcagcacattctgcatatgacaaagctgctcaatacttcaatattaaagtgcggcgtgtacctgtgaacaaagagtttcttgcagatgtgaaaggattcaaacgatgcataaatggaaacaccataatgatggttggatctacaccaggatttccgcatggtttaattgatcctattgaggaacttggggaactggcttcgcgctatgacatttgcttgcatgttgatttatgccttggtggctttgtgctgccttttgctcataagcttgggtaccctattcctccctttgatttttctgtcaagggtgttacatccatctcatctgatgttcataagtacggattagcaccaaaaggcacaagcattgtcctgtacagaaatcatgaaattagaaagcatcagtttgttgctgttactgagtggaccggtggcctttacgtttctcccacaattgctggaagcaggccaggtggattgatagcgggagcttgggctgctatgatgtctctcggactgaacggctacttggacagtacaagccgtatcatggatgtttcaaagaaaatacaaagagggattggagagatcccagggttgtttgtgatagggaaaccggatatgaccgttgtggcgttcggctcagacgttgtcgacatatttgaggtgaacgacataatgtcatcaaaaggttggcatctcaatgctctgcagagacctaacagcttgcatatctgtgtgacccttcaacacacgactgtttacgaccaattcctgaaggatctgcaagactctgtcaacactgtgaaagcaaacccaggcccgattagcggcggaaaggctcctatctacggcgccgcagggaagatgccggacagaggcacggtgagggagctgctcgtggagttcatggacagctcttgctgaattcattatggcttgtgagaagaatttgttcttgtacatgaaacttctatttctttttcaactgaaaaggcagagctcctaccatttgtttaaaaaaaaaacattatggcttgtgaaaaacagtcgcagggctgtgatttgttggcctaggtatacaaagttgtcattaggaaaagcggggaaagtcattgaggcgatacaaccacatgtattcacgattacaagaagtttgtccgtatgattgtatatcaatatcacagcatgcatacgcaatgtgtctggttatatatttatctgttcctataaaacattggttgcatttcacgcgtactcacccccgtgaattctcggtaaaataaagatagaaatgactaa

SEQ ID NO: 71742 - DNA, 3156 bp, Zea Mays
ccgtctttcattgccagattcccgaggatctctgctggctgtcttttcttcttttgccttctttcttggtggccccatccgactccgcctgctcttcctcggcgccccatccatctgccttgcgtctgctccctctccaccaaaccctagccggccaacagagcttattgaaggccggctaggcgagagcagcatccaccgccgcgctctcatggcggcgcccaaaccgatctgggtgcgccaggctgaggaggccaagctcaagtccgaggcggagaccgctgccgccgccaaggccgccttcgaggccaccttcaaggccctcgctgccgcacccggcgacgacgacaaggacgccgaccccgccccgccctccccggccgaacccgcctcccccgagtccgatgacgatgccccggccccgccaggcccggtcgacccgtccaagtgctccgccgctggccccggcatcgggggcggctccgccggaactccctccaccttcaccgtcgtcgccaaggaccgccacagccggaggctcaccgccggcggggcgctcgtgcgcgtgcgtgtctcgcctgctgctgcagtcggcggggacgatctcgagggtgctgtcaaggacaacggggacggatcctacacggtcacctacgtcgtccccaagcgcggcaactacatggcgcgccctccagtgccttccccagcctcctcggggccatgcctggttcctcagctggttcctcgagtggagtcatgctgcctggggttggtgcttcattgggggagatatgccgggactacatgaatgggaggtgcacaaaggtggagactgactgtaagttcacccacccaccgcaacagctgctgatgtcgatgcttgcagccacgagttctgtcagtgctcttgggcatgcgccgttggcgccctctgcggctgctatggcagctgcacaggccatcatggctgctcaggcactgcaggcacatgctgcgcaagccaaggccgcaggtggggcttcaggctcagtacacaaagctgatgaagctgatgccctgaagagaacagttcaaattagcaacctgagtccacttcttactgtggattatgttaagcagctatttggattgtgtggtaaagttgttgattgtaccatcacagattcaaaacacattgcttatgttgaatactccaaacctgaagaagcgactgcagcgttggagttcaataacaagaatcaagccattcagctgcaacagatgcaattccagcaggcactaatgatgcaacagtcaatagcaacccaacaggctgctgcacgtgctgccaccatgaaatctgccactgaagcagctgcagcaagggctgctgagataagcaggaagttgaaggcggagggctttggtgcggacaacatggaagaaaagcatgccaaagggaagtcaagatcaccatcgccctctactcgtagatcaaaatctcggtcgagatcacctatcaaataccgtaggagcaggcggtcccgctcctactctcccccagttagacgctcaagggagcagcgatcacgatcaccatcaaaatctcgccactcaaagtacggtagtgatcgatcgcatagggatgataaggacaggtatagcaggtccgggagaagggagagtgaacgatctcgtgatcatcattcatctagttcaaggaggaacagaagtaaaagtagaagtccaaggcataagaagccctccagagttgattctaggtcacccaagaaacaaagagaggaaagtttaagcccatcaaaatcaaggtcagcaagggctggttcaagatcaccacgccatcataagggaagcaaatcatcgccaactcgtgaccgtcattctcgccatagcaggcattcaaggtccagatctcctggcagaaagcaccgtcacagtgataaaagggacagcagaaagtctgagattcaggacgacaaaagaagatctcatagaggtagcagacacgacaaagatgaaagttcagtaaaggacgaaggggaaagatctcatagaagcaatagaggtgacaaagatgaaaggtctgtaaaggatccagtggaagataaagggatggatactaaagttgttgcacataagaggagctcaacagtatctgaagatgaaattctgaacaacaatagtagtaaccataagaaatatagacatgaagttggtttggaagttgatggaaatgatgtgtgctctgctgcagctgacattgataggaaacatgaaactggagtagatggctctttggggggcgctgcagaatcagctatgtgatggctgctgtatcattgagtttgctgtttacagatggattgatgatgatggagaatgctgaactggtgtttattatctccttttctgatttaggagttttatttgcagggcatgaagatcttcggagaacttgagtgctgttcggagtgctcatctgatatattaaaatgctcatgattccatgaagagttcttggagcacatttctgggatgtcggttgaagatacaagggagtatacacttcctcaagtttttcaagggggttgacattggagtatgttttgagggaagtcagtgcatacttcattttgtgaatgaggactatgttgcggatgctcaaccggtgaggattacatgttctatcaggagtgaagacttgtgcacgagagctgcaagtgaacctttctgcatgtggatgcttatttatatcaacatgtgtctcccggataatatagcttgccgcttgcgagttgggatatgagcgctaatctaagcttggagtgattcaccaaaccgctctaagattaaggaaatatagggatattcaaacaacaaatggagttaatccaggtcgtgcctgtgggaaaaacatccatagacttcaatttgttagggaaaaatattttctaaaataagggtgaaatacactgttttttctctttcttttttgctcagaaagaataaaattgagtaaggaggtgctaaattctgtgccctggttcttttccctaaattttcagatttgtttttgaggtaactttacgaaatctggtcgatgtgaattgcaaatgtataaatttgacgtgataaatgacgggaatcaaaatcgag

SEQ ID NO: 71743 - DNA, 3382 bp, Zea Mays
ctctgctggctgtcttttcttcttttgccttctttcttggtggccccatccgactccgcctgctcttcctcggcgccccatccatctgccttgcgtctgctccctctccaccaaaccctagccggccaacagagcttattgaaggccggctaggcgagagcagcatccaccgccgcgctctcatggcggcgcccaaaccgatctgggtgcgccaggctgaggaggccaagctcaagtccgaggcggagaccgctgccgccgccaaggccgccttcgaggccaccttcaaggccctcgctgccgcacccggcgacgacgacaaggacgccgaccccgccccgccctccccggccgaacccgcctcccccgagtccgatgacgatgccccggccccgccaggcccggtcgacccgtccaagtgctccgccgctggccccggcatcgggggcggctccgccggaactccctccaccttcaccgtcgtcgccaaggaccgccacagccggaggctcaccgccggcggggcgctcgtgcgcgtgcgtgtctcgcctgctgctgcagtcggcggggacgatctcgagggtgctgtcaaggacaacggggacggatcctacacggtcacctacgtcgtccccaagcgcggcaactacatggtacacgtcgatctcgacggcgcccccgtcatggggagccccttccccgtcttcttcagcggctccaccgtcacaccatcagccgctttccccaccgcgctacccgcagtcagctctgcctaccccaacatggtcaaccagaccatgcctaatatgcccaattacacaggcgcgccctccagtgccttccccagcctcctcggggccatgcctggttcctcagctggttcctcgagtggagtcatgctgcctggggttggtgcttcattgggggagatatgccgggactacatgaatgggaggtgcacaaaggtggagactgactgtaagttcacccacccaccgcaacagctgctgatgtcgatgcttgcagccacgagttctgtcagtgctcttgggcatgcgccgttggcgccctctgcggctgctatggcagctgcacaggccatcatggctgctcaggcactgcaggcacatgctgcgcaagccaaggccgcaggtggggcttcaggctcagtacacaaagctgatgaagctgatgccctgaagagaacagttcaaattagcaacctgagtccacttcttactgtggattatgttaagcagctatttggattgtgtggtaaagttgttgattgtaccatcacagattcaaaacacattgcttatgttgaatactccaaacctgaagaagcgactgcagcgttggagttcaataacaagaatgttggtggtcgtccattgaatgtggagatggctaaatctcttccttctaaagcaaataataacttgcctatgatgatgcagcaagccattcagctgcaacagatgcaattccagcaggcactaatgatgcaacagtcaatagcaacccaacaggctgctgcacgtgctgccaccatgaaatctgccactgaagcagctgcagcaagggctgctgagataagcaggaagttgaaggcggagggctttggtgcggacaacatggaagaaaagcatgccaaagggaagtcaagatcaccatcgccctctactcgtagatcaaaatctcggtcgagatcacctatcaaataccgtaggagcaggcggtcccgctcctactctcccccagttagacgctcaagggagcagcgatcacgatcaccatcaaaatctcgccactcaaagtacggtagtgatcgatcgcatagggatgataaggacaggtatagcaggtccgggagaagggagagtgaacgatctcgtgatcatcattcatctagttcaaggaggaacagaagtaaaagtagaagtccaaggcataagaagccctccagagttgattctaggtcacccaagaaacaaagagaggaaagtttaagcccatcaaaatcaaggtcagcaagggctggttcaagatcaccacgccatcataagggaagcaaatcatcgccaactcgtgaccgtcattctcgccatagcaggcattcaaggtccagatctcctggcagaaagcaccgtcacagtgataaaagggacagcagaaagtctgagattcaggacgacaaaagaagatctcatagaggtagcagacacgacaaagatgaaagttcagtaaaggacgaaggggaaagatctcatagaagcaatagaggtgacaaagatgaaaggtctgtaaaggatccagtggaagataaagggatggatactaaagttgttgcacataagaggagctcaacagtatctgaagatgaaattctgaacaacaatagtagtaaccataagaaatatagacatgaagttggtttggaagttgatggaaatgatgtgtgctctgctgcagctgacattgataggaaacatgaaactggagtagatggctctttggggggcgctgcagaatcagctatgtgatggctgctgtatcattgagtttgctgtttacagatggattgatgatgatggagaatgctgaactggtgtttattatctccttttctgatttaggagttttatttgcagggcatgaagatcttcggagaacttgagtgctgttcggagtgctcatctgatatattaaaatgctcatgattccatgaagagttcttggagcacatttctgggatgtcggttgaagatacaagggagtatacacttcctcaagtaaagtttttcaagggggttgacattggagtatgttttgagggaagtcagtgcatacttcattttgtgaatgaggactatgttgcggatgctcaaccggtgaggattacatgttctatcaggagtgaagacttgtgcacgagagctgcaagtgaacctttctgcatgtggatgcttatttatatcaacatgtgtctcccggataatatagcttgccgcttgcgagttgggatatgagcgctaatctaagcttggagtgattcaccaaaccgctctaagattaaggaaatatagggatattcaaacaacaaatggagttaatccaggtcgtgcctgtgggaaaaacatccatagacttcaatttgttagggaaaaatattttctaaaataagggtgaaatacactgttttttctctttcttttttgctcagaaagaataaaattgagtaaggaggtgctaaattctgtgccctggttcttttccctaaattttcagatttgtttttgaggtaactttacgaaatctggtcgatgtgaattgcaaatgtataaatttgacgtgataaatgacgggaatcaaaatcgag

SEQ ID NO: 71744 - DNA, 3654 bp, Zea Mays
cttttcttcttttgccttctttcttggtggccccatccgactccgcctgctcttcctcggcgccccatccatctgccttgcgtctgctccctctccaccaaaccctagccggccaacagagcttattgaaggccggctaggcgagagcagcatccaccgccgcgctctcatggcggcgcccaaaccgatctgggtgcgccaggctgaggaggccaagctcaagtccgaggcggagaccgctgccgccgccaaggccgccttcgaggccaccttcaaggccctcgctgccgcacccggcgacgacgacaaggacgccgaccccgccccgccctccccggccgaacccgcctcccccgagtccgatgacgatgccccggccccgccaggcccggtcgacccgtccaagtgctccgccgctggccccggcatcgggggcggctccgccggaactccctccaccttcaccgtcgtcgccaaggaccgccacagccggaggctcaccgccggcggggcgctcgtgcgcgtgcgtgtctcgcctgctgctgcagtcggcggggacgatctcgagggtgctgtcaaggacaacggggacggatcctacacggtcacctacgtcgtccccaagcgcggcaactacatggcgcgccctccagtgccttccccagcctcctcggggccatgcctggttcctcagctggttcctcgagtggagtcatgctgcctggggttggtgcttcattgggggagatatgccgggactacatgaatgggaggtgcacaaaggtggagactgactgtaagttcacccacccaccgcaacagctgctgatgtcgatgcttgcagccacgagttctgtcagtgctcttgggcatgcgccgttggcgccctctgcggctgctatggcagctgcacaggccatcatggctgctcaggcactgcaggcacatgctgcgcaagccaaggccgcaggtggggcttcaggctcagtacacaaagctgatgaagctgatgccctgaagagaacagttcaaattagcaacctgagtccacttcttactgtggattatgttaagcagctatttggattgtgtggtaaagttgttgattgtaccatcacagattcaaaacacattgcttatgttgaatactccaaacctgaagaagcgactgcagcgttggagttcaataacaagaatgttggtggtcgtccattgaatgtggagatggctaaatctcttccttctaaagcaaataataacttgcctatgatgatgcagcaagccattcagctgcaacagatgcaattccagcaggcactaatgatgcaacagtcaatagcaacccaacaggctgctgcacgtgctgccaccatgaaatctgccactgaagcagctgcagcaagggctgctgagataagcaggaagttgaaggcggagggctttggtgcggacaacatggaagaaaagcatgccaaagggaagtcaagatcaccatcgccctctactcgtagatcaaaatctcggtcgagatcacctatcaaataccgtaggagcaggcggtcccgctcctactctcccccagttagacgctcaagggagcagcgatcacgatcaccatcaaaatctcgccactcaaagtacggtagtgatcgatcgcatagggatgataaggacaggtatagcaggtccgggagaagggagagtgaacgatctcgtgatcatcattcatctagttcaaggaggaacagaagtaaaagtagaagtccaaggcataagaagccctccagagttgattctaggtcacccaagaaacaaagagaggaaagtttaagcccatcaaaatcaaggtcagcaagggctggttcaagatcaccacgccatcataagggaagcaaatcatcgccaactcgtgaccgtcattctcgccatagcaggcattcaaggtccagatctcctggcagaaagcaccgtcacagtgataaaagggacagcagaaagtctgagattcaggacgacaaaagaagatctcatagaggtagcagacacgacaaagatgaaagttcagtaaaggacgaaggggaaagatctcatagaagcaatagaggtgacaaagatgaaaggtctgtaaaggatccagtggaagataaagggatggatactaaagttgttgcacataagaggagctcaacagtatctgaagatgaaattctgaacaacaatagtagtaaccataagaaatatagacatgaagttggtttggaagttgatggaaatgatgtgtgctctgctgcagctgacattgataggaaacatgaaactggagtagatggctctttggggggcgctgcagaatcagctatgtgatggctgctgtatcattgagtttgctgtttacagatggattgatgatgatggagaatgctgaactggtgtttattatctccttttctgatttaggagttttatttgcagggcatgaagatcttcggagaacttgagtgctgttcggagtgctcatctgatatattaaaatgctcatgattccatgaagagttcttggagcacatttctgggatgtcggttgaagatacaagggagtatacacttcctcaagtaaagtacacatatacaagactaataaacaactcatcttctaggcacttgcatttgaatcggaatgctttggctagtaaaatggtccaaatatgcttgtctacatacttctgatgcacttaatttgcttgaagttctgtttttatatcttgtatcaggaatggttcaaaaagtttgacttgctataccaatacttgtactttatcttttgacagtcacaatgaattgtgatgtaggttttatccatcttgtctactgctttttgaccagtctacctaaagttggtgcccttggtagctccagagataagctgtgaatcttgaaagttgaaacaattgcattgttacaaatttttttttttaaattttttgcttcactattgtttctgcttttgtctgcattgttcgctgcaccttaccatgctgtgacggttgttgtcatgctggaaaacctgtgcaggtttttcaagggggttgacattggagtatgttttgagggaagtcagtgcatacttcattttgtgaatgaggactatgttgcggatgctcaaccggtgaggattacatgttctatcaggagtgaagacttgtgcacgagagctgcaagtgaacctttctgcatgtggatgcttatttatatcaacatgtgtctcccggataatatagcttgccgcttgcgagttgggatatgagcgctaatctaagcttggagtgattcaccaaaccgctctaagattaaggaaatatagggatattcaaacaacaaatggagttaatccaggtcgtgcctgtgggaaaaacatccatagacttcaatttgttagggaaaaatattttctaaaataagggtgaaatacactgttttttctctttcttttttgctcagaaagaataaaattgagtaaggaggtgctaaattctgtgccctggttcttttccctaaattttcagatttgtttttgaggtaactttacgaaatctggtcgatgtgaattgcaaatgtataaatttgacgtgataaatgacgggaatcaaaatcgag

SEQ ID NO: 71745 - DNA, 3536 bp, Zea Mays
cttttcttcttttgccttctttcttggtggccccatccgactccgcctgctcttcctcggcgccccatccatctgccttgcgtctgctccctctccaccaaaccctagccggccaacagagcttattgaaggccggctaggcgagagcagcatccaccgccgcgctctcatggcggcgcccaaaccgatctgggtgcgccaggctgaggaggccaagctcaagtccgaggcggagaccgctgccgccgccaaggccgccttcgaggccaccttcaaggccctcgctgccgcacccggcgacgacgacaaggacgccgaccccgccccgccctccccggccgaacccgcctcccccgagtccgatgacgatgccccggccccgccaggcccggtcgacccgtccaagtgctccgccgctggccccggcatcgggggcggctccgccggaactccctccaccttcaccgtcgtcgccaaggaccgccacagccggaggctcaccgccggcggggcgctcgtgcgcgtgcgtgtctcgcctgctgctgcagtcggcggggacgatctcgagggtgctgtcaaggacaacggggacggatcctacacggtcacctacgtcgtccccaagcgcggcaactacatggcgcgccctccagtgccttccccagcctcctcggggccatgcctggttcctcagctggttcctcgagtggagtcatgctgcctggggttggtgcttcattgggggagatatgccgggactacatgaatgggaggtgcacaaaggtggagactgactgtaagttcacccacccaccgcaacagctgctgatgtcgatgcttgcagccacgagttctgtcagtgctcttgggcatgcgccgttggcgccctctgcggctgctatggcagctgcacaggccatcatggctgctcaggcactgcaggcacatgctgcgcaagccaaggccgcaggtggggcttcaggctcagtacacaaagctgatgaagctgatgccctgaagagaacagttcaaattagcaacctgagtccacttcttactgtggattatgttaagcagctatttggattgtgtggtaaagttgttgattgtaccatcacagattcaaaacacattgcttatgttgaatactccaaacctgaagaagcgactgcagcgttggagttcaataacaagaatgttggtggtcgtccattgaatgtggagatggctaaatctcttccttctaaagcaaataataacttgcctatgatgatgcagcaagccattcagctgcaacagatgcaattccagcaggcactaatgatgcaacagtcaatagcaacccaacaggctgctgcacgtgctgccaccatgaaatctgccactgaagcagctgcagcaagggctgctgagataagcaggaagttgaaggcggagggctttggtgcggacaacatggaagaaaagcatgccaaagggaagtcaagatcaccatcgccctctactcgtagatcaaaatctcggtcgagatcacctatcaaataccgtaggagcaggcggtcccgctcctactctcccccagttagacgctcaagggagcagcgatcacgatcaccatcaaaatctcgccactcaaagtacggtagtgatcgatcgcatagggatgataaggacaggtatagcaggtccgggagaagggagagtgaacgatctcgtgatcatcattcatctagttcaaggaggaacagaagtaaaagtagaagtccaaggcataagaagccctccagagttgattctaggtcacccaagaaacaaagagaggaaagtttaagcccatcaaaatcaaggtcagcaagggctggttcaagatcaccacgccatcataagggaagcaaatcatcgccaactcgtgaccgtcattctcgccatagcaggcattcaaggtccagatctcctggcagaaagcaccgtcacagtgataaaagggacagcagaaagtctgagattcaggacgacaaaagaagatctcatagaggtagcagacacgacaaagatgaaagttcagtaaaggacgaaggggaaagatctcatagaagcaatagaggtgacaaagatgaaaggtctgtaaaggatccagtggaagataaagggatggatactaaagttgttgcacataagaggagctcaacagtatctgaagatgaaattctgaacaacaatagtagtaaccataagaaatatagacatgaagttggtttggaagttgatggaaatgatgtgtgctctgctgcagctgacattgataggaaacatgaaactggagtagatggctctttggggggcgctgcagaatcagctatgtgatggctgctgtatcattgagtttgctgtttacagatggattgatgatgatggagaatgctgaactggtgtttattatctccttttctgatttaggagttttatttgcagggcatgaagatcttcggagaacttgagtgctgttcggagtgctcatctgatatattaaaatgctcatgattccatgaagagttcttggagcacatttctgggatgtcggttgaagatacaagggagtatacacttcctcaagtttttcaagggggttgacattggagtatgttttgagggaagtcagtgcatacttcattttgtgaatgaggtatgagtccatggatgtggtaaataatgctatcctcatggttagagtagcacccttaggacttgtttggatgtctatacattatcatctaaacaaggcctcaaatgccttagcacagttcttaagtccccaatccttgtatttggtattaataatacaatatgtttgtttgggttacctccccccccccccccccccccaaaaaaaattgcatctgggagtagacttcagctgatgttttagcttttgcaggcctggtatcttgaaaaggaacgtttcatgttcttgctgttccttttcccccactccccaactctgtttggtttggttttggttctcaggactatgttgcggatgctcaaccggtgaggattacatgttctatcaggagtgaagacttgtgcacgagagctgcaagtgaacctttctgcatgtggatgcttatttatatcaacatgtgtctcccggataatatagcttgccgcttgcgagttgggatatgagcgctaatctaagcttggagtgattcaccaaaccgctctaagattaaggaaatatagggatattcaaacaacaaatggagttaatccaggtcgtgcctgtgggaaaaacatccatagacttcaatttgttagggaaaaatattttctaaaataagggtgaaatacactgttttttctctttcttttttgctcagaaagaataaaattgagtaaggaggtgctaaattctgtgccctggttcttttccctaaattttcagatttgtttttgaggtaactttacgaaatctggtcgatgtgaattgcaaatgtataaatttgacgtgataaatgacgggaatcaaaatcgag

SEQ ID NO: 71746 - DNA, 3534 bp, Zea Mays
cttttcttcttttgccttctttcttggtggccccatccgactccgcctgctcttcctcggcgccccatccatctgccttgcgtctgctccctctccaccaaaccctagccggccaacagagcttattgaaggccggctaggcgagagcagcatccaccgccgcgctctcatggcggcgcccaaaccgatctgggtgcgccaggctgaggaggccaagctcaagtccgaggcggagaccgctgccgccgccaaggccgccttcgaggccaccttcaaggccctcgctgccgcacccggcgacgacgacaaggacgccgaccccgccccgccctccccggccgaacccgcctcccccgagtccgatgacgatgccccggccccgccaggcccggtcgacccgtccaagtgctccgccgctggccccggcatcgggggcggctccgccggaactccctccaccttcaccgtcgtcgccaaggaccgccacagccggaggctcaccgccggcggggcgctcgtgcgcgtgcgtgtctcgcctgctgctgcagtcggcggggacgatctcgagggtgctgtcaaggacaacggggacggatcctacacggtcacctacgtcgtccccaagcgcggcaactacatggcgcgccctccagtgccttccccagcctcctcggggccatgcctggttcctcagctggttcctcgagtggagtcatgctgcctggggttggtgcttcattgggggagatatgccgggactacatgaatgggaggtgcacaaaggtggagactgactgtaagttcacccacccaccgcaacagctgctgatgtcgatgcttgcagccacgagttctgtcagtgctcttgggcatgcgccgttggcgccctctgcggctgctatggcagctgcacaggccatcatggctgctcaggcactgcaggcacatgctgcgcaagccaaggccgcaggtggggcttcaggctcagtacacaaagctgatgaagctgatgccctgaagagaacagttcaaattagcaacctgagtccacttcttactgtggattatgttaagcagctatttggattgtgtggtaaagttgttgattgtaccatcacagattcaaaacacattgcttatgttgaatactccaaacctgaagaagcgactgcagcgttggagttcaataacaagaatgttggtggtcgtccattgaatgtggagatggctaaatctcttccttctaaagcaaataataacttgcctatgatgatgcagcaagccattcagctgcaacagatgcaattccagcaggcactaatgatgcaacagtcaatagcaacccaacaggctgctgcacgtgctgccaccatgaaatctgccactgaagcagctgcagcaagggctgctgagataagcaggaagttgaaggcggagggctttggtgcggacaacatggaagaaaagcatgccaaagggaagtcaagatcaccatcgccctctactcgtagatcaaaatctcggtcgagatcacctatcaaataccgtaggagcaggcggtcccgctcctactctcccccagttagacgctcaagggagcagcgatcacgatcaccatcaaaatctcgccactcaaagtacggtagtgatcgatcgcatagggatgataaggacaggtatagcaggtccgggagaagggagagtgaacgatctcgtgatcatcattcatctagttcaaggaggaacagaagtaaaagtagaagtccaaggcataagaagccctccagagttgattctaggtcacccaagaaacaaagagaggaaagtttaagcccatcaaaatcaaggtcagcaagggctggttcaagatcaccacgccatcataagggaagcaaatcatcgccaactcgtgaccgtcattctcgccatagcaggcattcaaggtccagatctcctggcagaaagcaccgtcacagtgataaaagggacagcagaaagtctgagattcaggacgacaaaagaagatctcatagaggtagcagacacgacaaagatgaaagttcagtaaaggacgaaggggaaagatctcatagaagcaatagaggtgacaaagatgaaaggtctgtaaaggatccagtggaagataaagggatggatactaaagttgttgcacataagaggagctcaacagtatctgaagatgaaattctgaacaacaatagtagtaaccataagaaatatagacatgaagttggtttggaagttgatggaaatgatgtgtgctctgctgcagctgacattgataggaaacatgaaactggagtagatggctctttggggggcgctgcagaatcagctatgtgatggctgctgtatcattgagtttgctgtttacagatggattgatgatgatggagaatgctgaactggtgtttattatctccttttctgatttaggagttttatttgcagggcatgaagatcttcggagaacttgagtgctgttcggagtgctcatctgatatattaaaatgtattcctcattaacttgagattcgctccttggagcaaacttctaaatgtaaagctggtgttgtaaggcgatttcatacagtgaggtagaaaccaaccatgtatttgtcgtttcaggctcatgattccatgaagagttcttggagcacatttctgggatgtcggttgaagatacaagggagtatacacttcctcaagttttatccatcttgtctactgctttttgaccagtctacctaaagttggtgcccttggtagctccagagataagctgtgaatcttgaaagttgaaacaattgcattgttacaaatttttttttttaaattttttgcttcactattgtttctgcttttgtctgcattgttcgctgcaccttaccatgctgtgacggttgttgtcatgctggaaaacctgtgcaggtttttcaagggggttgacattggagtatgttttgagggaagtcagtgcatacttcattttgtgaatgaggactatgttgcggatgctcaaccggtgaggattacatgttctatcaggagtgaagacttgtgcacgagagctgcaagtgaacctttctgcatgtggatgcttatttatatcaacatgtgtctcccggataatatagcttgccgcttgcgagttgggatatgagcgctaatctaagcttggagtgattcaccaaaccgctctaagattaaggaaatatagggatattcaaacaacaaatggagttaatccaggtcgtgcctgtgggaaaaacatccatagacttcaatttgttagggaaaaatattttctaaaataagggtgaaatacactgttttttctctttcttttttgctcagaaagaataaaattgagtaaggaggtgctaaattctgtgccctggttcttttccctaaattttcagatttgtttttgaggtaactttacgaaatctggtcgatgtgaattgcaaatgtataaatttgacgtgataaatgacgggaatcaaaatcgag

SEQ ID NO: 71747 - DNA, 3233 bp, Zea Mays
cttttcttcttttgccttctttcttggtggccccatccgactccgcctgctcttcctcggcgccccatccatctgccttgcgtctgctccctctccaccaaaccctagccggccaacagagcttattgaaggccggctaggcgagagcagcatccaccgccgcgctctcatggcggcgcccaaaccgatctgggtgcgccaggctgaggaggccaagctcaagtccgaggcggagaccgctgccgccgccaaggccgccttcgaggccaccttcaaggccctcgctgccgcacccggcgacgacgacaaggacgccgaccccgccccgccctccccggccgaacccgcctcccccgagtccgatgacgatgccccggccccgccaggcccggtcgacccgtccaagtgctccgccgctggccccggcatcgggggcggctccgccggaactccctccaccttcaccgtcgtcgccaaggaccgccacagccggaggctcaccgccggcggggcgctcgtgcgcgtgcgtgtctcgcctgctgctgcagtcggcggggacgatctcgagggtgctgtcaaggacaacggggacggatcctacacggtcacctacgtcgtccccaagcgcggcaactacatggcgcgccctccagtgccttccccagcctcctcggggccatgcctggttcctcagctggttcctcgagtggagtcatgctgcctggggttggtgcttcattgggggagatatgccgggactacatgaatgggaggtgcacaaaggtggagactgactgtaagttcacccacccaccgcaacagctgctgatgtcgatgcttgcagccacgagttctgtcagtgctcttgggcatgcgccgttggcgccctctgcggctgctatggcagctgcacaggccatcatggctgctcaggcactgcaggcacatgctgcgcaagccaaggccgcaggtggggcttcaggctcagtacacaaagctgatgaagctgatgccctgaagagaacagttcaaattagcaacctgagtccacttcttactgtggattatgttaagcagctatttggattgtgtggtaaagttgttgattgtaccatcacagattcaaaacacattgcttatgttgaatactccaaacctgaagaagcgactgcagcgttggagttcaataacaagaatgttggtggtcgtccattgaatgtggagatggctaaatctcttccttctaaagcaaataataacttgcctatgatgatgcagcaagccattcagctgcaacagatgcaattccagcaggcactaatgatgcaacagtcaatagcaacccaacaggctgctgcacgtgctgccaccatgaaatctgccactgaagcagctgcagcaagggctgctgagataagcaggaagttgaaggcggagggctttggtgcggacaacatggaagaaaagcatgccaaagggaagtcaaggaatatgctatagtcttccctcttttgtatacatagagatcaccatcgccctctactcgtagatcaaaatctcggtcgagatcacctatcaaataccgtaggagcaggcggtcccgctcctactctcccccagttagacgctcaagggagcagcgatcacgatcaccatcaaaatctcgccactcaaagtacggtagtgatcgatcgcatagggatgataaggacaggtatagcaggtccgggagaagggagagtgaacgatctcgtgatcatcattcatctagttcaaggaggaacagaagtaaaagtagaagtccaaggcataagaagccctccagagttgattctaggtcacccaagaaacaaagagaggaaagtttaagcccatcaaaatcaaggtcagcaagggctggttcaagatcaccacgccatcataagggaagcaaatcatcgccaactcgtgaccgtcattctcgccatagcaggcattcaaggtccagatctcctggcagaaagcaccgtcacagtgataaaagggacagcagaaagtctgagattcaggacgacaaaagaagatctcatagaggtagcagacacgacaaagatgaaagttcagtaaaggacgaaggggaaagatctcatagaagcaatagaggtgacaaagatgaaaggtctgtaaaggatccagtggaagataaagggatggatactaaagttgttgcacataagaggagctcaacagtatctgaagatgaaattctgaacaacaatagtagtaaccataagaaatatagacatgaagttggtttggaagttgatggaaatgatgtgtgctctgctgcagctgacattgataggaaacatgaaactggagtagatggctctttggggggcgctgcagaatcagctatgtgatggctgctgtatcattgagtttgctgtttacagatggattgatgatgatggagaatgctgaactggtgtttattatctccttttctgatttaggagttttatttgcagggcatgaagatcttcggagaacttgagtgctgttcggagtgctcatctgatatattaaaatgctcatgattccatgaagagttcttggagcacatttctgggatgtcggttgaagatacaagggagtatacacttcctcaagtttttcaagggggttgacattggagtatgttttgagggaagtcagtgcatacttcattttgtgaatgaggactatgttgcggatgctcaaccggtgaggattacatgttctatcaggagtgaagacttgtgcacgagagctgcaagtgaacctttctgcatgtggatgcttatttatatcaacatgtgtctcccggataatatagcttgccgcttgcgagttgggatatgagcgctaatctaagcttggagtgattcaccaaaccgctctaagattaaggaaatatagggatattcaaacaacaaatggagttaatccaggtcgtgcctgtgggaaaaacatccatagacttcaatttgttagggaaaaatattttctaaaataagggtgaaatacactgttttttctctttcttttttgctcagaaagaataaaattgagtaaggaggtgctaaattctgtgccctggttcttttccctaaattttcagatttgtttttgaggtaactttacgaaatctggtcgatgtgaattgcaaatgtataaatttgacgtgataaatgacgggaatcaaaatcgag

SEQ ID NO: 71748 - DNA, 1776 bp, Zea Mays
aaatgttgaaacattcgaccatcgacctatcaataccagacaaacttggctaccttactgattttaagatcaccatcgccctctactcgtagatcaaaatctcggtcgagatcacctatcaaataccgtaggagcaggcggtcccgctcctactctcccccagttagacgctcaagggagcagcgatcacgatcaccatcaaaatctcgccactcaaagtacggtagtgatcgatcgcatagggatgataaggacaggtatagcaggtccgggagaagggagagtgaacgatctcgtgatcatcattcatctagttcaaggaggaacagaagtaaaagtagaagtccaaggcataagaagccctccagagttgattctaggtcacccaagaaacaaagagaggaaagtttaagcccatcaaaatcaaggtcagcaagggctggttcaagatcaccacgccatcataagggaagcaaatcatcgccaactcgtgaccgtcattctcgccatagcaggcattcaaggtccagatctcctggcagaaagcaccgtcacagtgataaaagggacagcagaaagtctgagattcaggacgacaaaagaagatctcatagaggtagcagacacgacaaagatgaaagttcagtaaaggacgaaggggaaagatctcatagaagcaatagaggtgacaaagatgaaaggtctgtaaaggatccagtggaagataaagggatggatactaaagttgttgcacataagaggagctcaacagtatctgaagatgaaattctgaacaacaatagtagtaaccataagaaatatagacatgaagttggtttggaagttgatggaaatgatgtgtgctctgctgcagctgacattgataggaaacatgaaactggagtagatggctctttggggggcgctgcagaatcagctatgtgatggctgctgtatcattgagtttgctgtttacagatggattgatgatgatggagaatgctgaactggtgtttattatctccttttctgatttaggagttttatttgcagggcatgaagatcttcggagaacttgagtgctgttcggagtgctcatctgatatattaaaatgctcatgattccatgaagagttcttggagcacatttctgggatgtcggttgaagatacaagggagtatacacttcctcaagtttttcaagggggttgacattggagtatgttttgagggaagtcagtgcatacttcattttgtgaatgaggactatgttgcggatgctcaaccggtgaggattacatgttctatcaggagtgaagacttgtgcacgagagctgcaagtgaacctttctgcatgtggatgcttatttatatcaacatgtgtctcccggataatatagcttgccgcttgcgagttgggatatgagcgctaatctaagcttggagtgattcaccaaaccgctctaagattaaggaaatatagggatattcaaacaacaaatggagttaatccaggtcgtgcctgtgggaaaaacatccatagacttcaatttgttagggaaaaatattttctaaaataagggtgaaatacactgttttttctctttcttttttgctcagaaagaataaaattgagtaaggaggtgctaaattctgtgccctggttcttttccctaaattttcagatttgtttttgaggtaactttacgaaatctggtcgatgtgaattgcaaatgtataaatttgacgtgataaatgacgggaatcaaaatcgag

SEQ ID NO: 71749 - DNA, 2344 bp, Zea Mays
gaaacattcgaccatcgacctatcaataccagacaaacttggctaccttactgattttaagatcaccatcgccctctactcgtagatcaaaatctcggtcgagatcacctatcaaataccgtaggagcaggcggtcccgctcctactctcccccagttagacgctcaagggagcagcgatcacgatcaccatcaaaatctcgccactcaaagtacggtagtgatcgatcgcatagggatgataaggacaggtatagcaggtccgggagaagggagagtgaacgatctcgtgatcatcattcatctagttcaaggaggaacagaagtaaaagtagaagtccaaggcataagaagccctccagagttgattctaggtcacccaagaaacaaagagaggaaagtttaagcccatcaaaatcaaggtcagcaagggctggttcaagatcaccacgccatcataagggaagcaaatcatcgccaactcgtgaccgtcattctcgccatagcaggcattcaaggtccagatctcctggcagaaagcaccgtcacagtgataaaagggacagcagaaagtctgagattcaggacgacaaaagaagatctcatagaggtagcagacacgacaaagatgaaagttcagtaaaggacgaaggggaaagatctcatagaagcaatagaggtgacaaagatgaaaggtctgtaaaggatccagtggaagataaagggatggatactaaagttgttgcacataagaggagctcaacagtatctgaagatgaaattctgaacaacaatagtagtaaccataagaaatatagacatgaagttggtttggaagttgatggaaatgatgtgtgctctgctgcagctgacattgataggaaacatgaaactggagtagatggctctttggggggcgctgcagaatcagctatgtgatggctgctgtatcattgagtttgctgtttacagatggattgatgatgatggagaatgctgaactggtgtttattatctccttttctgatttaggagttttatttgcagggcatgaagatcttcggagaacttgagtgctgttcggagtgctcatctgatatattaaaatgtattcctcattaacttgagattcgctccttggagcaaacttctaaatgtaaagctggtgttgtaaggcgatttcatacagtgaggtagaaaccaaccatgtatttgtcgtttcaggctcatgattccatgaagagttcttggagcacatttctgggatgtcggttgaagatacaagggagtatacacttcctcaagtaaagtacacatatacaagactaataaacaactcatcttctaggcacttgcatttgaatcggaatgctttggctagtaaaatggtccaaatatgcttgtctacatacttctgatgcacttaatttgcttgaagttctgtttttatatcttgtatcaggaatggttcaaaaagtttgacttgctataccaatacttgtactttatcttttgacagtcacaatgaattgtgatgtaggttttatccatcttgtctactgctttttgaccagtctacctaaagttggtgcccttggtagctccagagataagctgtgaatcttgaaagttgaaacaattgcattgttacaaatttttttttttaaattttttgcttcactattgtttctgcttttgtctgcattgttcgctgcaccttaccatgctgtgacggttgttgtcatgctggaaaacctgtgcaggtttttcaagggggttgacattggagtatgttttgagggaagtcagtgcatacttcattttgtgaatgaggactatgttgcggatgctcaaccggtgaggattacatgttctatcaggagtgaagacttgtgcacgagagctgcaagtgaacctttctgcatgtggatgcttatttatatcaacatgtgtctcccggataatatagcttgccgcttgcgagttgggatatgagcgctaatctaagcttggagtgattcaccaaaccgctctaagattaaggaaatatagggatattcaaacaacaaatggagttaatccaggtcgtgcctgtgggaaaaacatccatagacttcaatttgttagggaaaaatattttctaaaataagggtgaaatacactgttttttctctttcttttttgctcagaaagaataaaattgagtaaggaggtgctaaattctgtgccctggttcttttccctaaattttcagatttgtttttgaggtaactttacgaaatctggtcgatgtgaattgcaaatgtataaatttgacgtgataaatgacgggaatcaaaatcgag

SEQ ID NO: 71750 - DNA, 2576 bp, Zea Mays
gagtttttgccgccaaaacccgctgcttcttctcccctccctcccctctccatcccagaacccattcagtcgcggacggcggacgctcctatcccctagcctagcgcgcgcggacgcagccactatgccgggccatccaacccctgccgacgcgctcctcggcggcggcacatcccgccaccacgcggagcttctcctccatagcggcgatgacggcgtctctgtcaaggatctccgcctccgccgcgtcgtcccgcccgccgccggctccctcgataccttccccgagtgcgccgcacccgtgaagcccggatttgtcgagatcacgcctctagaggccgtgtcggctgctactgcggcggcggccggggactttgaccggaagttggcgcccccgcggtccaagctcgtccgcgatccgcgttcgtttgggtaccggcgtctgctgcctttcctgaacgagctgacgaagaacgatagctcaatcggcaaggaggtgttcccgcaagacacagctgcgcactcaaaggatgtgctcggcggatctgattctcggctggctgatgaagctataggcgttagccactgcgaacctgaagccatggtggttaacaccggaggagacaccgatgtgaaagatgcctgcaacaatgtctcggaagagatcaagattgcccctcatgacctaaccaacaaaccgttgcttgccggatgcacaaggtcgaggtttgttcatcatccgagctcgttcagctacaagaggatgctgccatttctcatggagaatgacatttctgctcaggaatgtaacagggtcaaaattcgaaaaattgcagaggaaaggcagctagcatcaaatgagaatgatgtctcagccagtgggcagcattgtcttgctgcatctgatgactcttctcaggaatgcaatagaggtcaagttgaaacaatggaagaagaaaagccagcaaaagcagatgagaataatgtccttggtggcagacagcttcagcctcctgttctagaagcgcctcctcctgatttcagtgtagttgaaatgcaaaatgtcatgcagcatgaagcttcggcttcaagtcaagttcccctaacttcttttgagggtgaattaacatcagctggggacagtgtccaggctgttggagaacatcagcttgttgcatcagaagagtctctagacgaacacaaaagagatgaagtcaaaagaagcatacatgatgcagtaaaatcagatgggggctatgctttggatagcagagaatttcagcttgctgcatcagaagtctctccagaaaacagcatggctgaagtgcaaggagctgcacaagaagaatcgttacctttagatggagttgaggaaaggtcagacaagggtgactttgtttccacagagcaggctcagctctgtgtcacaaatgaatctttggctgcacagctgcaaggtaatgttgaattcgctgaagtaccacagtgccaaaacttggacccaggatgtcatgatgttggttttggtagccgtaccaagagagtgataccattgttgcatcggcattgtgcacaacaacctcaggattccgtggtttctcttgatgatcagcttcttgacgatgacatacaaatgatctgcagacctgattcccgtgctgttgacagatacttatcagtcgaggaaatgtctggatgcattatgttaactgagtcagcatcaaacaaagcagggatatcgcggccaagaggtgcccattcaatggaaaaaggatctctgtctcctaagaaaccttctccaaagaaaggaatactcaagaggaatacaagggggtgtaagggtatctgcatgtgcttagactgctgcacattccgactacatgctgaccgagcttttgagttctctaggaagcagatgaaagaagcagatgatataataactaacttactgaaggaggtggccagtcttaggagtctgctggagaagcctgctggccaacaggaatcaacgcaagcagcttgcagacatgcttctcgggtggaggaggtggccagaaacagttgccagcagatgttcgtggatctaaattcccactgcagaatccctgcaggcaaatcatagctgatgctcatggaagctaacctgctgtttgaacacagaaaccaagggttagattcaccgaatacgtcgaggaaaagaaggccttaccatctccacgcaggagcaaccgtagtaggtgacagaatttcagaaagtggtggcggcctgacctgctgaccctacggatcgtgttgcttggttgttcagtacataatctgtgctgcttggttgagtggttgtcacagaaggaagattgaaatgaaatgaccgacttttttttgcgaactggaacatgcctatttgcaaactttttagttgtgaaatgatggtcccttggttgtaagaagtctggcatgtgttggtttatgatgcttgaggtctgtactaccaagtactgtgtgctccctattttccacattgtttagatccaactccaagaaagagttctaaaattgggtcctaaattttaaaatag

SEQ ID NO: 71751 - DNA, 987 bp, Zea Mays
gcccagagaagtttatctggatcggcccatcatcgcatgcggtcgggtccaaattccattcgagtggcgcgtagagcggagccgcggaggagagataagatcgttgtcgtgactcgtgattcgtgaacggcggcgacaagaagccgggagagatgccgctggccacaactgctccgacgccggcgccgccctgtcctccgccgagtccagcagcggcaccagtccggacgcagctcctctcctccgtcgcgaagctcgcgctcacggccgcgctcgtgtgcggctctggcggtcccgctgccgtcgtcgtcgttccggccgccgctcaggccgtcccgttcgtccgtcctcctcctcctcccctgcaaggaaggcccttcgcctcctccactccttacgcgcagtcccagaagctgcagcttggcctcgacaagctcggaaagatcaggccatgcccgtccaccaacccggggtgcgtgtccaccaacccgctgggatcctccggctccttcgcctcgccactgctcatcccggaatcatccgcaggggagaagaccgtcgccaaaagaaattctagctcttcccctttccaaattaaacatagcgtcaatcgtgtgatgctttgcttttgcgtttctcaattgatctcttgctactttgtggtggccggcggcgtacgtacctgctgcaagtcgctgcggcaagccatcgagaagacgcagcgtaatgtggagtttaaggtcgacgaagacactccatatggacactacatcgaggcggagatggacggcggcgtcggccgggacgtgatggagttcctggtgaagaaagacgccggcgtggtggcgtaccggtgcatggccaccaaggtcaccttcgtctaccccttcaccaccgctgtcggcgactccaagggccagaagcagaggatcgcggccatctcgcaggagctcggatgcttgaaacgcggcgcaagttttcttccag

SEQ ID NO: 71752 - DNA, 776 bp, Zea Mays
cgcggaggagagataagatcgttgtcgtgactcgtgattcgtgaacggcggcgacaagaagccgggagagatgccgctggccacaactgctccgacgccggcgccgccctgtcctccgccgagtccagcagcggcaccagtccggacgcagctcctctcctccgtcgcgaagctcgcgctcacggccgcgctcgtgtgcggctctggcggtcccgctgccgtcgtcgtcgttccggccgccgctcaggccgtcccgttcgtccgtcctcctcctcctcccctgcaaggaaggcccttcgcctcctccactccttacgcgcagtcccagaagctgcagcttggcctcgacaagctcggaaagatcaggccatgcccgtccaccaacccggggtgcgtgtccaccaacccgctgggatcctccggctccttcgcctcgccactgctcatcccggaatcatccgcaggggagaagaccgtcgcctcgctgcggcaagccatcgagaagacgcagcgtaatgtggagtttaaggtcgacgaagacactccatatggacactacatcgaggcggagatggacggcggcgtcggccgggacgtgatggagttcctggtgaagaaagacgccggcgtggtggcgtaccggtgcatggccaccaaggtcaccttcgtctaccccttcaccaccgctgtcggcgactccaagggccagaagcagaggatcgcggccatctcgcaggagctcggatgcttgaaacgcggcgcaagttttcttccag

SEQ ID NO: 71753 - DNA, 908 bp, Zea Mays
cggaggagagataagatcgttgtcgtgactcgtgattcgtgaacggcggcgacaagaagccgggagagatgccgctggccacaactgctccgacgccggcgccgccctgtcctccgccgagtccagcagcggcaccagtccggacgcagctcctctcctccgtcgcgaagctcgcgctcacggccgcgctcgtgtgcggctctggcggtcccgctgccgtcgtcgtcgttccggccgccgctcaggccgtcccgttcgtccgtcctcctcctcctcccctgcaaggaaggcccttcgcctcctccactccttacgcgcagtcccagaagctgcagcttggcctcgacaagctcggaaagatcaggccatgcccgtccaccaacccggggtgcgtgtccaccaacccgctgggatcctccggctccttcgcctcgccactgctcatcccggaatcatccgcaggggagaagaccgtcgccaaaagaaattctagctcttcccctttccaaattaaacatagcgtcaatcgtgtgatgctttgcttttgcgtttctcaattgatctcttgctactttgtggtggccggcggcgtacgtacctgctgcaagtcgctgcggcaagccatcgagaagacgcagcgtaatgtggagtttaaggtcgacgaagacactccatatggacactacatcgaggcggagatggacggcggcgtcggccgggacgtgatggagttcctggtgaagaaagacgccggcgtggtggcgtaccggtgcatggccaccaaggtcaccttcgtctaccccttcaccaccgctgtcggcgactccaagggccagaagcagaggatcgcggccatctcgcaggagctcggatggaccttatggcgatgagcatcggtatccagatcc

SEQ ID NO: 71754 - DNA, 756 bp, Zea Mays
gagagataagatcgttgtcgtgactcgtgattcgtgaacggcggcgacaagaagccgggagagatgccgctggccacaactgctccgacgccggcgccgccctgtcctccgccgagtccagcagcggcaccagtccggacgcagctcctctcctccgtcgcgaagctcgcgctcacggccgcgctcgtgtgcggctctggcggtcccgctgccgtcgtcgtcgttccggccgccgctcaggccgtcccgttcgtccgtcctcctcctcctcccctgcaaggaaggcccttcgcctcctccactccttacgcgcagtcccagaagctgcagcttggcctcgacaagctcggaaagatcaggccatgcccgtccaccaacccggggtgcgtgtccaccaacccgctgggatcctccggctccttcgcctcgccactgctcatcccggaatcatccgcaggggagaagaccgtcgccccatcgagaagacgcagcgtaatgtggagtttaaggtcgacgaagacactccatatggacactacatcgaggcggagatggacggcggcgtcggccgggacgtgatggagttcctggtgaagaaagacgccggcgtggtggcgtaccggtgcatggccaccaaggtcaccttcgtctaccccttcaccaccgctgtcggcgactccaagggccagaagcagaggatcgcggccatctcgcaggagctcggatgcttgaaacgcggcgcaagttttcttccag

SEQ ID NO: 71755 - DNA, 955 bp, Zea Mays
gttgtcgtgactcgtgattcgtgaacggcggcgacaagaagccgggagagatgccgctggccacaactgctccgacgccggcgccgccctgtcctccgccgagtccagcagcggcaccagtccggacgcagctcctctcctccgtcgcgaagctcgcgctcacggccgcgctcgtgtgcggctctggcggtcccgctgccgtcgtcgtcgttccggccgccgctcaggccgtcccgttcgtccgtcctcctcctcctcccctgcaaggaaggcccttcgcctcctccactccttacgcgcagtcccagaagctgcagcttggcctcgacaagctcgggccatgcccgtccaccaacccggggtgcgtgtccaccaacccgctgggatcctccggctccttcgcctcgccactgctcatcccggaatcatccgcaggggagaagaccgtcgccgtaagccacctcgctactcgccagctactggctgccgatctctgaaccgattccacgcgcgcgctactcgtttctgcagaaaagaaattctagctcttcccctttccaaattaaacatagcgtcaatcgtgtgatgctttgcttttgcgtttctcaattgatctcttgctactttgtggtggccggcggcgtacgtacctgctgcaagtcgctgcggcaagccatcgagaagacgcagcgtaatgtggagtttaaggtcgacgaagacactccatatggacactacatcgaggcggagatggacggcggcgtcggccgggacgtgatggagttcctggtgaagaaagacgccggcgtggtggcgtaccggtgcatggccaccaaggtcaccttcgtctaccccttcaccaccgctgtcggcgactccaagggccagaagcagaggatcgcggccatctcgcaggagctcggatgcttgaaacgcggcgcaagttttcttccag

SEQ ID NO: 71756 - DNA, 1226 bp, Zea Mays
ggcaaacaccacgcgccgcgggcccttcttgcgtcagcatcgcacccgcacttgtccggtctgtgggcctggctgtttgttaggactgcccggcccggtgccccggtagtagtactagtagtatagctagcctagtagggtaaggaaacagtggtcgtcctctaatccgaatcggaaggcagcggatcggctcggaccgggccgggccggggcgtgtggctgcgctgcgtcgcctcgcctcgcgtcggcgattcttccggcgaaccaacggcgccagccacacctgagcgagcggcgcagaaaggtggcgcgtggacgccacgctcgcctcagccttagggatcgagggccctttccgtccgcgtggctgctgctcctctcgtctctcctcccacccgtccaaggcatggagcactgctatgtgggacagccgatctcgagggccgaggcaatgcccgagaggaggtccaggttctggcagatggatgcgcctcctccgccccgggcggaggtcatctgcccccagcctcgccgcgccacccggattcccctcaccgctgtggaaaccctgaacaaagccagccccaagatgaacggtgcatttccgccgtacagatcggactccacttgcgatatacttgatcttatcctcagtaagaatgactcggatggagattcgagcagccaggagggagctcctatggcaaaatgccagcagtacgagttgaagtaggctcgccatcttgcggcgttagcagcagcccaaaagtaaggattgaaggtttcgcctgtggcaactccgagacccactatgcagttacctttgtctgagcattttgttggtatgttcctgattttgcccttggaccgaccgaccgctcgctccttgtgaatcaccgtggtggtgtgcaggatattaagtagtgcatttaagctagcctgattagagttgccttttgcccttctgactggcaatcgaaactgcacaattgcagtgagtagtgagatgtatataagtgaggtccccgcatatttaccttatgatgtatgtgtctagtaaatttagctggagatctggtgtttcatggataagagcctgtgaatagagttgagtttttgcattcagaagtaagatgcaacatggagttttcagttattattatgaatgcatctttgttttgtgtcacatgttgtgatttttttggcctacaagttacctattttcc

SEQ ID NO: 71757 - DNA, 2536 bp, Zea Mays
ctcagattctgaaataacatcaaaaccatcaatcaggtagactagtgagtgctgtgcaagctgcaaggcacccgttcaaaactcactccccgcggcgcagccgggcgaggctggtgaaggaacccgcacgagtcgtcaggtcaccgccggcgctggagaaggctacttcatcaggggtggacgcacgtgggtcggcggccatgtcgctgctctgcttcctactggaccttcgcaacatcccccctcccctgctccaccgcctcaaggagtgcctgctcgacctcgccaacctctacgccgccactacgtcacagacacacgcagtgaccgcatcccccgccgccgccggcacgctccccgaccgcttggccctcggctacgtctacgatccttcatccaaaccatcctcctcgtgctcctcctcttgccctgagctaaagattgggtataggcctggtgaaaaattcagtctacgagatttccaccatgccgtaaataacctacctatggatggctttcttgctgatcaacatggtggatctttgcctattagagatgtatcactgacaagcttttttagcaacaaagccatctactcttgggctactgatgacatctccaaaaaagtgattgctatatgtatgtctgcacaaaatacagaagctctccgaagaactcttatggatgcagcagaacagtgtgttgccgtggattttataatgttggaagcagaagctgcattcatgtacggccgtgcttcagaaaatgccaattcttttgtgaacagaatctgtgatcttgaaaactgtgtggtacggagatacaatcctgagacccaagttttgcatggcctagttaagaggtggttagaagagctaaaggatgacaaagaggatacactgcaagctgtatttgtgttcagtgatcccatcattgattctgttaaacacatatattgcaacctgtatgcatcagcaaaccagataactgatggttttccaccttgccaggcatgcaagtgccatggtcaccctattgaccttttcaccccaagtaaggcaaaatggacgtgtccaacaactaatcgacagcttgtagtttctgatattgttgatactgctgtaaggattggagaacaaacagtattgtttctacctactttggaaggtagctcaaacttgcggcgtgtctctacttccatttcttttgttgtaattgagcgcactgaattggcctcaatgaatgaaggagtcataatggggaggtcttatgttgtgattcccagttcaaatgatgttgaagcttctctagctgatgagagaacagatcagaacaccaaaaagactcgctgcatctgaagagatattgcctctcccagacatgactcgagattgcagctctaagattaccatggaaatcaggaattcaatcgaaacctctttatctaagattatgctcaaggattacaaccctctacatcatgaaagaggctttcattcagaactgaatcgcctggtgagggacagcctgcaatttggatcaattgctccgtcctgtgccccgaaggaccctcacaacattggttcgttcagcgaacctcaggtaccaacatgtcaggacctggaagaaagcatgtccctgaacgaacatgaggatgcggctggaggtctcaacgaccatccgtactcgttcagcgagcctcaacctcaaacatcagcattcataactccgagcaagaacaaggcatcgatccagtccaagaaagggaaggcctctcccagcatcagtgaggagtgggagaagctcatcatcatcgacgacctcgacgacgactttgccagccccgcacatcccagaaccgctgttcacaaacctccccgccccaagccaccgtccccagtgaagccgctggacgagaagacttcaaggatcctggagaggctggagccccccagggcgaagaagcagagagcgaacattgttagcaaggccagcactggcgcagcaccggcacctgccagtaaacagatcaagaagccgttgctgctgccgcgtgagccgagcgcaagccagccgctgcgaccttccttcagcaggcttaggagagttccctacctgacctgatcatggcgcatgctcacgcttagctacagctaactgggcagatcaaaaacacgctttcgcaccttggatcgtgaatacgtaacgagagaggtgatagatgcacgtgcagcccctgagtgtcgatactgatatgtttttgctgtcaaatgtaaatacgatagaagccaaactgctagttgcgtaggtagaaagtaaagctacttgtcagagcatatacaacctagatatgtggttcttcaaaaactagatacacatacacctaagaaatcctttcatacaacctaatatatatatgtcttatatcttattcactagaacctctcaagatacaaataatttatgtcggttgtataagtagaaccgtatctaaacttagagaaaaccgtgctagagatgttccttcgtcaagata

SEQ ID NO: 71758 - DNA, 2665 bp, Zea Mays
gtgagtgctgtgcaagctgcaaggcacccgttcaaaactcactccccgcggcgcagccgggcgaggctggtgaaggaacccgcacgagtcgtcaggtcaccgccggcgctggagaaggctacttcatcaggggtggacgcacgtgggtcggcggccatgtcgctgctctgcttcctactggaccttcgcaacatcccccctcccctgctccaccgcctcaaggagtgcctgctcgacctcgccaacctctacgccgccactacgtcacagacacacgcagtgaccgcatcccccgccgccgccggcacgctccccgaccgcttggccctcggctacgtctacgatccttcatccaaaccatcctcctcgtgctcctcctcttgccctgagctaaagattgggtataggcctggtgaaaaattcagtctacgagatttccaccatgccgtaaataacctacctatggatggctttcttgctgatcaacatggtggatctttgcctattagagatgtatcactgacaagcttttttagcaacaaagccatctactcttgggctactgatgacatctccaaaaaagtgattgctatatgtatgtctgcacaaaatacagaagctctccgaagaactcttatgcatcctgtggtcactgtgttgtatcaggatgcagcagaacagtgtgttgccgtggattttataatgttggaagcagaagctgcattcatgtacggccgtgcttcagaaaatgccaattcttttgtgaacagaatctgtgatcttgaaaactgtgtggtacggagatacaatcctgagacccaagttttgcatggcctagttaagaggtggttagaagagctaaaggatgacaaagaggatacactgcaagctgtatttgtgttcagtgatcccatcattgattctgttaaacacatatattgcaacctgtatgcatcagcaaaccagataactgatggttttccaccttgccaggcatgcaagtgccatggtcaccctattgaccttttcaccccaagtaaggcaaaatggacgtgtccaacaactaatcgacagcttgtagtttctgatattgttgatactgctgtaaggattggagaacaaacagtattgtttctacctactttggaaggtagctcaaacttgcggcgtgtctctacttccatttcttttgttgtaattgagcgcactgaattggcctcaatgaatgaaggagtcataatggggaggtcttatgttgtgattcccagttcaaatgatgttgaagcttctctagctgatgagagaacagatcagaacaccaaaattttctatggtctatgtgaaactcttttcaagcttgaccagggacttgtttgttcctcatcatgcaatattgaaacaatgaaaattggaactcttcagtgttattatcttcttcaaccttctgaaaaaggaccaatgcttctgaggagactcgctgcatctgaagagatattgcctctcccagacatgactcgagattgcagctctaagattaccatggaaatcaggaattcaatcgaaacctctttatctaagattatgctcaaggattacaaccctctacatcatgaaagaggctttcattcagaactgaatcgcctggtgagggacagcctgcaatttggatcaattgctccgtcctgtgccccgaaggaccctcacaacattggttcgttcagcgaacctcaggtaccaacatgtcaggacctggaagaaagcatgtccctgaacgaacatgaggatgcggctggaggtctcaacgaccatccgtactcgttcagcgagcctcaacctcaaacatcagcattcataactccgagcaagaacaaggcatcgatccagtccaagaaagggaaggcctctcccagcatcagtgaggagtgggagaagctcatcatcatcgacgacctcgacgacgactttgccagccccgcacatcccagaaccgctgttcacaaacctccccgccccaagccaccgtccccagtgaagccgctggacgagaagacttcaaggatcctggagaggctggagccccccagggcgaagaagcagagagcgaacattgttagcaaggccagcactggcgcagcaccggcacctgccagtaaacagatcaagaagccgttgctgctgccgcgtgagccgagcgcaagccagccgctgcgaccttccttcagcaggcttaggagagttccctacctgacctgatcatggcgcatgctcacgcttagctacagctaactgggcagatcaaaaacacgctttcgcaccttggatcgtgaatacgtaacgagagaggtgatagatgcacgtgcagcccctgagtgtcgatactgatatgtttttgctgtcaaatgtaaatacgatagaagccaaactgctagttgcgtaggtagaaagtaaagctacttgtcagagcatatacaacctagatatgtggttcttcaaaaactagatacacatacacctaagaaatcctttcatacaacctaatatatatatgtcttatatcttattcactagaacctctcaagatacaaataatttatgtcggttgtataagtagaaccgtatctaaacttagagaaaaccgtgctagagatgttccttcgtcaagata

SEQ ID NO: 71759 - DNA, 2473 bp, Zea Mays
gtgagtgctgtgcaagctgcaaggcacccgttcaaaactcactccccgcggcgcagccgggcgaggctggtgaaggaacccgcacgagtcgtcaggtcaccgccggcgctggagaaggctacttcatcaggggtggacgcacgtgggtcggcggccatgtcgctgctctgcttcctactggaccttcgcaacatcccccctcccctgctccaccgcctcaaggagctaaagattgggtataggcctggtgaaaaattcagtctacgagatttccaccatgccgtaaataacctacctatggatggctttcttgctgatcaacatggtggatctttgcctattagagatgtatcactgacaagcttttttagcaacaaagccatctactcttgggctactgatgacatctccaaaaaagtgattgctatatgtatgtctgcacaaaatacagaagctctccgaagaactcttatggatgcagcagaacagtgtgttgccgtggattttataatgttggaagcagaagctgcattcatgtacggccgtgcttcagaaaatgccaattcttttgtgaacagaatctgtgatcttgaaaactgtgtggtacggagatacaatcctgagacccaagttttgcatggcctagttaagaggtggttagaagagctaaaggatgacaaagaggatacactgcaagctgtatttgtgttcagtgatcccatcattgattctgttaaacacatatattgcaacctgtatgcatcagcaaaccagataactgatggttttccaccttgccaggcatgcaagtgccatggtcaccctattgaccttttcaccccaagtaaggcaaaatggacgtgtccaacaactaatcgacagcttgtagtttctgatattgttgatactgctgtaaggattggagaacaaacagtattgtttctacctactttggaaggtagctcaaacttgcggcgtgtctctacttccatttcttttgttgtaattgagcgcactgaattggcctcaatgaatgaaggagtcataatggggaggtcttatgttgtgattcccagttcaaatgatgttgaagcttctctagctgatgagagaacagatcagaacaccaaaattttctatggtctatgtgaaactcttttcaagcttgaccagggacttgtttgttcctcatcatgcaatattgaaacaatgaaaattggaactcttcagtgttattatcttcttcaaccttctgaaaaaggaccaatgcttctgaggagactcgctgcatctgaagagatattgcctctcccagacatgactcgagattgcagctctaagattaccatggaaatcaggaattcaatcgaaacctctttatctaagattatgctcaaggattacaaccctctacatcatgaaagaggctttcattcagaactgaatcgcctggtgagggacagcctgcaatttggatcaattgctccgtcctgtgccccgaaggaccctcacaacattggttcgttcagcgaacctcaggtaccaacatgtcaggacctggaagaaagcatgtccctgaacgaacatgaggatgcggctggaggtctcaacgaccatccgtactcgttcagcgagcctcaacctcaaacatcagcattcataactccgagcaagaacaaggcatcgatccagtccaagaaagggaaggcctctcccagcatcagtgaggagtgggagaagctcatcatcatcgacgacctcgacgacgactttgccagccccgcacatcccagaaccgctgttcacaaacctccccgccccaagccaccgtccccagtgaagccgctggacgagaagacttcaaggatcctggagaggctggagccccccagggcgaagaagcagagagcgaacattgttagcaaggccagcactggcgcagcaccggcacctgccagtaaacagatcaagaagccgttgctgctgccgcgtgagccgagcgcaagccagccgctgcgaccttccttcagcaggcttaggagagttccctacctgacctgatcatggcgcatgctcacgcttagctacagctaactgggcagatcaaaaacacgctttcgcaccttggatcgtgaatacgtaacgagagaggtgatagatgcacgtgcagcccctgagtgtcgatactgatatgtttttgctgtcaaatgtaaatacgatagaagccaaactgctagttgcgtaggtagaaagtaaagctacttgtcagagcatatacaacctagatatgtggttcttcaaaaactagatacacatacacctaagaaatcctttcatacaacctaatatatatatgtcttatatcttattcactagaacctctcaagatacaaataatttatgtcggttgtataagtagaaccgtatctaaacttagagaaaaccgtgctagagatgttccttcgtcaagata

SEQ ID NO: 71760 - DNA, 2359 bp, Zea Mays
gtgagtgctgtgcaagctgcaaggcacccgttcaaaactcactccccgcggcgcagccgggcgaggctggtgaaggaacccgcacgagtcgtcaggtcaccgccggcgctggagaaggctacttcatcaggggtggacgcacgtgggtcggcggccatgtcgctgctctgcttcctactggaccttcgcaacatcccccctcccctgctccaccgcctcaaggagctaaagattgggtataggcctggtgaaaaattcagtctacgagatttccaccatgccgtaaataacctacctatggatggctttcttgctgatcaacatggtggatctttgcctattagagatgtatcactgacaagcttttttagcaacaaagccatctactcttgggctactgatgacatctccaaaaaagtgattgctatatgtatgtctgcacaaaatacagaagctctccgaagaactcttatggatgcagcagaacagtgtgttgccgtggattttataatgttggaagcagaagctgcattcatgtacggccgtgcttcagaaaatgccaattcttttgtgaacagaatctgtgatcttgaaaactgtgtggtacggagatacaatcctgagacccaagttttgcatggcctagttaagaggtggttagaagagctaaaggatgacaaagaggatacactgcaagctgtatttgtgttcagtgatcccatcattgattctgttaaacacatatattgcaacctgtatgcatcagcaaaccagataactgatggttttccaccttgccagctatgttaacgcagaacacattgactgaacaggcatgcaagtgccatggtcaccctattgaccttttcaccccaagtaaggcaaaatggacgtgtccaacaactaatcgacagcttgtagtttctgatattgttgatactgctgtaaggattggagaacaaacagtattgtttctacctactttggaaggtagctcaaacttgcggcgtgtctctacttccatttcttttgttgtaattgagcgcactgaattggcctcaatgaatgaaggagtcataatggggaggtcttatgttgtgattcccagttcaaatgatgttgaagcttctctagctgatgagagaacagatcagaacaccaaaaagactcgctgcatctgaagagatattgcctctcccagacatgactcgagattgcagctctaagattaccatggaaatcaggaattcaatcgaaacctctttatctaagattatgctcaaggattacaaccctctacatcatgaaagaggctttcattcagaactgaatcgcctggtgagggacagcctgcaatttggatcaattgctccgtcctgtgccccgaaggaccctcacaacattggttcgttcagcgaacctcaggtaccaacatgtcaggacctggaagaaagcatgtccctgaacgaacatgaggatgcggctggaggtctcaacgaccatccgtactcgttcagcgagcctcaacctcaaacatcagcattcataactccgagcaagaacaaggcatcgatccagtccaagaaagggaaggcctctcccagcatcagtgaggagtgggagaagctcatcatcatcgacgacctcgacgacgactttgccagccccgcacatcccagaaccgctgttcacaaacctccccgccccaagccaccgtccccagtgaagccgctggacgagaagacttcaaggatcctggagaggctggagccccccagggcgaagaagcagagagcgaacattgttagcaaggccagcactggcgcagcaccggcacctgccagtaaacagatcaagaagccgttgctgctgccgcgtgagccgagcgcaagccagccgctgcgaccttccttcagcaggcttaggagagttccctacctgacctgatcatggcgcatgctcacgcttagctacagctaactgggcagatcaaaaacacgctttcgcaccttggatcgtgaatacgtaacgagagaggtgatagatgcacgtgcagcccctgagtgtcgatactgatatgtttttgctgtcaaatgtaaatacgatagaagccaaactgctagttgcgtaggtagaaagtaaagctacttgtcagagcatatacaacctagatatgtggttcttcaaaaactagatacacatacacctaagaaatcctttcatacaacctaatatatatatgtcttatatcttattcactagaacctctcaagatacaaataatttatgtcggttgtataagtagaaccgtatctaaacttagagaaaaccgtgctagagatgttccttcgtcaagata

SEQ ID NO: 71761 - DNA, 3021 bp, Zea Mays
gtgagtgctgtgcaagctgcaaggcacccgttcaaaactcactccccgcggcgcagccgggcgaggctggtgaaggaacccgcacgagtcgtcaggtcaccgccggcgctggagaaggctacttcatcaggggtggacgcacgtgggtcggcggccatgtcgctgctctgcttcctactggaccttcgcaacatcccccctcccctgctccaccgcctcaaggagtgcctgctcgacctcgccaacctctacgccgccactacgtcacagacacacgcagtgaccgcatcccccgccgccgccggcacgctccccgaccgcttggccctcggctacgtctacgatccttcatccaaaccatcctcctcgtgctcctcctcttgccctgagctaaagattgggtataggcctggtgaaaaattcagtctacgagatttccaccatgccgtaaataacctacctatggatggctttcttgctgatcaacatggtggatctttgcctattagagatgtatcactgacaagcttttttagcaacaaagccatctactcttgggctactgatgacatctccaaaaaagtgattgctatatgtatgtctgcacaaaatacagaagctctccgaagaactcttatggatgcagcagaacagtgtgttgccgtggattttataatgttggaagcagaagctgcattcatgtacggccgtgcttcagaaaatgccaattcttttgtgaacagaatctgtgatcttgaaaactgtgtggtacggagatacaatcctgagacccaagttttgcatggcctagttaagaggtggttagaagagctaaaggatgacaaagaggatacactgcaagctgtatttgtgttcagtgatcccatcattgattctgttaaacacatatattgcaacctgtatgcatcagcaaaccagataactgatggttttccaccttgccaggtgatatgatccttttataacaccactcactatttaattcaaaaagttcagtgacagaacgtatctgagtctcatgtttccctttcactgctcaatgttcagcattgagtttgttctatatacctatttattagtggaagaatatgactgataaaaggaacttctgcatatattttcggtgattttatcatcgtttttttcaaccttttatttccttccgatgatagcaattaggtatccatgattcctattcacagttctgtagcctcttcaacagctatgttaacgcagaacacattgactgaacaggcatgcaagtgccatggtcaccctattgaccttttcaccccaagtaaggcaaaatggacgtgtccaacaactaatcgacagcttgtagtttctgatattgttgatactgctgtaaggattggagaacaaacagtattgtttctacctactttggaaggtagctcaaacttgcggcgtgtctctacttccatttcttttgttgtaattgagcgcactgaattggcctcaatgaatgaaggtacccactactgctttctgctcagatacaaatattttgtaaattaaatgacaacatgtgttagcacttaacaggagtcataatggggaggtcttatgttgtgattcccagttcaaatgatgttgaagcttctctagctgatgagagaacagatcagaacaccaaaattttctatggtctatgtgaaactcttttcaagcttgaccagggacttgtttgttcctcatcatgcaatattgaaacaatgaaaattggaactcttcagtgttattatcttcttcaaccttctgaaaaaggaccaatgcttctgaggagactcgctgcatctgaagagatattgcctctcccagacatgactcgagattgcagctctaagattaccatggaaatcaggaattcaatcgaaacctctttatctaagattatgctcaaggattacaaccctctacatcatgaaagaggctttcattcagaactgaatcgcctggtgagggacagcctgcaatttggatcaattgctccgtcctgtgccccgaaggaccctcacaacattggttcgttcagcgaacctcaggtaccaacatgtcaggacctggaagaaagcatgtccctgaacgaacatgaggatgcggctggaggtctcaacgaccatccgtactcgttcagcgagcctcaacctcaaacatcagcattcataactccgagcaagaacaaggcatcgatccagtccaagaaagggaaggcctctcccagcatcagtgaggagtgggagaagctcatcatcatcgacgacctcgacgacgactttgccagccccgcacatcccagaaccgctgttcacaaacctccccgccccaagccaccgtccccagtgaagccgctggacgagaagacttcaaggatcctggagaggctggagccccccagggcgaagaagcagagagcgaacattgttagcaaggccagcactggcgcagcaccggcacctgccagtaaacagatcaagaagccgttgctgctgccgcgtgagccgagcgcaagccagccgctgcgaccttccttcagcaggcttaggagagttccctacctgacctgatcatggcgcatgctcacgcttagctacagctaactgggcagatcaaaaacacgctttcgcaccttggatcgtgaatacgtaacgagagaggtgatagatgcacgtgcagcccctgagtgtcgatactgatatgtttttgctgtcaaatgtaaatacgatagaagccaaactgctagttgcgtaggtagaaagtaaagctacttgtcagagcatatacaacctagatatgtggttcttcaaaaactagatacacatacacctaagaaatcctttcatacaacctaatatatatatgtcttatatcttattcactagaacctctcaagatacaaataatttatgtcggttgtataagtagaaccgtatctaaacttagagaaaaccgtgctagagatgttccttcgtcaagata

SEQ ID NO: 71762 - DNA, 344 bp, Zea Mays
cgcgctgcggctggcacagtgcctctcgctcactgactgactgtaataccagagatcgaacaacttggtcctgcagctcaagaagagagtttttgtgcatttgggggccgggggcaagagagagagagagagccatggcggcggaccagcagccgcagctgcaggaggagatgaacgacgctgccggcggcggcctcaggctgcctccagggttccgcttccacccgagcgacttcgagattgtcagcttctacctcaccaacaaggtgctcaacacgcgcttcacctgcaccgccatcacggaggccgacctaaacaagattgagccatgggacctccctatc

SEQ ID NO: 71763 - DNA, 1381 bp, Zea Mays
cgcgctgcggctggcacagtgcctctcgctcactgactgactgtaataccagagatcgaacaacttggtcctgcagctcaagaagagagtttttgtgcatttgggggccgggggcaagagagagagagagagccatggcggcggaccagcagccgcagctgcaggaggagatgaacgacgctgccggcggcggcctcaggctgcctccagggttccgcttccacccgagcgacttcgagattgtcagcttctacctcaccaacaaggtgctcaacacgcgcttcacctgcaccgccatcacggaggccgacctaaacaagattgagccatgggacctccctagcaaggcgaagatgggcgagaaagagtggtacttcttctaccagaaggaccgcaagtacccgacggggctgagggcgaaccgggccaccgaggccggttactggaaggcgacgggcaaggacaaggaggtggccttgaaagcttctgcttataagcaggatgagtgggtagtgtgtcgtgtgttccacaagaccactgggatcaagaagaccactgctgcaccggcgtaccaggtggccatggccggcgctgagatggatcagaatcagaacaacttcccgggcatccccttccccatgccgatgcaatttcccatgctgccagacttctccttggacccggtgcccccctactaccccaacgccgctggcgcggggatgtcgatgcttcctatggcagcaggtataggtggtggcgccggtgggttccagctcaacggcgccgccctgttcggcaatccgatggccgcgccgcagcccatgagcttctaccaccagatgggcgcggcggggacagcttgcgctggcggcttcgatgtttctgcgccggagagtaggccgtcctcgatggtgtcgcagaaggacgaccaggctaatggcgctgagatctcgtcgatgatgtccgtggccggcccagggcctgcgaccaccaccaccatagagatggatggcgtgtggaagtactgaaaacgtggagggtggagggcaaagacatgaattcgcataaattaaatatgcatgtaatatctatatctgcattgcattttgtgaaatatgatgcatgcatggtttgtatattccgtaataaccagtagttggtaagctatgtgtgtgtatggatgtactagctagtacatgcaccgtatcattgcatgtgtggtatatgtctcgtttggtgttagtaatctgcttggttgtgctgatgactgatggttgtaagaagcagattcgagtttggtacaatattatcgtgaacctatatattatatatatgttaattatagtatgttgtttaattatatgaacttgattgccaaaat

SEQ ID NO: 71764 - DNA, 1346 bp, Zea Mays
cgcgctgcggctggcacagtgcctctcgctcactgactgactgtaataccagagatcgaacaacttggtcctgcagctcaagaagagagtttttgtgcatttgggggccgggggcaagagagagagagagagccatggcggcggaccagcagccgcagctgcaggaggagatgaacgacgctgccggcggcggcctcaggctgcctccagggttccgcttccacccgagcgacttcgagattgtcagcttctacctcaccaacaaggtgctcaacacgcgcttcacctgcaccgccatcacggaggccgacctaaacaagattgagccatgggacctccctagcaaggcgaagatgggcgagaaagagtggtacttcttctaccagaaggaccgcaagtacccgacggggctgagggcgaaccgggccaccgaggccggttactggaaggcgacgggcaaggacaaggaggtggccttgaaagcttctgcttataaggatgagtgggtagtgtgtcgtgtgttccacaagaccactgggatcaagaagaccactgctgcaccggcgtaccaggtggccatggccggcgctgagatggatcagaatcagaacaacttcccgggcatccccttccccatgccgatgcaatttcccatgctgccagacttctccttggacccggtgcccccctactaccccaacgccgctggcgcggggatgtcgatgcttcctatggcagcaggtataggtggtggcgccggtgggttccagctcaacggcgccgccctgttcggcaatccgatggccgcgccgcagcccatgagcttctaccaccagatgggcgcggcggggacagcttgcgctggcggcttcgatgtttctgcgccggagagtaggccgtcctcgatggtgtcgcagaaggacgaccaggctaatggcgctgagatctcgtcgatgatgtccgtggccggcccagggcctgcgaccaccaccaccatagagatggatggcgtgtggaagtactgaaaacgtggagggtggagggcaaagacatgaattcgcataaattaaatatgcatgtaatatctatatctgcattgcattttgtgaaatatgatgcatgcatggtttgtatattccgtaataaccagtagttggtaagctatgtgtgtgtatggatgtactagctagtacatgcaccgtatcattgcatgtgtggtatatgtctcgtttggtgttagtaatctgcttggttgtgctgatgactgatggttgtaagaagcagattcgagtttggtacaatattatcgtgaacctatatatgttaattatagtatgttgtttaat

SEQ ID NO: 71765 - DNA, 755 bp, Zea Mays
attcctatgcgcctcccgtctggccgtcttccagacgtctccaatcggagctcccagcgtctcggagaagaggagcagcacggcacggcagctgtggcgaggaaggctcttgtcctgtcccatcccaacccagcagccgtccaaggaggaggagatccaatcggcgtgcaggcgtccaccgtccatccatcgatccaattccaatctgcaggtgagcagctcgttgagattcccaatcaacagctcgaatcgcctgctctcccatcctattgaatgaaactatggcctctgcgtcgcggcttgttcgtggaggagaggttgctgtggaacccgccgccagttagccatgtcgtcctccgtgctgagggctgcggccgacagggctattcgcaggcaggccctcacgctgacggacgccgcggcgtccaggatccggcagctcctcagcctcaggcagcggccattcctgcggctcggcgtcaaagcgcgtggttgcaacggcctctcgtacacgctcaactatgccggtatacttaccgcttccttattgcacggatcaacttcctgcaccagttttccattgtttcacattaacaacatccgatttcatccacaacagaaagagagggaaatggataaagtgataagcttatgttatgttacacatcttgcttaatactgccccggtcatctaatatgcagaattatgtataatatccttcattgcgaattgttacttctgttggatcatgatg

SEQ ID NO: 71766 - DNA, 1118 bp, Zea Mays
aagatccgaacttgacccattgctctagtttgcacatgtacgttcccatccaaaaaccctcggcaacggtgatgcgacgcccgtcccgttccaagtcctgacaaccgagcgtacgctgagctgcaagtaaacggcgctggctaccggaagagccgagccggaccaagtctcctcgtccctcacctcgtcgccgatggagggcggcgactcgtccggcgccggcgccggcggcgccgtggccgcggcggccaagtggcggagcgacgcgtcgcgggcgttccagtactacctggaccgctcgacgcctcacgccacggggcggtggctcggcacgctcgccgccgcggccatctacgcgctgcgggtttacatggtgcagggcttctacatcgtcacctacgggctcgggatctaccttctcaacctcctcatcggtttcctctcccccatggtcgaccccgagctcgacccttccgccgcctccgaggggccggcgctgcccacccgggggtccgacgagttcaagccattcatcaggcgcctccccgagttcaagttctgcgccagattgtacatatgatcaaatacaaatatgtgcctttcagtatcgggaagcagaaatatggtgggaagaagagtgccgtgagcccgagttcctcaaaagactgattccgaacctgccccagtagaaacttgccaggggaacaagatacgttggatgatgatatttgatgtgctcaataccaagtgtaatacttcattcatatctaggaggtagacggattttcgctcctgtttctgactctgggctcactgtttaattccatgttgtgcttaggtcgcttcctcctatgcttgtatagcgagtttcgcgtctcagataaattatttcgttttagttactacatatctgggccctaaaacaataagctctatgctctcagcaagtttggttgggtgttgagctgggtgaggtaggcggttggttatttttgtatcgaactggaacaggatgctaaactttaaacgcagaatattttgacccactgtagcatatcatagatagtacgtatcaaacatcgaaattcaaacgcagaatattgctgtctgcatttgac

SEQ ID NO: 71767 - DNA, 868 bp, Zea Mays
ggtgattcgctcccgtgttatgcttgtatgtatttacctactggaacgcggcgatcgtatcgggcctgctagtttacttctcgccgtcctagactcagccaagtcaatttgcatttcggaaaccacttacggatctgccttcactttcgaagtactcctgctcagctactcctgacccctccctgcggtatgccatcacaaaagcttttgttatagcttttgtgatgactttcttctcagtgtttgacgttcctgtcttctggcctatactcctctgctactggattgttctctttgtccttacaatgaagcgccagattgtacatatgatcaaatacaaatatgtgcctttcagtatcgggaagcagaaatatggtgggaagaagagtgccgtgagcccgagttcctcaaaagactgattccgaacctgccccagtagaaacttgccaggggaacaagatacgttggatgatgatatttgatgtgctcaataccaagtgtaatacttcattcatatctaggaggtagacggattttcgctcctgtttctgactctgggctcactgtttaattccatgttgtgcttaggtcgcttcctcctatgcttgtatagcgagtttcgcgtctcagataaattatttcgttttagttactacatatctgggccctaaaacaataagctctatgctctcagcaagtttggttgggtgttgagctgggtgaggtaggcggttggttatttttgtatcgaactggaacaggatgctaaactttaaacgcagaatattttgacccactgtagcatatcatagatagtacgtatcaaacatcgaaattcaaacgcagaatattgctgtctgcatttgac

SEQ ID NO: 71768 - DNA, 2806 bp, Zea Mays
gaatcggcacaagaattcgcgggcccaccggcaggtgccctaaaattatccgtgatctcttttggcgagcacacagattggagtgaccctttttactaggtcagcttgaagccgtctattttgtagagcgtaagtacgagcgacctattttgacaaattcctccaccgctcatcctctcccgcgcgcttgcccctttccgcttggccttccgcccctcctcttctccgcacggagcgccgccacaggtgattgctagggtttcggggccgccgcctgcagcagccctaccgccagcgctcctacgcctgtgtccctgttcctctccgtcccgttctgccggcgtaccacggctgacggccgacgccctgcagatccagcaaaggcaacgctgagatccctacgacttcgaacggcctgtgacctgtggatctgtgccagcctgttggtcgagctacctgctccagaccgagcagcccgtgttaaagctagctaaggaaacagggcctaagtgagctcagaggaaaaaaaggaacgcaatggaggaagggaacgtgcgggtggacctcgacaagctccccatcaagcgccttgaggccattgaggagactggcaacgagcactacccacctgacactagcaacgaggagcagcgactcgcggccatccgccggattgacttctcctgggtcatagagaaggatgcaaagaaggccaagaaggcggctgaggctgacactgcccagcaggcatggccctggcagggccttatggagagcctgcagcaggcacatcaggagctctctgtcgtcatagacctcatcggcacggttgaggctaacgacgctgtggcagtcgcctcgacaacgaagcccaagtcgcagccaaatgaaatactggttgacatggcagtctctgctgccaccaagctccagcgccttaggcatttgtcatggtacttcaaacaatctgctaagactatggagcaacaattccaaaaggagactaggttctacggctccttaataagttgaagatgttgtcacaaagtgctcagattgcagcagaactggaaagtgaagcggcagcgggctgttgggagtccaggaagtgaaggcttcatgtttgatctagttgatagttctcagctagacacaacaacagtgcttcgattatcaccattatctttaattccgattgatcaagactcttcaggcactttgtctgtacaaattccacagaagtctttgcgttccttgagccttaaatttcatggagacatagtcaataatgcagaaagcagtgctatcaaaaagaaagaaggcacattaaccaacactactgctgaagccgaaaaggatgttttggcagatgatgatgtcaataagtctattagatatgcacattccatccttcgtgacatccacaagtccatatttgaggagcaggtatttgatatggtgatccgggagacgtttaaccagtctcaaggcatcaatgttactgggatgtgcgaagattttctccaattagctattggccaggagtgttcgttgtgcctttcgcttgagctctctggacagaacaataacgcaggaacagtaggacagcaagatcatatggatacaaattatcctggaaatcttgcagtagccactgtaaatgggaaggagtcctcaaataaggatgtgagagggtttcctaaccccaaaagcttagaaatctacctgctccatatgttccatgaaattcttaggaaactcagggagaaatctcgtcatgtggttcgctaccagagttctgctcaggctgcacctgacgattgtggcctgctaagccatttttgcatgacagtggctcacaggatattttctaacaaagtacatttggagctggaaagcgtggttagtagggttccttatctccatctgcgttcccttcctacatggcattctcgaacttcttcctggtctctctgcttgaaagttcctcagcctatcctggccaccggtcgagtcacaaagccttcagactatcacgagctgaagtacaaatccaggtcgcagtttagtacaaaggtgatcttgaaagatggccaaattagtttaatgggtgagggctccccaagcattgttgggtccttgactgggaagccatctgattcacgtctgataaatagttacaattgtgacttggaagacctcccaatgatgcttctgcagcaggtcgccagtcaagtaatccactggctccatgatgaagcgatgattcttgggatgaacgtgaccagagatttcctgtgcctgtactttgaccttggccaaggcgaaacacttggtctattggcacatgtcgacccggatgacacctatggctgcatctcatggtacctcactgttgaacacccaatggaggaggggaagatgtcagctggcagtccagagtcagagaagcgaaggtttttggggtacctttccctggaagtgctttactctaccctgatggacctgataaaattgtgcagcacaagtgatcaaattcgtgcctcttgatcgacataagtggatgaaatgatgtatgtccgtgcagtgtttaagagtatgtaaattgaggcattatgtgcaccttttgtttgctaataggatgtttggcttgaaaaatggagtccatcctctcactcttcagtatgtttgtttggttcatgaatgaaataagctgatacatcaccatcttatttcactaagttaataattagtattagcatgtggaataaagttgtctcgctactctattaaaaaaaagttccag

SEQ ID NO: 71769 - DNA, 2482 bp, Zea Mays
gaatcggcacaagaattcgcgggcccaccggcaggtgccctaaaattatccgtgatctcttttggcgagcacacagattggagtgaccctttttactaggtcagcttgaagccgtctattttgtagagcgtaagtacgagcgacctattttgacaaattcctccaccgctcatcctctcccgcgcgcttgcccctttccgcttggccttccgcccctcctcttctccgcacggagcgccgccacaggtgattgctagggtttcggggccgccgcctgcagcagccctaccgccagcgctcctacgcctgtgtccctgttcctctccgtcccgttctgccggcgtaccacggctgacggccgacgccctgcagatccagcaaaggcaacgctgagatccctacgacttcgaacggcctgtgacctgtggatctgtgccagcctgttggtcgagctacctgctccagaccgagcagcccgtgttaaagctagctaaggaaacagggcctaagtgagctcagaggaaaaaaaggaacgcaatggaggaagggaacgtgcgggtggacctcgacaagctccccatcaagcgccttgaggccattgaggagactggcaacgagcactacccacctgacactagcaacgaggagcagcgactcgcggccatccgccggattgacttctcctgggtcatagagaaggatgcaaagaaggccaagaaggcggctgaggctgacactgcccagcaggcatggccctggcagggccttatggagagcctgcagcaggcacatcaggagctctctgtcgtcatagacctcatcggcacggttgaggctaacgacgctgtggcagtcgcctcgacaacgaagcccaagtcgcagccaaatgaaatactggttgacatggcagtctctgctgccaccaagctccagcgccttaggcatttgtcatggtacttcaaacaatctgctaagactatggagcaacaattccaaaaggagactaggttctacggctccttaataagcagaactggaaagtgaagcggcagcgggctgttgggagtccaggaagtgaaggcttcatgtttgatctagttgatagttctcagctagacacaacaacagtgcttcgattatcaccattatctttaattccgattgatcaagactcttcaggcactttgtctgtacaaattccacagaagtctttgcgttccttgagccttaaatttcatggagacatagtcaataatgcagaaagcagtgctatcaaaaagaaagaaggcacattaaccaacactactgctgaagccgaaaaggatgttttggcagatgatgatgtcaataagtctattagatatgcacattccatccttcgtgacatccacaagtccatatttgaggagcaggttccatgaaattcttaggaaactcagggagaaatctcgtcatgtggttcgctaccagagttctgctcaggctgcacctgacgattgtggcctgctaagccatttttgcatgacagtggctcacaggatattttctaacaaagtacatttggagctggaaagcgtggttagtagggttccttatctccatctgcgttcccttcctacatggcattctcgaacttcttcctggtctctctgcttgaaagttcctcagcctatcctggccaccggtcgagtcacaaagccttcagactatcacgagctgaagtacaaatccaggtcgcagtttagtacaaaggtgatcttgaaagatggccaaattagtttaatgggtgagggctccccaagcattgttgggtccttgactgggaagccatctgattcacgtctgataaatagttacaattgtgacttggaagacctcccaatgatgcttctgcagcaggtcgccagtcaagtaatccactggctccatgatgaagcgatgattcttgggatgaacgtgaccagagatttcctgtgcctgtactttgaccttggccaaggcgaaacacttggtctattggcacatgtcgacccggatgacacctatggctgcatctcatggtacctcactgttgaacacccaatggaggaggggaagatgtcagctggcagtccagagtcagagaagcgaaggtttttggggtacctttccctggaagtgctttactctaccctgatggacctgataaaattgtgcagcacaagtgatcaaattcgtgcctcttgatcgacataagtggatgaaatgatgtatgtccgtgcagtgtttaagagtatgtaaattgaggcattatgtgcaccttttgtttgctaataggatgtttggcttgaaaaatggagtccatcctctcactcttcagtatgtttgtttggttcatgaatgaaataagctgatacatcaccatcttatttcactaagttaataattagtattagcatgtggaataaagttgtctcgctactctattaaaaaaaagttccag

SEQ ID NO: 71770 - DNA, 2772 bp, Zea Mays
gaatcggcacaagaattcgcgggcccaccggcaggtgccctaaaattatccgtgatctcttttggcgagcacacagattggagtgaccctttttactaggtcagcttgaagccgtctattttgtagagcgtaagtacgagcgacctattttgacaaattcctccaccgctcatcctctcccgcgcgcttgcccctttccgcttggccttccgcccctcctcttctccgcacggagcgccgccacaggtgattgctagggtttcggggccgccgcctgcagcagccctaccgccagcgctcctacgcctgtgtccctgttcctctccgtcccgttctgccggcgtaccacggctgacggccgacgccctgcagatccagcaaaggcaacgctgagatccctacgacttcgaacggcctgtgacctgtggatctgtgccagcctgttggtcgagctacctgctccagaccgagcagcccgtgttaaagctagctaaggaaacagggcctaagtgagctcagaggaaaaaaaggaacgcaatggaggaagggaacgtgcgggtggacctcgacaagctccccatcaagcgccttgaggccattgaggagactggcaacgagcactacccacctgacactagcaacgaggagcagcgactcgcggccatccgccggattgacttctcctgggtcatagagaaggatgcaaagaaggccaagaaggcggctgaggctgacactgcccagcaggcatggccctggcagggccttatggagagcctgcagcaggcacatcaggagctctctgtcgtcatagacctcatcggcacggttgaggctaacgacgctgtggcagtcgcctcgacaacgaagcccaagtcgcagccaaatgaaatactggttgacatggcagtctctgctgccaccaagctccagcgccttaggcatttgtcatggtacttcaaacaatctgctaagactatggagcaacaattccaaaaggagactaggttctacggctccttaataagcagaactggaaagtgaagcggcagcgggctgttgggagtccaggaagtgaaggcttcatgtttgatctagttgatagttctcagctagacacaacaacagtgcttcgattatcaccattatctttaattccgattgatcaagactcttcaggcactttgtctgtacaaattccacagaagtctttgcgttccttgagccttaaatttcatggagacatagtcaataatgcagaaagcagtgctatcaaaaagaaagaaggcacattaaccaacactactgctgaagccgaaaaggatgttttggcagatgatgatgtcaataagtctattagatatgcacattccatccttcgtgacatccacaagtccatatttgaggagcaggtatttgatatggtgatccgggagacgtttaaccagtctcaaggcatcaatgttactgggatgtgcgaagattttctccaattagctattggccaggagtgttcgttgtgcctttcgcttgagctctctggacagaacaataacgcaggaacagtaggacagcaagatcatatggatacaaattatcctggaaatcttgcagtagccactgtaaatgggaaggagtcctcaaataaggatgtgagagggtttcctaaccccaaaagcttagaaatctacctgctccatatgttccatgaaattcttaggaaactcagggagaaatctcgtcatgtggttcgctaccagagttctgctcaggctgcacctgacgattgtggcctgctaagccatttttgcatgacagtggctcacaggatattttctaacaaagtacatttggagctggaaagcgtggttagtagggttccttatctccatctgcgttcccttcctacatggcattctcgaacttcttcctggtctctctgcttgaaagttcctcagcctatcctggccaccggtcgagtcacaaagccttcagactatcacgagctgaagtacaaatccaggtcgcagtttagtacaaaggtgatcttgaaagatggccaaattagtttaatgggtgagggctccccaagcattgttgggtccttgactgggaagccatctgattcacgtctgataaatagttacaattgtgacttggaagacctcccaatgatgcttctgcagcaggtcgccagtcaagtaatccactggctccatgatgaagcgatgattcttgggatgaacgtgaccagagatttcctgtgcctgtactttgaccttggccaaggcgaaacacttggtctattggcacatgtcgacccggatgacacctatggctgcatctcatggtacctcactgttgaacacccaatggaggaggggaagatgtcagctggcagtccagagtcagagaagcgaaggtttttggggtacctttccctggaagtgctttactctaccctgatggacctgataaaattgtgcagcacaagtgatcaaattcgtgcctcttgatcgacataagtggatgaaatgatgtatgtccgtgcagtgtttaagagtatgtaaattgaggcattatgtgcaccttttgtttgctaataggatgtttggcttgaaaaatggagtccatcctctcactcttcagtatgtttgtttggttcatgaatgaaataagctgatacatcaccatcttatttcactaagttaataattagtattagcatgtggaataaagttgtctcgctactctattaaaaaaaagttccag

SEQ ID NO: 71771 - DNA, 1865 bp, Zea Mays
gaagggaactctaacaaagaatgtttctcatttgtcatggtacttcaaacaatctgctaagactatggagcaacaattccaaaaggagactaggttctacggctccttaataagattgcagcagaactggaaagtgaagcggcagcgggctgttgggagtccaggaagtgaaggcttcatgtttgatctagttgatagttctcagctagacacaacaacagtgcttcgattatcaccattatctttaattccgattgatcaagactcttcaggcactttgtctgtacaaattccacagaagtctttgcgttccttgagccttaaatttcatggagacatagtcaataatgcagaaagcagtgctatcaaaaagaaagaaggcacattaaccaacactactgctgaagccgaaaaggatgttttggcagatgatgatgtcaataagtctattagatatgcacattccatccttcgtgacatccacaagtccatatttgaggagcaggtatttgatatggtgatccgggagacgtttaaccagtctcaaggcatcaatgttactgggatgtgcgaagattttctccaattagctattggccaggagtgttcgttgtgcctttcgcttgagctctctggacagaacaataacgcaggaacagtaggacagcaagatcatatggatacaaattatcctggaaatcttgcagtagccactgtaaatgggaaggagtcctcaaataaggatgtgagagggtttcctaaccccaaaagcttagaaatctacctgctccatatgttccatgaaattcttaggaaactcagggagaaatctcgtcatgtggttcgctaccagagttctgctcaggctgcacctgacgattgtggcctgctaagccatttttgcatgacagtggctcacaggatattttctaacaaagtacatttggagctggaaagcgtggttagtagggttccttatctccatctgcgttcccttcctacatggcattctcgaacttcttcctggtctctctgcttgaaagttcctcagcctatcctggccaccggtcgagtcacaaagccttcagactatcacgagctgaagtacaaatccaggtcgcagtttagtacaaaggtgatcttgaaagatggccaaattagtttaatgggtgagggctccccaagcattgttgggtccttgactgggaagccatctgattcacgtctgataaatagttacaattgtgacttggaagacctcccaatgatgcttctgcagcaggtcgccagtcaagtaatccactggctccatgatgaagcgatgattcttgggatgaacgtgaccagagatttcctgtgcctgtactttgaccttggccaaggcgaaacacttggtctattggcacatgtcgacccggatgacacctatggctgcatctcatggtacctcactgttgaacacccaatggaggaggggaagatgtcagctggcagtccagagtcagagaagcgaaggtttttggggtacctttccctggaagtgctttactctaccctgatggacctgataaaattgtgcagcacaagtgatcaaattcgtgcctcttgatcgacataagtggatgaaatgatgtatgtccgtgcagtgtttaagagtatgtaaattgaggcattatgtgcaccttttgtttgctaataggatgtttggcttgaaaaatggagtccatcctctcactcttcagtatgtttgtttggttcatgaatgaaataagctgatacatcaccatcttatttcactaagttaataattagtattagcatgtggaataaagttgtctcgctactctattaaaaaaaagttccag

SEQ ID NO: 71772 - DNA, 695 bp, Zea Mays
ttgcaggttgtagaactctttggctgccaatagtaatatgggaacaaaaaccaacagcaagtttctgcaacaaagtaaacaatgtagttaataaaacaaacatgccagcataacagcaattttctaaaacaaaattaacaatgtagtttttgcaatattcgacaattatgttgtgaacactttcattggaaagcaataaactaggaacaagaaggcgccagcagccaccagtatctaattctgggccatagttatctgttaggggagctgctactgcaagttaggatctggagagtaagaatagggggattggtcagagtaagaatagggggactgggcagcagtttgttagtagacagccagcattaggcgatataactaagggccgcctgattgtgaggggcatgcagaagtagaggactgtcgatcatagccttttgaccctaactctaataatgttagtttgagtatcccaactttcaattcagtttagttttggcccctaaggccagttaaagtggttctggctgatgtggcagcggtttttggattgaggaagaaatactcaaacagctctatttttttggaagaaacgaatgttttcggacacagggaaccccacaaaaataaatggagttcatacgttctagaagttccaaataaaagattcaataagtccgcgggggggggggggg

SEQ ID NO: 71773 - DNA, 1313 bp, Zea Mays
ttctagtgctaaagtttaacattatgaaaagcaaagttgaggttcctacacactaatggtcatggagtcgggatgggtgggggagggggattagacaaaatggagagttaaggggccaaatatggacttacttcagagacagggtgacaaattagaagaaaataaagagcacgtgcaggcttacaagagctgtaacatggcaaaaagaatacttacctgttatcaacaacaatcattagttcatcattgcatgcagagcagcagaagcttgcctgcataaaagtgataatcaatatgtgttcaaatttgactatgttatacatcatgacaatgtctttgtacaataaaagaatacgaaacaattttagatagacatcataatgtaaacatcagattcactactaaaaattgatattgaaaatatagaaaaattgttgcccttttggtccaaagatatgcagctcttggtacgtttttttttctttttctttttatttatgcaactaagtctacagtggcaacagagaagggttaaaaacacgagctttcactcgtttgatatatatggagaggactttaggtattgactaatgactagaaagacttctttctgtctgcatgaaaggcggcatacaacagcggaaaaagcaacccctagttatcaaatatacatggacattcttgcaatcagcaactaacacccaactatcagctacactaacgtgtgtgccccgagcctcaggcagcctccatctgggaatagatctgctcaagcctcaggggtctcttacagaaaccccaaccgaaccacaaattgactcatggcaactaaaatgaaatctagatttggaagcaccacctgttccatgctccaaacaccttcaacaaccaaaagaacagacattggtgaccaaacccgcccccaaaaaaaacacaagcaaacaaaattactcgctaccgcctaccatatcctgctggggtggacctgccaaaggggcatggatgtacagttttatcaaaaggttcgaagttaggtggcatcaaatagccaaatagctttaggttagggtttgggtgctctgattcgcacagcaggaagagaagagaagacaagggatgggaatacctggtgggcgctcgtcgctggcgaatagatcaacgaaggcctcagcacctggcggctggcgcagggcagcggcggcccaccagtcgtcggagagcgagcgagtgtggggtgagacacaccagtcgtgagccgtcggagactcggagagcgaaacgggtccgagctggttgctgagacgaccgtgaag

SEQ ID NO: 71774 - DNA, 411 bp, Zea Mays
gcacaagctaagaaaaatcttgctcaagggagaaggtgatgatggtgacatcgagtccgtggaatttccaaagtgtgtggtggcaagtaattaggcacatggtcacatactcacatggaggagatggaggagagggagagataggacccgagagaggagacatgagaggcacatggtcaatatattttgttggctgtaattgtaagcctgtaattgttggttgcaaccgttgctaacctggcatattttgttggctccctacaactttgtcctgaactcctgaacctgaagtcctgatctataattgttggctacatcactgcgtgtattttggttctagaactgaaactctgaaagtatgaaattatggattatggaatggaactattatgaactataagtctataattg

SEQ ID NO: 71775 - DNA, 554 bp, Zea Mays
aagaggttcttggatgttccagctagcagtgtgtcatcagaatccacttttagcactaggggtaggatccttgatgattacaggagttcattgaagccagcaacaattcaggctttggtgtgtgcttctagttggatacgcgggtctcgaagttcacctattcttttaactggagaaggtgatgatggtgacatcgagtccgtggaatttccaaagtgtgtggtggcaagtaattaggcacatggtcacatactcacatggaggagatggaggagagggagagataggacccgagagaggagacatgagaggcacatggtcaatatattttgttggctgtaattgtaagcctgtaattgttggttgcaaccgttgctaacctggcatattttgttggctccctacaactttgtcctgaactcctgaacctgaagtcctgatctataattgttggctacatcactgcgtgtattttggttctagaactgaaactctgaaagtatgaaattatggattatggaatggaactattatgaactataagtctataattg

SEQ ID NO: 71776 - DNA, 461 bp, Zea Mays
aagccagcaacaattcaggctttggtgtgtgcttctagttggatacgcgggtctcgaagttcacctattcttttaactggagaaggtgatgatggtgacatcgagtccgtggaatttccaaagtgtgtggtggcaagtaattaggcacatggtcacatactcacatggaggagatggaggagagggagagataggacccgagagaggagacatgagaggcacatggtcaatatattttgttggctgtaattgtaagcctgtaattgttggttgcaaccgttgctaacctggcatattttgttggctccctacaactttgtcctgaactcctgaacctgaagtcctgatctataattgttggctacatcactgcgtgtattttggttctagaactgaaactctgaaagtatgaaattatggattatggaatggaactattatgaactataagtctataattg

SEQ ID NO: 71777 - DNA, 550 bp, Zea Mays
ggttcttggatgttccagctagcagtgtgtcatcagaatccacttttagcactaggggtaggatccttgatgattacaggagttcattgaagccagcaacaattcaggctttggtgtgtgcttctagttggatacgcgggtctcgaagttcacctattcttttaactggagaaggtgatgatggtgacatcgagtccgtggaatttccaaagtgtgtggtggcaagtaattaggcacatggtcacatactcacatggaggagatggaggagagggagagataggacccgagagaggagacatgagaggcacatggtcaatatattttgttggctgtaattgtaagcctgtaattgttggttgcaaccgttgctaacctggcatattttgttggctccctacaactttgtcctgaactcctgaacctgaagtcctgatctataattgttggctacatcactgcgtgtattttggttctagaactgaaactctgaaagtatgaaattatggattatggaatggaactattatgaactataagtctataattg

SEQ ID NO: 71778 - DNA, 322 bp, Zea Mays
taattgcacatggtcacatactcacatggaggagatggaggagagggagagataggacccgagagaggagacatgagaggcacatggtcaatatattttgttggctgtaattgtaagcctgtaattgttggttgcaaccgttgctaacctggcatattttgttggctccctacaactttgtcctgaactcctgaacctgaagtcctgatctataattgttggctacatcactgcgtgtattttggttctagaactgaaactctgaaagtatgaaattatggattatggaatggaactattatgaactataagtctataattg

SEQ ID NO: 71779 - DNA, 2476 bp, Zea Mays
cttcccaatcaaaccgaggccgtcatccttatctgaatcgcgtgctttccagccctctgcccgctgtgccccacccccacgcccggcgacccgcaggccgcacccacccacccacccgcacccagcgccatgtccaccgcggccaccgcgtgcgccacgcgggcggcggcgcgtccgcccctcaacacggctccggcacgccgcgcgccgccttctgccgtgcgcccgccatcggccacccccgcccgccgcgccgccggctgttgcttctgcgccgccgcctcctcggcgtcgtcgccctccacctgggattggacccgatggagccgccacttcgacgaggtcgaccaggcggagagctacgcatccctcctccagttccagctagaggaggcggtggagaacgaggatttcgcggaggccgccaaactcaagagggacatcatagaggccaccggaaacgacgctgtagcccacgtcatggccgagctcaagaatgctatagaggaacagcggtaccaggacgcgtcaaggttgacaaggcttgctgggaccagcttggtaggttggtgggtgggatatgctaaggacactgatgattccatcgggagaattgtacgaataagccctggtgtcgggagatatgtggcgaagagctacaacccaaggcaattggtcactgcatcttcaggaactccattatttgaaattttccttgtcaaagaagatgatgagacatatacaatgaagacaggtggtacacatgcgaccaacaaaaggaacttcaggtgcaccatccatatcatcaacaataacagaaagcccagcaaaggtagagaatgaaaattcatcagaaagtagtgctatatctgacagtgttacagaggaggcaaatacagatactacggtaagaggaaatgaggatgctgaagagaaagcacaagatgttggtagcagcaaggatagtagtgtcgaaggattaaaaagtgttttgaatttttttaagtctcggattcctgaattcaaagttcaggtgataaatgttgatgtggctgaggaaactgaattagctgcaaattcgtctgaagaattagtgcaagatgatgtgaaaagtactccagaaagctcattggaagagccagccactgaggaactcgagcaggaggaagatgttccggaagaaaatacggatgaagaaagtaaaagcacggaagtgaagctttttattagtggagtggttcacaataaagaagatgctggagcaaaatcatatgttcgagttccagctgaaataaataacatggaaaaggactcctttgaactgtacattcctggagaaggttctgatcgtgatttggctgaaacaaaggctgcaaaacagaaagttgcagatatggctgctaaattagcctcagagcttatgccgtctgatgttgccaaggcattatggggtacagccaagagttcttcaaagataaataaagaagttcaggagcttttaaggcttacgttaagcaaggcccgagtcaagctgaccgaaaataccatttttaaacgaatcattatggacactaacagcacagatccatttaatggtctctatgtgggagcatttagtccatatggaccagaaattgtgcagcttcgtcggaagttcggccactggaacagtactgatgacgttgagtttttcgagtatgtcgaagcagtaaagttgactggtgatctgagtgttcctgctggccagataacgttccgtgctaagattgggaagggcaagcgacttgagaatcgaggagcatatccagaggaatttggtgtgattgccagttacaaaggtcagggtagaatagctcagcctggattcaaaaatcctcgatgggtggatggtgagctgttggtactcaatggcaagagtacaattccacaccttggaggcgcagagctcggtttcctgtatagtgtacctgagcagagttttctggttctcttcgatcggcttaatcttcccgagtgatgagactcctaaagggagcagactcctcacatgtagattgcatgaacgcgcagaggccggccacagctccaagtgaccgaaacaggtctggggggccgtttccccatcgtcttctgccctctgggcttcctgccaatcctttctccgcacctactttttaggagctcatgtgcttaactcgtttcagagtgtgagggaaagtcgacaccattgctggtctaaactaacggaggagtcttaatactaataatatatatgttatagcatggtagtttgctctccaatgccacagttgtagctgtattgggtatgggcatgacagttttgcgagttttacccgtcatcgttgatttcagtaattaccgaattgaataaaaatcgttctggtgtatcgtgatgttacaattataataatataaaacaaggcaaataaagtctcatgatttatgatcgtttttc

SEQ ID NO: 71780 - DNA, 2365 bp, Zea Mays
cttcccaatcaaaccgaggccgtcatccttatctgaatcgcgtgctttccagccctctgcccgctgtgccccacccccacgcccggcgacccgcaggccgcacccacccacccacccgcacccagcgccatgtccaccgcggccaccgcgtgcgccacgcgggcggcggcgcgtccgcccctcaacacggctccggcacgccgcgcgccgccttctgccgtgcgcccgccatcggccacccccgcccgccgcgccgccggctgttgcttctgcgccgccgcctcctcggcgtcgtcgccctccacctgggattggacccgatggagccgccacttcgacgaggtcgaccaggcggagagctacgcatccctcctccagttccagctagaggaggcggtggagaacgaggatttcgcggaggccgccaaactcaagagggacatcatagaggccaccggaaacgacgctgtagcccacgtcatggccgagctcaagaatgctatagaggaacagcggtaccaggacgcgtcaaggttgacaaggcttgctgggaccagcttggtaggttggtgggtgggatatgctaaggacactgatgattccatcgggagaattgtacgaataagccctggtgtcgggagatatgtggcgaagagctacaacccaaggcaattggtcactgcatcttcaggaactccattatttgaaattttccttgtcaaagaagatgatgagacatatacaatgaaggtggtacacatgcgaccaacaaaaggaacttcaggtgcaccatccatatcatcaacaataacagaaagcccagcaaaggtagagaatgaaaattcatcagaaagtagtgctatatctgacagtgttacagaggaggcaaatacagatactacggtaagaggaaatgaggatgctgaagagaaagcacaagatgttggtagcagcaaggatagtagtgtcgaaggattaaaaagtgttttgaatttttttaagtctcggattcctgaattcaaagttcaggtgataaatgttgatgtggctgaggaaactgaattagctgcaaattcgtctgaagaattagtgcaagatgatgtgaaaagtactccagaaagctcattggaagagccagccactgaggaactcgagcaggaggaagatgttccggaagaaaatacggatgaagaaagtaaaagcacggaagtgaagctttttattagtggagtggttcacaataaagaagatgctggagcaaaatcatatgttcgagttccagctgaaataaataacatggaaaaggactcctttgaactgtacattcctggagaaggttctgatcgtgatttggctgaaacaaaggctgcaaaacagaaagttgcagatatggctgctaaattagcctcagagcttatgccgtctgatgttgccaaggcattatggggtacagccaagagttcttcaaagataaataaagaagttcaggagcttttaaggcttacgttaagcaaggcccgagtcaagctgaccgaaaataccatttttaaacgaatcattatggacactaacagcacagatccatttaatggtctctatgtgggagcatttagtccatatggaccagaaattgtgcagcttcgtcggaagttcggccactggaacagtactgatgacgttgagtttttcgagtatgtcgaagcagtaaagttgactggtgatctgagtgttcctgctggccagataacgttccgtgctaagattgggaagggcaagcgacttgagaatcgaggagcatatccagaggaatttgattgccagttacaaaggtcagggtagaatagctcagcctggattcaaaaatcctcgatgggtggatggtgagctgttggtactcaatggcaagagtacaattccacaccttggaggcgcagagctcggtttcctgtatagtgtacctgagcagagttttctggttctcttcgatcggcttaatcttcccgagtgatgagactcctaaagggagcagactcctcacatgtagattgcatgaacgcgcagaggccggccacagctccaagtgaccgaaacagagtgtgagggaaagtcgacaccattgctggtctaaactaacggaggagtcttaatactaataatatatatgttatagcatggtagtttgctctccaatgccacagttgtagctgtattgggtatgggcatgacagttttgcgagttttacccgtcatcgttgatttcagtaattaccgaattgaataaaaatcgttctggtgtatcgtgatgttacaattataataatataaaacaaggcaaataaagtctcatgatttatgatcgtttttc

SEQ ID NO: 71781 - DNA, 2516 bp, Zea Mays
cttcccaatcaaaccgaggccgtcatccttatctgaatcgcgtgctttccagccctctgcccgctgtgccccacccccacgcccggcgacccgcaggccgcacccacccacccacccgcacccagcgccatgtccaccgcggccaccgcgtgcgccacgcgggcggcggcgcgtccgcccctcaacacggctccggcacgccgcgcgccgccttctgccgtgcgcccgccatcggccacccccgcccgccgcgccgccggctgttgcttctgcgccgccgcctcctcggcgtcgtcgccctccacctgggattggacccgatggagccgccacttcgacgaggtcgaccaggcggagagctacgcatccctcctccagttccagctagaggaggcggtggagaacgaggatttcgcggaggccgccaaactcaagagggacatcatagaggccaccggaaacgacgctgtagcccacgtcatggccgagctcaagaatgctatagaggaacagcggtaccaggacgcgtcaaggttgacaaggcttgctgggaccagcttggtaggttggtgggtgggatatgctaaggacactgatgattccatcgggagaattgtacgaataagccctggtgtcgggagatatgtggcgaagagctacaacccaaggcaattggtcactgcatcttcaggaactccattatttgaaattttccttgtcaaagaagatgatgagacatatacaatgaaggtggtacacatgcgaccaacaaaaggaacttcaggtgcaccatccatatcatcaacaataacagaaagcccagcaaaggtagagaatgaaaattcatcagaaagtagtgctatatctgacagtgttacagaggaggcaaatacagatactacggtaagaggaaatgaggatgctgaagagaaagcacaagatgttggtagcagcaaggatagtagtgtcgaaggattaaaaagtgttttgaatttttttaagtctcggattcctgaattcaaagttcaggtgataaatgttgatgtggctgaggaaactgaattagctgcaaattcgtctgaagaattagtgcaagatgatgtgaaaagtactccagaaagctcattggaagagccagccactgaggaactcgagcaggaggaagatgttccggaagaaaatacggatgaagaaagtaaaagcacggaagtgaagctttttattagtggagtggttcacaataaagaagatgctggagcaaaatcatatgttcgagttccagctgaaataaataacatggaaaaggactcctttgaactgtacattcctggagaaggttctgatcgtgatttggctgaaacaaaggctgcaaaacagaaagttgcagatatggctgctaaattagcctcagagcttatgccgtctgatgttgccaaggcattatggggtacagccaagagttcttcaaagataaataaagaagttcaggagcttttaaggcttacgttaagcaaggcccgagtcaagctgaccgaaaataccatttttaaacgaatcattatggacactaacagcacagatccatttaatggtctctatgtgggagcatttagtccatatggaccagaaattgtgcagcttcgtcggaagttcggccactggaacagtactgatgacgttgagtttttcgagtatgtcgaagcagtaaagttgactggtgatctgagtgttcctgctggccagataacgttccgtgctaagattgggaagggcaagcgacttgagaatcgaggagcatatccagaggaatttggtgtggtaatttcgtcctgccgatctgattgtttgaaagatgctaagatattgccagttacaaaggtcagggtagaatagctcagcctggattcaaaaatcctcgatgggtggatggtgagctgttggtactcaatggcaagagtacaattccacaccttggaggcgcagagctcggtttcctgtatagtgtacctgagcagagttttctggttctcttcgatcggcttaatcttcccgagtgatgagactcctaaagggagcagactcctcacatgtagattgcatgaacgcgcagaggccggccacagctccaagtgaccgaaacaggtctggggggccgtttccccatcgtcttctgccctctgggcttcctgccaatcctttctccgcacctactttttaggagctcatgtgcttaactcgtttcagagtgtgagggaaagtcgacaccattgctggtctaaactaacggaggagtcttaatactaataatatatatgttatagcatggtagtttgctctccaatgccacagttgtagctgtattgggtatgggcatgacagttttgcgagttttacccgtcatcgttgatttcagtaattaccgaattgaataaaaatcgttctggtgtatcgtgatgttacaattataataatataaaacaaggcaaataaagtctcatgatttatgatcgtttttc

SEQ ID NO: 71782 - DNA, 2512 bp, Zea Mays
cttcccaatcaaaccgaggccgtcatccttatctgaatcgcgtgctttccagccctctgcccgctgtgccccacccccacgcccggcgacccgcaggccgcacccacccacccacccgcacccagcgccatgtccaccgcggccaccgcgtgcgccacgcgggcggcggcgcgtccgcccctcaacacggctccggcacgccgcgcgccgccttctgccgtgcgcccgccatcggccacccccgcccgccgcgccgccggctgttgcttctgcgccgccgcctcctcggcgtcgtcgccctccacctgggattggacccgatggagccgccacttcgacgaggtcgaccaggcggagagctacgcatccctcctccagttccagctagaggaggcggtggagaacgaggatttcgcggaggccgccaaactcaagagggacatcatagaggccaccggaaacgacgctgtagcccacgtcatggccgagctcaagaatgctatagaggaacagcggtaccaggacgcgtcaaggttgacaaggcttgctgggaccagcttggttggtgggtgggatatgctaaggacactgatgattccatcgggagaattgtacgaataagccctggtgtcgggagatatgtggcgaagagctacaacccaaggcaattggtcactgcatcttcaggaactccattatttgaaattttccttgtcaaagaagatgatgagacatatacaatgaaggtggtacacatgcgaccaacaaaaggaacttcaggtgcaccatccatatcatcaacaataacagaaagcccagcaaaggtagagaatgaaaattcatcagaaagtagtgctatatctgacagtgttacagaggaggcaaatacagatactacggtaagaggaaatgaggatgctgaagagaaagcacaagatgttggtagcagcaaggatagtagtgtcgaaggattaaaaagtgttttgaatttttttaagtctcggattcctgaattcaaagttcaggtgataaatgttgatgtggctgaggaaactgaattagctgcaaattcgtctgaagaattagtgcaagatgatgtgaaaagtactccagaaagctcattggaagagccagccactgaggaactcgagcaggaggaagatgttccggaagaaaatacggatgaagaaagtaaaagcacggaagtgaagctttttattagtggagtggttcacaataaagaagatgctggagcaaaatcatatgttcgagttccagctgaaataaataacatggaaaaggactcctttgaactgtacattcctggagaaggttctgatcgtgatttggctgaaacaaaggctgcaaaacagaaagttgcagatatggctgctaaattagcctcagagcttatgccgtctgatgttgccaaggcattatggggtacagccaagagttcttcaaagataaataaagaagttcaggagcttttaaggcttacgttaagcaaggcccgagtcaagctgaccgaaaataccatttttaaacgaatcattatggacactaacagcacagatccatttaatggtctctatgtgggagcatttagtccatatggaccagaaattgtgcagcttcgtcggaagttcggccactggaacagtactgatgacgttgagtttttcgagtatgtcgaagcagtaaagttgactggtgatctgagtgttcctgctggccagataacgttccgtgctaagattgggaagggcaagcgacttgagaatcgaggagcatatccagaggaatttggtgtggtaatttcgtcctgccgatctgattgtttgaaagatgctaagatattgccagttacaaaggtcagggtagaatagctcagcctggattcaaaaatcctcgatgggtggatggtgagctgttggtactcaatggcaagagtacaattccacaccttggaggcgcagagctcggtttcctgtatagtgtacctgagcagagttttctggttctcttcgatcggcttaatcttcccgagtgatgagactcctaaagggagcagactcctcacatgtagattgcatgaacgcgcagaggccggccacagctccaagtgaccgaaacaggtctggggggccgtttccccatcgtcttctgccctctgggcttcctgccaatcctttctccgcacctactttttaggagctcatgtgcttaactcgtttcagagtgtgagggaaagtcgacaccattgctggtctaaactaacggaggagtcttaatactaataatatatatgttatagcatggtagtttgctctccaatgccacagttgtagctgtattgggtatgggcatgacagttttgcgagttttacccgtcatcgttgatttcagtaattaccgaattgaataaaaatcgttctggtgtatcgtgatgttacaattataataatataaaacaaggcaaataaagtctcatgatttatgatcgtttttc

SEQ ID NO: 71783 - DNA, 2468 bp, Zea Mays
cttcccaatcaaaccgaggccgtcatccttatctgaatcgcgtgctttccagccctctgcccgctgtgccccacccccacgcccggcgacccgcaggccgcacccacccacccacccgcacccagcgccatgtccaccgcggccaccgcgtgcgccacgcgggcggcggcgcgtccgcccctcaacacggctccggcacgccgcgcgccgccttctgccgtgcgcccgccatcggccacccccgcccgccgcgccgccggctgttgcttctgcgccgccgcctcctcggcgtcgtcgccctccacctgggattggacccgatggagccgccacttcgacgaggtcgaccaggcggagagctacgcatccctcctccagttccagctagaggaggcggtggagaacgaggatttcgcggaggccgccaaactcaagagggacatcatagaggccaccggaaacgacgctgtagcccacgtcatggccgagctcaagaatgctatagaggaacagcggtaccaggacgcgtcaaggttgacaaggcttgctgggaccagcttggttggtgggtgggatatgctaaggacactgatgattccatcgggagaattgtacgaataagccctggtgtcgggagatatgtggcgaagagctacaacccaaggcaattggtcactgcatcttcaggaactccattatttgaaattttccttgtcaaagaagatgatgagacatatacaatgaaggtggtacacatgcgaccaacaaaaggaacttcaggtgcaccatccatatcatcaacaataacagaaagcccagcaaaggtagagaatgaaaattcatcagaaagtagtgctatatctgacagtgttacagaggaggcaaatacagatactacggtaagaggaaatgaggatgctgaagagaaagcacaagatgttggtagcagcaaggatagtagtgtcgaaggattaaaaagtgttttgaatttttttaagtctcggattcctgaattcaaagttcaggtgataaatgttgatgtggctgaggaaactgaattagctgcaaattcgtctgaagaattagtgcaagatgatgtgaaaagtactccagaaagctcattggaagagccagccactgaggaactcgagcaggaggaagatgttccggaagaaaatacggatgaagaaagtaaaagcacggaagtgaagctttttattagtggagtggttcacaataaagaagatgctggagcaaaatcatatgttcgagttccagctgaaataaataacatggaaaaggactcctttgaactgtacattcctggagaaggttctgatcgtgatttggctgaaacaaaggctgcaaaacagaaagttgcagatatggctgctaaattagcctcagagcttatgccgtctgatgttgccaaggcattatggggtacagccaagagttcttcaaagataaataaagaagttcaggagcttttaaggcttacgttaagcaaggcccgagtcaagctgaccgaaaataccatttttaaacgaatcattatggacactaacagcacagatccatttaatggtctctatgtgggagcatttagtccatatggaccagaaattgtgcagcttcgtcggaagttcggccactggaacagtactgatgacgttgagtttttcgagtatgtcgaagcagtaaagttgactggtgatctgagtgttcctgctggccagataacgttccgtgctaagattgggaagggcaagcgacttgagaatcgaggagcatatccagaggaatttggtgtgattgccagttacaaaggtcagggtagaatagctcagcctggattcaaaaatcctcgatgggtggatggtgagctgttggtactcaatggcaagagtacaattccacaccttggaggcgcagagctcggtttcctgtatagtgtacctgagcagagttttctggttctcttcgatcggcttaatcttcccgagtgatgagactcctaaagggagcagactcctcacatgtagattgcatgaacgcgcagaggccggccacagctccaagtgaccgaaacaggtctggggggccgtttccccatcgtcttctgccctctgggcttcctgccaatcctttctccgcacctactttttaggagctcatgtgcttaactcgtttcagagtgtgagggaaagtcgacaccattgctggtctaaactaacggaggagtcttaatactaataatatatatgttatagcatggtagtttgctctccaatgccacagttgtagctgtattgggtatgggcatgacagttttgcgagttttacccgtcatcgttgatttcagtaattaccgaattgaataaaaatcgttctggtgtatcgtgatgttacaattataataatataaaacaaggcaaataaagtctcatgatttatgatcgtttttc

SEQ ID NO: 71784 - DNA, 1321 bp, Zea Mays
ctggctgtgcgcttgttcctacaacctgatgtttttttggatttgcaaccttaacaaaaagaggtagtaactactattagcaccaattggtattcatgatcctattctttccaccgtagactgcatttttatcagattctatgctgacaagatcaccttccaggcactcatttcatcttatgccaggccacttctcttatgctatcttttgccatcagttatccataccatgttcttgcaagcaagttaactgacagatgacattgtaactgcagataaataaagaagttcaggagcttttaaggcttacgttaagcaaggcccgagtcaagctgaccgaaaataccatttttaaacgaatcattatggacactaacagcacagatccatttaatggtctctatgtgggagcatttagtccatatggaccagaaattgtgcagcttcgtcggaagttcggccactggaacagtactgatgacgttgagtttttcgagtatgtcgaagcagtaaagttgactggtgatctgagtgttcctgctggccagataacgttccgtgctaagattgggaagggcaagcgacttgagaatcgaggagcatatccagaggaatttggtgtggtaatttcgtcctgccgatctgattgtttgaaagatgctaagatattgccagttacaaaggtcagggtagaatagctcagcctggattcaaaaatcctcgatgggtggatggtgagctgttggtactcaatggcaagagtacaattccacaccttggaggcgcagagctcggtttcctgtatagtgtacctgagcagagttttctggttctcttcgatcggcttaatcttcccgagtgatgagactcctaaagggagcagactcctcacatgtagattgcatgaacgcgcagaggccggccacagctccaagtgaccgaaacaggtctggggggccgtttccccatcgtcttctgccctctgggcttcctgccaatcctttctccgcacctactttttaggagctcatgtgcttaactcgtttcagagtgtgagggaaagtcgacaccattgctggtctaaactaacggaggagtcttaatactaataatatatatgttatagcatggtagtttgctctccaatgccacagttgtagctgtattgggtatgggcatgacagttttgcgagttttacccgtcatcgttgatttcagtaattaccgaattgaataaaaatcgttctggtgtatcgtgatgttacaattataataatataaaacaaggcaaataaagtctcatgatttatgatcgtttttc

SEQ ID NO: 71785 - DNA, 1277 bp, Zea Mays
ctggctgtgcgcttgttcctacaacctgatgtttttttggatttgcaaccttaacaaaaagaggtagtaactactattagcaccaattggtattcatgatcctattctttccaccgtagactgcatttttatcagattctatgctgacaagatcaccttccaggcactcatttcatcttatgccaggccacttctcttatgctatcttttgccatcagttatccataccatgttcttgcaagcaagttaactgacagatgacattgtaactgcagataaataaagaagttcaggagcttttaaggcttacgttaagcaaggcccgagtcaagctgaccgaaaataccatttttaaacgaatcattatggacactaacagcacagatccatttaatggtctctatgtgggagcatttagtccatatggaccagaaattgtgcagcttcgtcggaagttcggccactggaacagtactgatgacgttgagtttttcgagtatgtcgaagcagtaaagttgactggtgatctgagtgttcctgctggccagataacgttccgtgctaagattgggaagggcaagcgacttgagaatcgaggagcatatccagaggaatttggtgtgattgccagttacaaaggtcagggtagaatagctcagcctggattcaaaaatcctcgatgggtggatggtgagctgttggtactcaatggcaagagtacaattccacaccttggaggcgcagagctcggtttcctgtatagtgtacctgagcagagttttctggttctcttcgatcggcttaatcttcccgagtgatgagactcctaaagggagcagactcctcacatgtagattgcatgaacgcgcagaggccggccacagctccaagtgaccgaaacaggtctggggggccgtttccccatcgtcttctgccctctgggcttcctgccaatcctttctccgcacctactttttaggagctcatgtgcttaactcgtttcagagtgtgagggaaagtcgacaccattgctggtctaaactaacggaggagtcttaatactaataatatatatgttatagcatggtagtttgctctccaatgccacagttgtagctgtattgggtatgggcatgacagttttgcgagttttacccgtcatcgttgatttcagtaattaccgaattgaataaaaatcgttctggtgtatcgtgatgttacaattataataatataaaacaaggcaaataaagtctcatgatttatgatcgtttttc

SEQ ID NO: 71786 - DNA, 1679 bp, Zea Mays
gtttgctataaatgaagagtttgagttgcaaatcgtgaaaaccgacccgagtcgatttattggtgattgcaaaggggaggattgcccttggcatatcgtgggtcgtaggcaacccgatgggaagactgttatggtgacagtgttacttgatgaacacagttgtacctccagtgctagaagaaagaccactacacctactagtgcctgggtggcatcaaaggctgtccatctgttaaagaattcaaccatgggaactaaagatttgaggattaggttggaagaaaaatacaagtgtgaaataccttatgacactgtttggaagggaagacaattggcactgaaagagttgcatggtagttgggaagaaagctttcagatgctattcaattggagagcagaggttttgagtcggtctccagggagtatcattgaggtagacattaaagaggtggatggcaaggtatattttcataggtttttttgtgcattgggtccttgcattgaaggttttttagagggttgtaggccatatctaagtatagactctacagcacttaatggtaggtggaatgggcatatggctgcggcaactgctatagatggccacaattggatgtacccagtagcctttggattcatagacggtgaaactgaagacaattgggtatggttcatgagccaaatgaaaagggctataggagatctccctttgcttgctgtgtgcacagatgcatgtaaaggactagaaaaggcagttaagcatgttttccctcatgctgaacaaagagaatgctttagacatctcatgcaaaattttgtaaaaaggtttggtggtgacatcttctccaatatgtaccctgcagctagagcttataggccaggagtcagccaatacttttacaatcaagttgtggaagcttcagaggatgcaaagaagtggctagacatgtaccataagttgaagtggaaaaggagtgagtttaaccccgccattaagtgtgattatatcaccaacaacctagctgaagttttcaacaactgggttaaagattggaaggaccttccagttgttgagcttgcagacaagtgtagagagctgataatgattttgtggcagaaaagaagaaggattgcagacaagttgaatggaaaagtcttacctgcagttatacaacagttgaaggtaaagactagaggactaggtcacttgacagttacaaaggctagttatttctctgcacaagtggatgacagcacaaatactcataataggcatgtcgttaaatcctatttacatgaatgtacatgtcttgaatggcagcacactggcaagccttgccagcatgcactggcgttgattacagcacaagatagtgtggatgtggagttggaggattttgtgcatgatttttattcggttcagaggttcaagaatgcatacaagagaattattgagccactgccagataagacccagtggccacatgtggacctaccatttgttgttggcgccccactggacaagagaggtagaggaaggtacaaaaaactcagaatcaagagttgccttgaaggtgggaatagcaagggcaaaaaggttgctgcagaaaaaggaaaagaggctgacagagaggcagctaatgaagttgacgtgcaggctgaaaaccaatctgaaaaaa

SEQ ID NO: 71787 - DNA, 1977 bp, Zea Mays
atccagtcgaaacccactcacttgatggcaaagtagcgaatcccacgtttcataatggctcggttccaaatttctcccttcccaagcatggcgtccctgccgcagcccccgcgatccccttctcaagcctggcgtccctgccccccgcgatcgcgcctgccaagcatggcgtcgtcgcggccgttgcccccgcgatccccttccatcgacctgccaagcatggcatcgccccggccgttgccacgcccgccgcacacgccgcgatgagatcctggaccccccgcgacatcctcctccaccgcgccatggccgcccccgacgtcctcgcgcgccgctccccgaggtgggcatggtgcgcacgaccatcgcgggggtcacgacggcggcgcggttccaggagctggtggactggatggaggagtggaaggcggcgttcagggacaacagcaagtggacggagacggtgaacctggggctcgggagcctcgcgctcatcatgtccgggctgcttccgttcgccatcgacggggacctcgggttcgggaagcccagcctcgtgctaccctgggtgcgccatggccggctgggatccgcgtccgtgatggtggtgccctgccccagcggcgacatgtcgtggttcttcggcggcaccaggatgtggctgcggctcatggaggtggtcgaatccgaccctttgatgaagcagacaacgaacctgggaatggcgacagaggcgggatcccgtctgtgactgtgagctcgcgctggcggtacctgccattacggtgtacgggtatcatcgccatcatcatccagatccaggacatttccggatagatgacataatctgttcatctcaaatgccacaacattcgtgggcacatgttgccttgttggcttcatttagctcgcccgacatcatattttagcaactatctgtcatatataatctactaaaatggtttattttttcatttactcttatactctcatttttccaaccaggacttctgagcacatggaagatgaaggagacgttgcaactcctttacactttccaaatttttattaaatataccaatatcacgaggtgaaccttcgagtttagtgatttttcatatccatggtttgcagtgccacaaaggcaagcgaacctttgatttggtccatgttctggtctaaccttgttgggtccacactccatgggtcactttcacattactactaccatatctgtgaggtaaccattgttacatgacctactcatatatcttttgcttgtacattcaagtaaagattgtctatttcaaccacaccaaaagtaaagaaaattattaagttggtgaattgacaaaagaaatgaagcaagtttttaggtgttgaagtataagtgattcgcccaacttttcccatcagcttgacttttagtttgggggtaaactaacctacacatagcaggcatcagatatagcatattacaataagctaggtatgtgtttgtattcttagttcttttagtatattacataagctacatccctcgtgatgccttaatctaggttatatctcaatgatgatttctttataacatgctgatcataaagcatttgtagacagtgcattcaagtaacggtacaatacaaagggtggcaaatgataatagcctgaagaatgatggcacaaaatgatctagagtattctttatcttacttagattttgtcaacattccatcatcatataatctcgaatattttcataaactggttgtgtaaaatggggggatctttctccatgaatctcaatggatctgttgtgcactgcatagctgcggagaagaaaaaggtatcaaatatcaagcagctttacggcagcgaaggatcattcactatgagtggatattaaactgttgcaaggaaaacatcttcattttcatcctagacttttagtccttttttgtcacccctcaagggactaga

SEQ ID NO: 71788 - DNA, 1971 bp, Zea Mays
atccagtcgaaacccactcacttgatggcaaagtagcgaatcccacgtttcataatggctcggttccaaatttctcccttcccaagcatggcgtccctgccgcagcccccgcgatccccttctcaagcctggcgtccctgccccccgcgatcgcgcctgccaagcatggcgtcgtcgcggccgttgcccccgcgatccccttccatcgacctgccaagcatggcatcgccccggccgttgccacgcccgccgcacacgccgcgatgagatcctggaccccccgcgacatcctcctccaccgcgccatggccgcccccgacgtcctcgcgcgccgctccccgaggtgggcatggtgcgcacgaccatcgcgggggtcacgacggcggcgcggttccaggagctggtggactggatggaggagtggaaggcggcgttcagggacaacagcaagtggacggagacggtgaacctggggctcgggagcctcgcgctcatcatgtccgggctgcttccgttcgccatcgacggggacctcgggttcgggaagcccagcctcgtgctaccctgggtgcgccatggccggctgggatccgcgtccgtgatggtggtgccctgccccagcggcgacatgtcgtggttcttcggcggcaccaggatgtggctgcggctcatggaggtggtcgaatccgaccctttgatgaagcagacaacgaacctgggaatggcgacagaggcgggatcccgtctgtgactgtgagctcgcgctggcggtacctgccattacggtgtacgggtatcatcgccatcatcatccagatccaggacttctgagcacatggaagatgaaggagacgttgcaactcctttacactttccaaatttttattaaatataccaatatcacgaggtgaaccttcgagtttagtgatttttcatatccatggtttgcaggcaagtaaacttattacatataatccattgaacttcatgtcttggtttgtccaattcgacatcgaagggctcgccatgtggggtgacgtcgacggggcttcacctgtcctattctatcattattgtgattactgactatgccattgtttgtgctactgctgcttatgcttgcagtgccacaaaggcaagcgaacctttgatttggtccatgttctggtctaaccttgttgggtccacactccatgggtcactttcacattactactaccatatctgtgaggtaaccattgttacatgacctactcatatatcttttgcttgtacattcaagtaaagattgtctatttcaaccacaccaaaagtaaagaaaattattaagttggtgaattgacaaaagaaatgaagcaagtttttaggtgttgaagtataagtgattcgcccaacttttcccatcagcttgacttttagtttgggggtaaactaacctacacatagcaggcatcagatatagcatattacaataagctaggtatgtgtttgtattcttagttcttttagtatattacataagctacatccctcgtgatgccttaatctaggttatatctcaatgatgatttctttataacatgctgatcataaagcatttgtagacagtgcattcaagtaacggtacaatacaaagggtggcaaatgataatagcctgaagaatgatggcacaaaatgatctagagtattctttatcttacttagattttgtcaacattccatcatcatataatctcgaatattttcataaactggttgtgtaaaatggggggatctttctccatgaatctcaatggatctgttgtgcactgcatagctgcggagaagaaaaaggtatcaaatatcaagcagctttacggcagcgaaggatcattcactatgagtggatattaaactgttgcaaggaaaacatcttcattttcatcctagtctcatcagtgacatgtatcgcttgtcatttgatgaaaatg

SEQ ID NO: 71789 - DNA, 1689 bp, Zea Mays
atccagtcgaaacccactcacttgatggcaaagtagcgaatcccacgtttcataatggctcggttccaaatttctcccttcccaagcatggcgtccctgccgcagcccccgcgatccccttctcaagcctggcgtccctgccccccgcgatcgcgcctgccaagcatggcgtcgtcgcggccgttgcccccgcgatccccttccatcgacctgccaagcatggcatcgccccggccgttgccacgcccgccgcacacgccgcgatgagatcctggaccccccgcgacatcctcctccaccgcgccatggccgcccccgacgtcctcgcgcgccgctccccgaggtgggcatggtgcgcacgaccatcgcgggggtcacgacggcggcgcggttccaggagctggtggactggatggaggagtggaaggcggcgttcagggacaacagcaagtggacggagacggtgaacctggggctcgggagcctcgcgctcatcatgtccgggctgcttccgttcgccatcgacggggacctcgggttcgggaagcccagcctcgtgctaccctgggtgcgccatggccggctgggatccgcgtccgtgatggtggtgccctgccccagcggcgacatgtcgtggttcttcggcggcaccaggatgtggctgcggctcatggaggtggtcgaatccgaccctttgatgaagcagacaacgaacctgggaatggcgacagaggcgggatcccgtctgtgactgtgagctcgcgctggcggtacctgccattacggtgtacgggtatcatcgccatcatcatccagatccaggacttctgagcacatggaagatgaaggagacgttgcaactcctttacactttccaaatttttattaaatataccaatatcacgaggtgaaccttcgagtttagtgatttttcatatccatggtttgcaggcaagtaaacttattacatataatccattgaacttcatgtcttggtttgtccaattcgacatcgaagggctcgccatgtggggtgacgtcgacggggcttcacctgtcctattctatcattattgtgattactgactatgccattgtttgtgctactgctgcttatgcttgcagtgccacaaaggcaagcgaacctttgatttggtccatgttctggtctaaccttgttgggtccacactccatgggtcactttcacattactactaccatatctgtgagacagtgcattcaagtaacggtacaatacaaagggtggcaaatgataatagcctgaagaatgatggcacaaaatgatctagagtattctttatcttacttagattttgtcaacattccatcatcatataatctcgaatattttcataaactggttgtgtaaaatggggggatctttctccatgaatctcaatggatctgttgtgcactgcatagctgcggagaagaaaaaggtatttacctttgttttaggagttcctttttctttgataatggtatattgaacacataatttgaagtatatgtgcctgttaatttttctaggtatcaaatatcaagcagctttacggcagcgaaggatcattcactatgagtggatattaaactgttgcaaggaaaacatcttcattttcatcctagtctcatcagtgacatgtatcgcttgtcatttgatgaaaatg

SEQ ID NO: 71790 - DNA, 1781 bp, Zea Mays
atccagtcgaaacccactcacttgatggcaaagtagcgaatcccacgtttcataatggctcggttccaaatttctcccttcccaagcatggcgtccctgccgcagcccccgcgatccccttctcaagcctggcgtccctgccccccgcgatcgcgcctgccaagcatggcgtcgtcgcggccgttgcccccgcgatccccttccatcgacctgccaagcatggcatcgccccggccgttgccacgcccgccgcacacgccgcgatgagatcctggaccccccgcgacatcctcctccaccgcgccatggccgcccccgacgtcctcgcgcgccgctccccgaggtgggcatggtgcgcacgaccatcgcgggggtcacgacggcggcgcggttccaggagctggtggactggatggaggagtggaaggcggcgttcagggacaacagcaagtggacggagacggtgaacctggggctcgggagcctcgcgctcatcatgtccgggctgcttccgttcgccatcgacggggacctcgggttcgggaagcccagcctcgtgctaccctgggtgcgccatggccggctgggatccgcgtccgtgatggtggtgccctgccccagcggcgacatgtcgtggttcttcggcggcaccaggatgtggctgcggctcatggaggtggtcgaatccgaccctttgatgaagcagacaacgaacctgggaatggcgacagaggcgggatcccgtctgtgactgtgagctcgcgctggcggtacctgccattacggtgtacgggtatcatcgccatcatcatccagatccaggacatttccggatagatgacataatctgttcatctcaaatgccacaacattcgtgggcacatgttgccttgttggcttcatttagctcgcccgacatcatattttagcaactatctgtcatatataatctactaaaatggtttattttttcatttactcttatactctcatttttccaaccaggacttctgagcacatggaagatgaaggagacgttgcaactcctttacactttccaaatttttattaaatataccaatatcacgaggtgaaccttcgagtttagtgatttttcatatccatggtttgcaggcaagtaaacttattacatataatccattgaacttcatgtcttggtttgtccaattcgacatcgaagggctcgccatgtggggtgacgtcgacggggcttcacctgtcctattctatcattattgtgattactgactatgccattgtttgtgctactgctgcttatgcttgcagtgccacaaaggcaagcgaacctttgatttggtccatgttctggtctaaccttgttgggtccacactccatgggtcactttcacattactactaccatatctgtgagacagtgcattcaagtaacggtacaatacaaagggtggcaaatgataatagcctgaagaatgatggcacaaaatgatctagagtattctttatcttacttagattttgtcaacattccatcatcatataatctcgaatattttcataaactggttgtgtaaaatggggggatctttctccatgaatctcaatggatctgttgtgcactgcatagctgcggagaagaaaaaggtatcaaatatcaagcagctttacggcagcgaaggatcattcactatgagtggatattaaactgttgcaaggaaaacatcttcattttcatcctagtctcatcagtgacatgtatcgcttgtcatttgatgaaaatg

SEQ ID NO: 71791 - DNA, 2757 bp, Zea Mays
atccagtcgaaacccactcacttgatggcaaagtagcgaatcccacgtttcataatggctcggttccaaatttctcccttcccaagcatggcgtccctgccgcagcccccgcgatccccttctcaagcctggcgtccctgccccccgcgatcgcgcctgccaagcatggcgtcgtcgcggccgttgcccccgcgatccccttccatcgacctgccaagcatggcatcgccccggccgttgccacgcccgccgcacacgccgcgatgagatcctggaccccccgcgacatcctcctccaccgcgccatggccgcccccgacgtcctcgcgcgccgctccccgaggtgggcatggtgcgcacgaccatcgcgggggtcacgacggcggcgcggttccaggagctggtggactggatggaggagtggaaggcggcgttcagggacaacagcaagtggacggagacggtgaacctggggctcgggagcctcgcgctcatcatgtccgggctgcttccgttcgccatcgacggggacctcgggttcgggaagcccagcctcgtgctaccctgggtgcgccatggccggctgggatccgcgtccgtgatggtggtgccctgccccagcggcgacatgtcgtggttcttcggcggcaccaggatgtggctgcggctcatggaggtggtcgaatccgaccctttgatgaagcagacaacgaacctgggaatggcgacagaggcgggatcccgtctgtgactgtgagctcgcgctggcggtacctgccattacggtgtacgggtatcatcgccatcatcatccagatccaggacatttccggatagatgacataatctgttcatctcaaatgccacaacattcgtgggcacatgttgccttgttggcttcatttagctcgcccgacatcatattttagcaactatctgtcatatataatctactaaaatggtttattttttcatttactcttatactctcatttttccaaccaggacttctgagcacatggaagatgaaggagacgttgcaactcctttacactttccaaatttttattaaatataccaatatcacgaggtgaaccttcgagtttagtgatttttcatatccatggtttgcagtgccacaaaggcaagcgaacctttgatttggtccatgttctggtctaaccttgttgggtccacactccatgggtcactttcacattactactaccatatctgtgaggtaaccattgttacatgacctactcatatatcttttgcttgtacattcaagtaaagattgtctatttcaaccacaccaaaagtaaagaaaattattaagttggtgaattgacaaaagaaatgaagcaagtttttaggtgttgaagtataagtgattcgcccaacttttcccatcagcttgacttttagtttgggggtaaactaacctacacatagcaggcatcagatatagcatattacaataagctaggtatgtgtttgtattcttagttcttttagtatattacataagctacatccctcgtgatgccttaatctaggttatatctcaatgatgatttctttataacatgctgatcataaagcatttgtagacagtgcattcaagtaacggtacaatacaaagggtggcaaatgataatagcctgaagaatgatggcacaaaatgatctagagtattctttatcttacttagattttgtcaacattccatcatcatataatctcgaatattttcataaactggttgtgtaaaatggggggatctttctccatgaatctcaatggatctgttgtgcactgcatagctgcggagaagaaaaaggtatcaaatatcaagcagctttacggcagcgaaggatcattcactatgagtggatattaaactgttgcaaggaaaacatcttcattttcatcctagtctcatcagtgacatgtatcgcttgtcatttgatgaaaatggaagttgaacgatcattctctttttgggcactgctgaaggtgatgttgttcacccaactgagtgtatgccccagctgcttgagcaagttcggcatcacaaagcgaatatcgattgcaatgattatattgtcatggtgactacattggttcttgaggttgaggatttgtctacacaacaagtgaatgataagctcctagaagctgtacaaccttaagcactcgagcaatggagcaatgtggtatgatgagagcataggaggtttgtcgagatgaggtcgaaacatggccccaatgtaactagaccagagcaattgacaatctaggcaatatccgctatctggtccattgtttctctcgtgggtccattgtttctgtcgtgggtcagacgtcttcgacgtgaagagaggttgttttgtcatttccacattctgaagcgtaatgtagtgcagtggacgcatatagctactacgtatgttaaagttgtattttttatatctcatattagatgtatttactattttacaagccttatgaaaatagcaatatgagtggtactaaattattgatatgtattaaagcagcttcttaaaaaaactacatatcaatcaccacagttggttcgtgcgtcgtagtattggatggcttagcatagatagtggttgataaaacaccttaatataagcatgttgaagctctataatgtcgtcgtagtctgcagtgtacgccgttgcaacgcacgggcattaaactagtatacaatcaagcataaaatcaaac

SEQ ID NO: 71792 - DNA, 2716 bp, Zea Mays
atccagtcgaaacccactcacttgatggcaaagtagcgaatcccacgtttcataatggctcggttccaaatttctcccttcccaagcatggcgtccctgccgcagcccccgcgatccccttctcaagcctggcgtccctgccccccgcgatcgcgcctgccaagcatggcgtcgtcgcggccgttgcccccgcgatccccttccatcgacctgccaagcatggcatcgccccggccgttgccacgcccgccgcacacgccgcgatgagatcctggaccccccgcgacatcctcctccaccgcgccatggccgcccccgacgtcctcgcgcgccgctccccgaggtgggcatggtgcgcacgaccatcgcgggggtcacgacggcggcgcggttccaggagctggtggactggatggaggagtggaaggcggcgttcagggacaacagcaagtggacggagacggtgaacctggggctcgggagcctcgcgctcatcatgtccgggctgcttccgttcgccatcgacggggacctcgggttcgggaagcccagcctcgtgctaccctgggtgcgccatggccggctgggatccgcgtccgtgatggtggtgccctgccccagcggcgacatgtcgtggttcttcggcggcaccaggatgtggctgcggctcatggaggtggtcgaatccgaccctttgatgaagcagacaacgaacctgggaatggcgacagaggcgggatcccgtctgtgactgtgagctcgcgctggcggtacctgccattacggtgtacgggtatcatcgccatcatcatccagatccaggacatttccggatagatgacataatctgttcatctcaaatgccacaacattcgtgggcacatgttgccttgttggcttcatttagctcgcccgacatcatattttagcaactatctgtcatatataatctactaaaatggtttattttttcatttactcttatactctcatttttccaaccaggacttctgagcacatggaagatgaaggagacgttgcaactcctttacactttccaaatttttattaaatataccaatatcacgaggtgaaccttcgagtttagtgatttttcatatccatggtttgcagtgccacaaaggcaagcgaacctttgatttggtccatgttctggtctaaccttgttgggtccacactccatgggtcactttcacattactactaccatatctgtgaggtaaccattgttacatgacctactcatatatcttttgcttgtacattcaagtaaagattgtctatttcaaccacaccaaaagtaaagaaaattattaagttggtgaattgacaaaagaaatgaagcaagtttttaggtgttgaagtataagtgattcgcccaacttttcccatcagcttgacttttagtttgggggtaaactaacctacacatagcaggcatcagatatagcatattacaataagctaggtatgtgtttgtattcttagttcttttagtatattacataagctacatccctcgtgatgccttaatctaggttatatctcaatgatgatttctttataacatgctgatcataaagcatttgtagacagtgcattcaagtaacggtacaatacaaagggtggcaaatgataatagcctgaagaatgatggcacaaaatgatctagagtattctttatcttacttagattttgtcaacattccatcatcatataatctcgaatattttcataaactggttgtgtaaaatggggggatctttctccatgaatctcaatggatctgttgtgcactgcatagctgcggagaagaaaaaggtatcaaatatcaagcagctttacggcagcgaaggatcattcactatgagtggatattaaactgttgcaaggaaaacatcttcattttcatcctaggaagttgaacgatcattctctttttgggcactgctgaaggtgatgttgttcacccaactgagtgtatgccccagctgcttgagcaagttcggcatcacaaagcgaatatcgattgcaatgattatattgtcatggtgactacattggttcttgaggttgaggatttgtctacacaacaagtgaatgataagctcctagaagctgtacaaccttaagcactcgagcaatggagcaatgtggtatgatgagagcataggaggtttgtcgagatgaggtcgaaacatggccccaatgtaactagaccagagcaattgacaatctaggcaatatccgctatctggtccattgtttctctcgtgggtccattgtttctgtcgtgggtcagacgtcttcgacgtgaagagaggttgttttgtcatttccacattctgaagcgtaatgtagtgcagtggacgcatatagctactacgtatgttaaagttgtattttttatatctcatattagatgtatttactattttacaagccttatgaaaatagcaatatgagtggtactaaattattgatatgtattaaagcagcttcttaaaaaaactacatatcaatcaccacagttggttcgtgcgtcgtagtattggatggcttagcatagatagtggttgataaaacaccttaatataagcatgttgaagctctataatgtcgtcgtagtctgcagtgtacgccgttgcaacgcacgggcattaaactagtatacaatcaagcataaaatcaaac

SEQ ID NO: 71793 - DNA, 3038 bp, Zea Mays
atccagtcgaaacccactcacttgatggcaaagtagcgaatcccacgtttcataatggctcggttccaaatttctcccttcccaagcatggcgtccctgccgcagcccccgcgatccccttctcaagcctggcgtccctgccccccgcgatcgcgcctgccaagcatggcgtcgtcgcggccgttgcccccgcgatccccttccatcgacctgccaagcatggcatcgccccggccgttgccacgcccgccgcacacgccgcgatgagatcctggaccccccgcgacatcctcctccaccgcgccatggccgcccccgacgtcctcgcgcgccgctccccgaggtgggcatggtgcgcacgaccatcgcgggggtcacgacggcggcgcggttccaggagctggtggactggatggaggagtggaaggcggcgttcagggacaacagcaagtggacggagacggtgaacctggggctcgggagcctcgcgctcatcatgtccgggctgcttccgttcgccatcgacggggacctcgggttcgggaagcccagcctcgtgctaccctgggtgcgccatggccggctgggatccgcgtccgtgatggtggtgccctgccccagcggcgacatgtcgtggttcttcggcggcaccaggatgtggctgcggctcatggaggtggtcgaatccgaccctttgatgaagcagacaacgaacctgggaatggcgacagaggcgggatcccgtctgtgactgtgagctcgcgctggcggtacctgccattacggtgtacgggtatcatcgccatcatcatccagatccaggacatttccggatagatgacataatctgttcatctcaaatgccacaacattcgtgggcacatgttgccttgttggcttcatttagctcgcccgacatcatattttagcaactatctgtcatatataatctactaaaatggtttattttttcatttactcttatactctcatttttccaaccaggacttctgagcacatggaagatgaaggagacgttgcaactcctttacactttccaaatttttattaaatataccaatatcacgaggtgaaccttcgagtttagtgatttttcatatccatggtttgcaggcaagtaaacttattacatataatccattgaacttcatgtcttggtttgtccaattcgacatcgaagggctcgccatgtggggtgacgtcgacggggcttcacctgtcctattctatcattattgtgattactgactatgccattgtttgtgctactgctgcttatgcttgcagtgccacaaaggcaagcgaacctttgatttggtccatgttctggtctaaccttgttgggtccacactccatgggtcactttcacattactactaccatatctgtgaggtaaccattgttacatgacctactcatatatcttttgcttgtacattcaagtaaagattgtctatttcaaccacaccaaaagtaaagaaaattattaagttggtgaattgacaaaagaaatgaagcaagtttttaggtgttgaagtataagtgattcgcccaacttttcccatcagcttgacttttagtttgggggtaaactaacctacacatagcaggcatcagatatagcatattacaataagctaggtatgtgtttgtattcttagttcttttagtatattacataagctacatccctcgtgatgccttaatctaggttatatctcaatgatgatttctttataacatgctgatcataaagcatttgtagacagtgcattcaagtaacggtacaatacaaagggtggcaaatgataatagcctgaagaatgatggcacaaaatgatctagagtattctttatcttacttagattttgtcaacattccatcatcatataatctcgaatattttcataaactggttgtgtaaaatggggggatctttctccatgaatctcaatggatctgttgtgcactgcatagctgcggagaagaaaaaggtatcaaatatcaagcagctttacggcagcgaaggatcattcactatgagtggatattaaactgttgcaaggaaaacatcttcattttcatcctagatagacttttagtccttttttgtcacccctcaagggactagagactaaaagggtttagtccttcatatttggaaatttggtagtctgatgcatgcacattcgatctgtctcatcagtgacatgtatcgcttgtcatttgatgaaaatggaagttgaacgatcattctctttttgggcactgctgaaggtgatgttgttcacccaactgagtgtatgccccagctgcttgagcaagttcggcatcacaaagcgaatatcgattgcaatgattatattgtcatggtgactacattggttcttgaggttgaggatttgtctacacaacaagtgaatgataagctcctagaagctgtacaaccttaagcactcgagcaatggagcaatgtggtatgatgagagcataggaggtttgtcgagatgaggtcgaaacatggccccaatgtaactagaccagagcaattgacaatctaggcaatatccgctatctggtccattgtttctctcgtgggtccattgtttctgtcgtgggtcagacgtcttcgacgtgaagagaggttgttttgtcatttccacattctgaagcgtaatgtagtgcagtggacgcatatagctactacgtatgttaaagttgtattttttatatctcatattagatgtatttactattttacaagccttatgaaaatagcaatatgagtggtactaaattattgatatgtattaaagcagcttcttaaaaaaactacatatcaatcaccacagttggttcgtgcgtcgtagtattggatggcttagcatagatagtggttgataaaacaccttaatataagcatgttgaagctctataatgtcgtcgtagtctgcagtgtacgccgttgcaacgcacgggcattaaactagtatacaatcaagcataaaatcaaac

SEQ ID NO: 71794 - DNA, 2343 bp, Zea Mays
atccagtcgaaacccactcacttgatggcaaagtagcgaatcccacgtttcataatggctcggttccaaatttctcccttcccaagcatggcgtccctgccgcagcccccgcgatccccttctcaagcctggcgtccctgccccccgcgatcgcgcctgccaagcatggcgtcgtcgcggccgttgcccccgcgatccccttccatcgacctgccaagcatggcatcgccccggccgttgccacgcccgccgcacacgccgcgatgagatcctggaccccccgcgacatcctcctccaccgcgccatggccgcccccgacgtcctcgcgcgccgctccccgaggtgggcatggtgcgcacgaccatcgcgggggtcacgacggcggcgcggttccaggagctggtggactggatggaggagtggaaggcggcgttcagggacaacagcaagtggacggagacggtgaacctggggctcgggagcctcgcgctcatcatgtccgggctgcttccgttcgccatcgacggggacctcgggttcgggaagcccagcctcgtgctaccctgggtgcgccatggccggctgggatccgcgtccgtgatggtggtgccctgccccagcggcgacatgtcgtggttcttcggcggcaccaggatgtggctgcggctcatggaggtggtcgaatccgaccctttgatgaagcagacaacgaacctgggaatggcgacagaggcgggatcccgtctgtgactgtgagctcgcgctggcggtacctgccattacggtgtacgggtatcatcgccatcatcatccagatccaggacatttccggatagatgacataatctgttcatctcaaatgccacaacattcgtgggcacatgttgccttgttggcttcatttagctcgcccgacatcatattttagcaactatctgtcatatataatctactaaaatggtttattttttcatttactcttatactctcatttttccaaccaggacttctgagcacatggaagatgaaggagacgttgcaactcctttacactttccaaatttttattaaatataccaatatcacgaggtgaaccttcgagtttagtgatttttcatatccatggtttgcagtgccacaaaggcaagcgaacctttgatttggtccatgttctggtctaaccttgttgggtccacactccatgggtcactttcacattactactaccatatctgtgagacagtgcattcaagtaacggtacaatacaaagggtggcaaatgataatagcctgaagaatgatggcacaaaatgatctagagtattctttatcttacttagattttgtcaacattccatcatcatataatctcgaatattttcataaactggttgtgtaaaatggggggatctttctccatgaatctcaatggatctgttgtgcactgcatagctgcggagaagaaaaaggtatcaaatatcaagcagctttacggcagcgaaggatcattcactatgagtggatattaaactgttgcaaggaaaacatcttcattttcatcctaggaagttgaacgatcattctctttttgggcactgctgaaggtgatgttgttcacccaactgagtgtatgccccagctgcttgagcaagttcggcatcacaaagcgaatatcgattgcaatgattatattgtcatggtgactacattggttcttgaggttgaggatttgtctacacaacaagtgaatgataagctcctagaagctgtacaaccttaagcactcgagcaatggagcaatgtggtatgatgagagcataggaggtttgtcgagatgaggtcgaaacatggccccaatgtaactagaccagagcaattgacaatctaggcaatatccgctatctggtccattgtttctctcgtgggtccattgtttctgtcgtgggtcagacgtcttcgacgtgaagagaggttgttttgtcatttccacattctgaagcgtaatgtagtgcagtggacgcatatagctactacgtatgttaaagttgtattttttatatctcatattagatgtatttactattttacaagccttatgaaaatagcaatatgagtggtactaaattattgatatgtattaaagcagcttcttaaaaaaactacatatcaatcaccacagttggttcgtgcgtcgtagtattggatggcttagcatagatagtggttgataaaacaccttaatataagcatgttgaagctctataatgtcgtcgtagtctgcagtgtacgccgttgcaacgcacgggcattaaactagtatacaatcaagcataaaatcaaac

SEQ ID NO: 71795 - DNA, 684 bp, Zea Mays
cacggcctcgcctcctcttccgtcctctgtttatataataataataataacttgccaggcgcgcgccatctcgctccgtccatccctgtcgccaccaatccatcgcttccgcttcggcctcaacgacggccgccaccaccgctcccatccctctcctcctcctcgcccagcggccattaccacagcctcccccatcaagccgggatggctgcacagcctgcactcaaggcgtcgttcagaggggagctcaacgccgtctccttcctcgactccagcaggggacctttcggccaacacaaaggaccatgcttcgtcgccgaaggtcctgcggaaagaaaacagcttcgactgaagctgcttgaacgtaatgccgaaggtaccattcatgaagcttcggtattacagcatgtccgaagatgagggatcgaaccgacttaaagatagaatgaccttttagttcataagggtctgagtcaatgttgtaaacttttatgagggacatgattgtaatttctcacaggctgtgtcctgtgcctataaatagtgaacagtattcctttactgttcacgcattcctgtaattgcaaacgcttcactcgggaattattgtttgtcaagacaaatgtataaatgtatctaaacattatgtttaagcatcttagattcatataataagatatgtga

SEQ ID NO: 71796 - DNA, 1746 bp, Zea Mays
cctcgcctcctcttccgtcctctgtttatataataataataataacttgccaggcgcgcgccatctcgctccgtccatccctgtcgccaccaatccatcgcttccgcttcggcctcaacgacggccgccaccaccgctcccatccctctcctcctcctcgcccagcggccattaccacagcctcccccatcaagccgggatggctgcacagcctgcactcaaggcgtcgttcagaggggagctcaacgccgtctccttcctcgactccagcaggggacctttcggccaacacaaagtggattttacgtttcaaaggaagggcaaacgagctatttcactgagaaggacatgttgttccatgcaacaggctccaccaccggcatggcctgggcgagctgttgctgagcctggccggaggtcattggatggcccaaagcctatatcgattgttggatccactggttccataggaacacagacattggacattgttgcggagaatcctgataagttcagagttgttgctctttctgctggatccaatgtcacgcttctagctgatcaggtcaaaacattcaagcctaagttggttgctgtaagaaacgaaacattagttgatgaactaaaagaagctttagctgattgcgaagagaagccagaaattattcctggggagcaaggtgtcatagaagtcgctcgacacccggatgcaattacagttgtcacagggatagtagggtgtgcagggctgaagcctacagttgctgcaattgaagctggtaaagacatagcattggcaaacaaagaaacgcttattgcaggtggtcctttcgtgcttccccttgcacacaaacataaagtgaaaattcttcctgctgattctgagcactctgcaatatttcaggcaagtccatccatatgtgttatatgtacttcggtaaacatgcgaatccatctcatatcaaatgctcatgacagggactggccagttgacaggctgaaagatgtaaaagtagctgacgctttaaagcatccaaactggaatatgggaaagaagatcacagtagattctgctactttattcaacaagggtttagaagttattgaggcacattatttatttggtgctgaatatgatgacattgagattgtgattcacccacaatctatcatacactctatggttgaaacccaggattcatctgtcctagctcaattgggatggccggatatgcggataccaatcttatacaccttatcgtggccagatagaatctattgctcggaggtcacgtggccccgtctaaatctttgcaagttgggttcgctgacgttcaaagctcctgacaatgtaaaatacccgtcaatggacctagcgtacgcagctgggcgggctgggggcaccatgacaggagttctaagcgctgccaacgagaaggccgtggagctgttcatcgatgaaaagattagctacctggacatattcaaggtggtggagctcacgtgtgacgcgcatcggaacgagctggtagcaagcccatcgctggaggagatcatccattatgatctgtgggcgaggagacacgcagccagcctacaaccagcttctggcctgagcccggtccctgcatagtagtaatcacatgcgaacgttgtcacgaccatggtgtgtatagcaagcagttctgagatgtggcgaagtgtgtggcccctggagctggatgaaattacatgcgaacgttgtcg

SEQ ID NO: 71797 - DNA, 1790 bp, Zea Mays
ctctgtttatataataataataataacttgccaggcgcgcgccatctcgctccgtccatccctgtcgccaccaatccatcgcttccgcttcggcctcaacgacggccgccaccaccgctcccatccctctcctcctcctcgcccagcggccattaccacagcctcccccatcaagccgggatggctgcacagcctgcactcaaggcgtcgttcagaggggagctcaacgccgtctccttcctcgactccagcaggggacctttcggccaacacaaagtggattttacgtttcaaaggaagggcaaacgagctatttcactgagaaggacatgttgttccatgcaacaggctccaccaccggcatggcctgggcgagctgttgctgagcctggccggaggtcattggatggcccaaagcctatatcgattgttggatccactggttccataggaacacagatcattcgtagtagttcaatgctattatattctgcagcactaatattcaatcttttacataacgcgaagacattggacattgttgcggagaatcctgataagttcagagttgttgctctttctgctggatccaatgtcacgcttctagctgatcaggtcaaaacattcaagcctaagttggttgctgtaagaaacgaaacattagttgatgaactaaaagaagctttagctgattgcgaagagaagccagaaattattcctggggagcaaggtgtcatagaagtcgctcgacacccggatgcaattacagttgtcacagggatagtagggtgtgcagggctgaagcctacagttgctgcaattgaagctggtaaagacatagcattggcaaacaaagaaacgcttattgcaggtggtcctttcgtgcttccccttgcacacaaacataaagtgaaaattcttcctgctgattctgagcactctgcaatatttcagtgcatccaaggcttgtccgaaggagcacttcgtcgcattattctaactgcatcaggtggtgctttcagggactggccagttgacaggctgaaagatgtaaaagtagctgacgctttaaagcatccaaactggaatatgggaaagaagatcacagtagattctgctactttattcaacaagggtttagaagttattgaggcacattatttatttggtgctgaatatgatgacattgagattgtgattcacccacaatctatcatacactctatggttgaaacccaggattcatctgtcctagctcaattgggatggccggatatgcggataccaatcttatacaccttatcgtggccagatagaatctattgctcggaggtcacgtggccccgtctaaatctttgcaagttgggttcgctgacgttcaaagctcctgacaatgtaaaatacccgtcaatggacctagcgtacgcagctgggcgggctgggggcaccatgacaggagttctaagcgctgccaacgagaaggccgtggagctgttcatcgatgaaaagattagctacctggacatattcaaggtggtggagctcacgtgtgacgcgcatcggaacgagctggtagcaagcccatcgctggaggagatcatccattatgatctgtgggcgaggagacacgcagccagcctacaaccagcttctggcctgagcccggtccctgcatagtagtaatcacatgcgaacgttgtcacgaccatggtgtgtatagcaagcagttctgagatgtggcgaagtgtgtggcccctggagctggatgaaattacatgcgaacgttgtcg

SEQ ID NO: 71798 - DNA, 2113 bp, Zea Mays
gtcttgtctcgtctgccaacgcaccgcgacgtggcgtctggcgtggtcgagcctctagagaagcgagccgtgcccgtctctcccaatccactccgtactcggcgctcctcccccgtcgccgccggaaatcaggaagcccaagtgctctcttgggtgcgctcgtcgccggtggcagtgagccagtgatgcatcttcatctccggcttccttattaggatcagcccgtcgatcgatcatggcgtcgtcgagctcggctgctactactagtggtgacagtcagggtctcaaggctcgagatgcctgcatcgtcggcgtcgcccgcacgcccatcggcgcacttctcgggtcgctgtcgtccctccccgccaccaagctcggctccatcgccatccagggtgctctcaagagggcgaaggtcgacccggcgctcgtgcaggaggttttcatgggcaacgtcctcagcgccaaccttggccaggctccggcaaggcaggcagcccttggcgccggcttgcccaactccgtgccatgtaccaccgtcaacaaagtttgttcctcgggaatgaaggctgtcatgtttgcggctcaaagtattcagctggggatcaacgatgttgtggtcgccggtggcatggaaagcatgtcgaatgccccaaaatatgtggctgaagcaagacgaggatcacggttcggacatgatgtccttgttgatgggatgctcaaggatggcctgtgggatgtctataacgatttcccgatgggaatgtgtgctgaattgtgttcagaccagcactcaatctcaagggaggagcaggattcgtatgctatcctcagcaatgaacgtggcatagcagctcaggacagcggtgcattttcttgggagattgttcctgttgaaatttcttctggtagagggaaaccaccagttgttgttgacaaggatgagagtcttgcaaagtttgatccagtaaagctgaagaaacttgggccaacttttaagacgaatggttctgtaacggctggcaattcttctagtataagtgatggcgctgctgcaattgtccttgtcagtggagagaaagccaagaatcttggccttgaagttattgcaaggattacagggtatgctgatgctgcacaggcacctgagctgtttacgacagctccagcccttgccattccaaaggctatatcaaatgcagctcttcaaacttcacagatagattattatgaagtaaatgaggctttctctgttgttgctatagctaatcagaggcttcttggtatcccttccggaaagctaaacttaagtggtggtgctgtttccctgggccatcctatcggttgcagtggtgcacggataattgtcactttgcttgggattcttagacagaaaaatggaaaatttggtgttgctggagtttgcaatggcggcggcggcgcttcagccctcgttttggagctcatgcaaccctcttcgcatatccattcatcattgtgaagttggtgcgagcaaattagcaagacaaaatttgtaaaatgtgctgtatctgtcgtgctgctcagcacagggcattatcttgtactcccttatatgggaaaatatagacgtatatatacccatggaaataacagaggcccggaagaataatgtacagacactgatacagccactgaaagaagacatgggtagtgaacaatctgcgtggacgtgattttgccttgccattttatgttggggcaattgtgagtgcagttgtaagaatctttatgaggaagattcttcaataggcaacaccgaattgaattggtgtaacgtgtgccccaacatgaaatgtaatcatcagattccgatgacaaattatgagctgctcatagttaaggttaagaagaggcgcaggtcagtgactacgcacgctacaaattcgcccaggcgtgcaactgaatcattacagattttggtttttgaaattggcacaagcgatgctgtttgcggattagcagaagccagaattaagcattggccgtagaaattcagcagtaaacagcaactctgccagagggaaagaaaaaagaaattcgagaccacagtccttcaaagctttattacccg

SEQ ID NO: 71799 - DNA, 1978 bp, Zea Mays
cttgtctcgtctgccaacgcaccgcgacgtggcgtctggcgtggtcgagcctctagagaagcgagccgtgcccgtctctcccaatccactccgtactcggcgctcctcccccgtcgccgccggaaatcaggaagcccaagtggtagcgaacacactccgacactcgccacccccctctcgcccccttcgcccgcagctgccgtcgcatgaaattgacgaactctgcttcctcttctcgatctcgcagctctcttgggtgcgctcgtcgccggtggcagtgagccagtgatgcatcttcatctccggcttccttattaggatcagcccgtcgatcgatcatggcgtcgtcgagctcggctgctactactagtggtgacagtcagggtctcaaggctcgagatgcctgcatcgtcggcgtcgcccgcacgcccatcggcgcacttctcgggtcgctgtcgtccctccccgccaccaagctcggctccatcgccatccagggtgctctcaagagggcgaaggtcgacccggcgctcgtgcaggaggttttcatgggcaacgtcctcagcgccaaccttggccaggctccggcaaggcaggcagcccttggcgccggcttgcccaactccgtgccatgtaccaccgtcaacaaagtttgttcctcgggaatgaaggctgtcatgtttgcggctcaaagtattcagctggggatcaacgatgttgtggtcgccggtggcatggaaagcatgtcgaatgccccaaaatatgtggctgaagcaagacgaggatcacggttcggacatgatgtccttgttgatgggatgctcaaggatggcctgtgggatgtctataacgatttcccgatgggaatgtgtgctgaattgtgttcagaccagcactcaatctcaagggaggagcaggattcgtatgctatcctcagcaatgaacgtggcatagcagctcaggacagcggtgcattttcttgggagattgttcctgttgaaatttcttctggtagagggaaaccaccagttgttgttgacaaggatgagagtcttgcaaagtttgatccagtaaagctgaagaaacttgggccaacttttaagacgaatggttctgtaacggctggcaattcttctagtataagtgatggcgctgctgcaattgtccttgtcagtggagagaaagccaagaatcttggccttgaagttattgcaaggattacagggtatgctgatgctgcacaggcacctgagctgtttacgacagctccagcccttgccattccaaaggctatatcaaatgcagctcttcaaacttcacagatagattattatgaagtaaatgaggctttctctgttgttgctatagctaatcagaggcttcttggtatcccttccggaaagctaaacttaagtggtggtgctgtttccctgggccatcctatcggttgcagtggtgcacggataattgtcactttgcttgggattcttagacagaaaaatggaaaatttggtgttgctggagtttgcaatggcggcggcggcgcttcagccctcgttttggagctcatgcaaccctcttcgcatatccattcatcattgtgaagttggtgcgagcaaattagcaagacaaaatttgtaaaatgtgctgtatctgtcgtgctgctcagcacagggcattatcttgtactcccttatatgggaaaatatagacgtatatatacccatggaaataacagaggcccggaagaataatgtacagacactgatacagccactgaaagaagacatgggtagtgaacaatctgcgtggacgtgattttgccttgccattttatgttggggcaattgtgagtgcagttgtaagaatctttatgaggaagattcttcaataggcaacaccgaattgaattggtgtaacgtgtgccccaacatgaaatgtaatcatcaggaacaggcgccgttggctttgcacatgc

SEQ ID NO: 71800 - DNA, 1872 bp, Zea Mays
ctcgtctgccaacgcaccgcgacgtggcgtctggcgtggtcgagcctctagagaagcgagccgtgcccgtctctcccaatccactccgtactcggcgctcctcccccgtcgccgccggaaatcaggaagcccaagtgctctcttgggtgcgctcgtcgccggtggcagtgagccagtgatgcatcttcatctccggcttccttattaggatcagcccgtcgatcgatcatggcgtcgtcgagctcggctgctactactagtggtgacagtcagggtctcaaggctcgagatgcctgcatcgtcggcgtcgcccgcacgcccatcggcgcacttctcgggtcgctgtcgtccctccccgccaccaagctcggctccatcgccatccagggtgctctcaagagggcgaaggtcgacccggcgctcgtgcaggaggttttcatgggcaacgtcctcagcgccaaccttggccaggctccggcaaggcaggcagcccttggcgccggcttgcccaactccgtgccatgtaccaccgtcaacaaagtttgttcctcgggaatgaaggctgtcatgtttgcggctcaaagtattcagctggggatcaacgatgttgtggtcgccggtggcatggaaagcatgtcgaatgccccaaaatatgtggctgaagcaagacgaggatcacggttcggacatgatgtccttgttgatgggatgctcaaggatggcctgtgggatgtctataacgatttcccgatgggaatgtgtgctgaattgtgttcagaccagcactcaatctcaagggaggagcaggattcgtatgctatcctcagcaatgaacgtggcatagcagctcaggacagcggtgcattttcttgggagattgttcctgttgaaatttcttctggtagagggaaaccaccagttgttgttgacaaggatgagagtcttgcaaagtttgatccagtaaagctgaagaaacttgggccaacttttaagacgaatggttctgtaacggctggcaattcttctagtataagtgatggcgctgctgcaattgtccttgtcagtggagagaaagccaagaatcttggccttgaagttattgcaaggattacagggtatgctgatgctgcacaggcacctgagctgtttacgacagctccagcccttgccattccaaaggctatatcaaatgcagctcttcaaacttcacagatagattattatgaagtaaatgaggctttctctgttgttgctatagctaatcagaggcttcttggtatcccttccggaaagctaaacttaagtggtggtgctgtttccctgggccatcctatcggttgcagtggtgcacggataattgtcactttgcttgggattcttagacagaaaaatggaaaatttggtgttgctggagtttgcaatggcggcggcggcgcttcagccctcgttttggagctcatgcaaccctcttcgcatatccattcatcattgtgaagttggtgcgagcaaattagcaagacaaaatttgtaaaatgtgctgtatctgtcgtgctgctcagcacagggcattatcttgtactcccttatatgggaaaatatagacgtatatatacccatggaaataacagaggcccggaagaataatgtacagacactgatacagccactgaaagaagacatgggtagtgaacaatctgcgtggacgtgattttgccttgccattttatgttggggcaattgtgagtgcagttgtaagaatctttatgaggaagattcttcaataggcaacaccgaattgaattggtgtaacgtgtgccccaacatgaaatgtaatcatcagcgcaattatcctgtcaactggagacaggacag

SEQ ID NO: 71801 - DNA, 1702 bp, Zea Mays
tgccaacgcaccgcgacgtggcgtctggcgtggtcgagcctctagagaagcgagccgtgcccgtctctcccaatccactccgtactcggcgctcctcccccgtcgccgccggaaatcaggaagcccaagtgctctcttgggtgcgctcgtcgccggtggcagtgagccagtgatgcatcttcatctccggcttccttattaggatcagcccgtcgatcgatcatggcgtcgtcgagctcggctgctactactagtggtgacagtcagggtctcaaggctcgagatgcctgcatcgtcggcgtcgcccgcacgcccatcggcgcacttctcgggtcgctgtcgtccctccccgccaccaagctcggctccatcgccatccagggtgctctcaagagggcgaaggtcgacccggcgctcgtgcaggaggttttcatgggcaacgtcctcagcgccaaccttggccaggctccggcaaggcaggcagcccttggcgccggcttgcccaactccgtgccatgtaccaccgtcaacaaagtttgttcctcgggaatgaaggctgtcatgtttgcggctcaaagtattcagctggggatcaacgatgttgtggtcgccggtggcatggaaagcatgtcgaatgccccaaaatatgtggctgaagcaagacgaggatcacggttcggacatgatgtccttgttgatgggatgctcaaggatggcctgtgggatgtctataacgatttcccgatgggaatgtgtgctgaattgtgttcagaccagcactcaatctcaagggaggagcaggattcgtatgctatcctcagcaatgaacgtggcatagcagctcaggacagcggtgcattttcttgggagattgttcctgttgaaatttcttctggtagagggaaaccaccagttgttgttgacaaggatgagagtcttgcaaagtttgatccagtaaagctgaagaaacttgggccaacttttaagacgaatggttctgtaacggctggcaattcttctagtataagtgatggcgctgctgcaattgtccttgtcagtggagagaaagccaagaatcttggccttgaagttattgcaaggattacagggtatgctgatgctgcacaggcacctgagctgtttacgacagctccagcccttgccattccaaaggctatatcaaatgcagctcttcaaacttcacagatagattattatgaagtaaatgaggctttctctgttgttgctatagctaatcagaggcttcttggtatcccttccggaaagctaaacttaagtggtggtgctgtttccctgggccatcctatcggttgcagtggtgcacggataattgtcactttgcttgggattcttagacagaaaaatggaaaatttggtgttgctggagtttgcaatggcggcggcggcgcttcagccctcgttttggagctcatgtccgggtcaaatctgcggcgtcccccgtactccccgcctttcgcctgcacagcgacccacccacctgtaaagccggccccaatttggatgtccccttatcttgccgtccctatatatgcccccaattcgcttcatccacccagcaaatcccgatggaacaaacaagtttaaaaccgcgatgttgtttgacgatgttctaggtagttcaagattttttttagatatttttcatgtaccttatgttttc

SEQ ID NO: 71802 - DNA, 1470 bp, Zea Mays
cgcgacgtggcgtctggcgtggtcgagcctctagagaagcgagccgtgcccgtctctcccaatccactccgtactcggcgctcctcccccgtcgccgccggaaatcaggaagcccaagtgctctcttgggtgcgctcgtcgccggtggcagtgagccagtgatgcatcttcatctccggcttccttattaggatcagcccgtcgatcgatcatggcgtcgtcgagctcggctgctactactagtggtgacagtcagggtctcaaggctcgagatgcctgcatcgtcggcgtcgcccgcacgcccatcggcgcacttctcgggtcgctgtcgtccctccccgccaccaagctcggctccatcgccatccagggtgctctcaagagggcgaaggtcgacccggcgctcgtgcaggaggttttcatgggcaacgtcctcagcgccaaccttggccaggctccggcaaggcaggcagcccttggcgccggcttgcccaactccgtgccatgtaccaccgtcaacaaagtttgttcctcgggaatgaaggctgtcatgtttgcggctcaaagtattcagctggggatcaacgatgttgtggtcgccggtggcatggaaagcatgtcgaatgccccaaaatatgtggctgaagcaagacgaggatcacggttcggacatgatgtccttgttgatgggatgctcaaggatggcctgtgggatgtctataacgatttcccgatgggaatgtgtgctgaattgtgttcagaccagcactcaatctcaagggaggagcaggattcgtatgctatcctcagcaatgaacgtggcatagcagctcaggacagcggtgcattttcttgggagattgttcctgttgaaatttcttctggtagagggaaaccaccagttgttgttgacaaggatgagagtcttgcaaagtttgatccagtaaagctgaagaaacttgggccaacttttaagacgaatggttctgtaacggctggcaattcttctagtataagtgatggcgctgctgcaattgtccttgtcagtggagagaaagccaagaatcttggccttgaagttattgcaaggattacagggtatgctgatgctgcacaggcacctgagctgtttacgacagctccagcccttgccattccaaaggctatatcaaatgcagctcttcaaacttcacagatagattattatgaagtaaatgaggctttctctgttgttgctatagctaatcagaggcttcttggtatcccttccggaaagctaaacttaagtggtggtgctgtttccctgggccatcctatcggttgcagtggtgcacggataattgtcactttgcttgggattcttagacagaaaaatggaaaatttggtgttgctggagtttgcaatggcggcggcggcgcttcagccctcgttttggagctcatatatgttgtcttattacccccgttttg

SEQ ID NO: 71803 - DNA, 1475 bp, Zea Mays
cgcgacgtggcgtctggcgtggtcgagcctctagagaagcgagccgtgcccgtctctcccaatccactccgtactcggcgctcctcccccgtcgccgccggaaatcaggaagcccaagtgctctcttgggtgcgctcgtcgccggtggcagtgagccagtgatgcatcttcatctccggcttccttattaggatcagcccgtcgatcgatcatggcgtcgtcgagctcggctgctactactagtggtgacagtcagggtctcaaggctcgagatgcctgcatcgtcggcgtcgcccgcacgcccatcggcgcacttctcgggtcgctgtcgtccctccccgccaccaagctcggctccatcgccatccagggtgctctcaagagggcgaaggtcgacccggcgctcgtgcaggaggttttcatgggcaacgtcctcagcgccaaccttggccaggctccggcaaggcaggcagcccttggcgccggcttgcccaactccgtgccatgtaccaccgtcaacaaagtttgttcctcgggaatgaaggctgtcatgtttgcggctcaaagtattcagctggggatcaacgatgttgtggtcgccggtggcatggaaagcatgtcgaatgccccaaaatatgtggctgaagcaagacgaggatcacggttcggacatgatgtccttgttgatgggatgctcaaggatggcctgtgggatgtctataacgatttcccgatgggaatgtgtgctgaattgtgttcagaccagcactcaatctcaagggaggagcaggattcgtatgctatcctcagcaatgaacgtggcatagcagctcaggacagcggtgcattttcttgggagattgttcctgttgaaatttcttctggtagagggaaaccaccagttgttgttgacaaggatgagagtcttgcaaagtttgatccagtaaagctgaagaaacttgggccaacttttaagacgaatggttctgtaacggctggcaattcttctagtataagtgatggcgctgctgcaattgtccttgtcagtggagagaaagccaagaatcttggccttgaagttattgcaaggattacagggtatgctgatgctgcacaggcacctgagctgtttacgacagctccagcccttgccattccaaaggctatatcaaatgcagctcttcaaacttcacagatagattattatgaagtaaatgaggctttctctgttgttgctatagctaatcagaggcttcttggtatcccttccggaaagctaaacttaagtggtggtgctgtttccctgggccatcctatcggttgcagtggtgcacggataattgtcactttgcttgggattcttagacagaaaaatggaaaatttggtgttgctggagtttgcaatggcggcggcggcgcttcagccctcgttttggagctcatcgcaattatcctgtcaactggagacaggacag

SEQ ID NO: 71804 - DNA, 1120 bp, Zea Mays
acaactattaagacccaaatgtagactgcccccgcctgcgaacgaatcccacccgccgctctgcctcccccgcggcgaatcccgcccgcgcctcccccgccatagaacccgcctccaaccgcgaatcgcccgccgtgccttcacccgccgctcctccatctcctcctcctcgtcgtcgctgccgccgcgctgcggggggcgccgttggcggacgccggcgcggacacctgcaaggcgtggttggtgcagtccatccccacggacatgccgcacctgagccgcatccccggggtcctatccacggtggctctcggggaatgcaacgaagagtctggacatccttgcgcagtactggcagttcttgccccagccgaacaatccgaaatcgggggactacgggttctccaagagtgacatgaggagattcggggccgacgagggccgccgggtttacaaggcactggaaaatgctgcagaccgtaagatcaaaatcaggattgtccagcactctggatttgctcctgattttgaccaagagagcgcagatctggctgcaggaagaccaaatgttgagaacgcaaccgttcttttcgaggactggtggggatctggtgttgtgcacgcaaaggtctggatatcagataagaaggatgtgtatataggttccgcaaacaacgactggaaatcccttactcaggtcaaggagcttgggatttattttgctggttgcccacatatagcaaaaactgtggaggtctattttcaaaacctgtggacgctttcaaccctcaactcaactttttacaccaaacaagcctgggatacgcagtggcaagtttctagaaaggttccatgctggtctcatttcctacagcccaaagaaagatgcaggtttgcatctccctctgcaggtcacagcgatctactacttagtgcacaaatttgaaggggaaaaatggctggtacatagatggcaataaattatgtacaatctaagcacacaaatttgaaggaaaaaatggctggtacatagatgggaaataaattatgtacaatctatccattaacctatattgtctgcatttatcttagtgctgaatctgatccatcttcgattctg

SEQ ID NO: 71805 - DNA, 1008 bp, Zea Mays
acaactattaagacccaaatgtagactgcccccgcctgcgaacgaatcccacccgccgctctgcctcccccgcggcgaatcccgcccgcgcctcccccgccatagaacccgcctccaaccgcgaatcgcccgccgtgccttcacccgccgctcctccatctcctcctcctcgtcgtcgctgccgccgcgctgcggggggcgccgttggcggacgccggcgcggacacctgcaaggcgtggttggtgcagtccatccccacggacatgccgcacctgagccgcatccccggggtcctatccacggccgtcactacgtatatccatccattgggctgctgatttctgtgggtcctgacctcaggagatgtgctccagtggctctcggggaatgcaacgaagagtctggacatccttgcgcagtactggcagttcttgccccagccgaacaatccgaaatcgggggactacgggttctccaagagtgacatgaggagattcggggccgacgagggccgccgggtttacaaggcactggaaaatgctgcagaccgtaagatcaaaatcaggattgtccagcactctggatttgctcctgattttgaccaagagagcgcagatctggctgcaggaagaccaaatgttgagaacgcaaccgttcttttcgaggactggtggggatctggtgttgtgcacgcaaaggtctggatatcagataagaaggatgtgtatataggttccgcaaacaacgactggaaatcccttactcaggtcaaggagcttgggatttattttgctggttgcccacatatagcaaaaactgtggaggtctattttcaaaacctgtggacgctttcaaccctcaactcaactttttacaccaaacaagcctgggatacgcagtggcaagtttctagaaaggttccatgctggtctcatttcctacagcccaaagaaagatgcaggggcggcgtgaagcgcatctccgggctcatctacgaggagacccgc

SEQ ID NO: 71806 - DNA, 2650 bp, Zea Mays
agagagcagcaaggagagcgagcgcaccaacggggatctgagcatccgaccggccgcttgctagggtttcgtccgtccgcctccctgccacagcaccactccgcatctccagccctagcctcgctcagcccgggatcccgcgggggccatggcggctgaagcgccaccgtcggcgtcggcgtcggcgtcctcctcctcggctccgcggccgcctaccgcggccgcctccgcccccggcggcggcggcggcggggcgcccgcgtccgcggagtcgtacctcgggagcctcatcagcctgacatcgaagagcgagatcaggtacgagggcgtcctctacgacatcaacaccgaggagtccagcatcggcctgcgcaatgtgcggtcctttggaaccgaaggtcggaagaaagacggagtgcagattcctgctagcgacaaagtttacgagtatatcctcttccggggaactgatatcaaggatttgcaagttaagtcatcaccaccacagccgccaccaccacaagcagcttccctgcacaatgatcctgccataatacagtcacattattctcaacctgcatcaacgtcatcaagtttgccttcagctgggggtgcagttttaccagactttagctcccaggcagttcaatatgggcttcagaggccaacctttcagagtaaccttcctctctaccaaccagggaatactccgtggggctcttcagtggcacctccagcaggaaatgctccatggggctcttcagtggcgcctccagcaggaaatgcttcaacactttcagttccctcaatgtactggcaagggtactatgcaccttcaagtgggctgccgcatcatttgcagccacctcctttgcttcatccaacaccaggattgtcggttccccagaatctccaatatccaggactaaatccttctttgcaatctgggccgcaaaagctgtcagaactccaaccctcattgatgccacctattactagtcaaggtccttcatcaggtatcctgcctgctacaacagctcctgcttctgctacattattagctccagaaagctcaaagcctctgttgccgaacatgggatcgttgtttgctccacgtgcaacatctcttggtgcaacttttcctttaccaagccagccaactgccgtcgctgaaactagtgcaacagtgtcacagaacttaacttcatttggtagcagcaaggttcctgctcttccaggctcaacactggcataccaaaccgtatctcagtctgtttcttctactattgccccatctagctcagcccaagcggagatgcctgtgcctttgctggcaccatcaggtcaactattgcagaacacatcatccatcctttcatcatcgcattccatgcaggcaccattacagctggctagcaaagaagtcaagccaattgagcctaaggctaaggttgcagaaccgttactacctgaccctttgctaccagatccaccatcacgggctatgcctgaaattaaggagcctatattaccattgccgaaacagacgcctcagaagtacaatggatctggttcacgcaaccaccacaactttaggggccgtggaaggggtagagggagtgcgtctgtaacagcattcactgaagaatttgatttcacggccatgaatgagaagtttaacaaagatgaagtatggggccatcttggtaagaaatcccagtcaagggacaaggatggtgaggtgggagatgatgtgtttgatgaagaactggaggctgaggaaactgacaacccagagctagctgttaagcctgtttatgtcaaggacgacttctttgattccctctctagtggaacgtttggacgtggagggccaaatggaaggggaagaccttctgaacggcgcagagtagacacagagacgtttggcgaatttccgaggcacaggcagccctaccgtggtggcggccgaggctaccgtggcggtgggcgttcccgtggttcatattacggtggcagaggctatggaaacacggggaggggtggccctgggaattcttatcctcactggggcaatgggagagattgattatagcagcagcagccatacttgcgggtgttgtagtcttttgccacatgcatgaagcgcatccattactattaaacaaataaatggaaccttaccaccatgtcactcgtcggtgtgccttgtccagacaaggcctgtagcgtttggtcattgatgtggtgcacccctgccctgtaggagagttaccagtagatgagcagatgagatgatgcttgataggtataagcttgtggcccttgatgtgcataccttgcacttgagatttagttgtataggccggtctcaatgcaggcatgcaacgtcggctctagctcagtaaccttttcctttcacaaagtttagccgtgttgtctgttttgtattggtgatagtgtaactttgaaaaatttactgcttattgtacgttgtttgggttgaggatgagtgggatggaatggctctattctagtcttttaggatgggattcgagtctggtgtttggttggaggggaggacttgtcccagtttctgtatttgaatggagggacgatgagaaggaatttatgttgtttgtgactggtt

SEQ ID NO: 71807 - DNA, 2529 bp, Zea Mays
ccctagctcgctggctggatcggcgccgtcgccggctcgtccccacttcgtttccccttctcctcgtcggctccccgtcctgtcgtctcccatctagagcggcggctcggctcccgcgccgcatccccctcgccggcgcccctgccccctcccagtccgcgggatcggctcggtccccgcgcttcccgatcattctcctcagaagcggactccaccaggcatggggaactcgactctcaccgacatgacgctgctgccgggcgtcgagccgatcgtggctggcctggccgccggcccctcctccccgggccaggagggcaaggcaaagaagaagcccatgaagtccctctacctcaggttcttcgaaaccgcgctcgacggcaagtcccgcatctgcaggctttgcaggaagagctactgcatgaccaccgccacggggaatttgggaaagcatcttaataaccgccaccctggttatcaccaacttcctgagggcgtcagcttcactaaccagagtaccatagaggctaccatgcttaatagaagcaggaaacctcatgttcctgtgcgagctcgggcccaagctcagcctcaagttcaatctcaatctcaagttcaagatcaagctcaacctaaactacggtctcaacctaaaacgaaagcaactgttgatattgaccatgtcaactggttacttcttaggtggcttatcagtgcctcccttccaccttctactctcgaagataatatgcttattgatagctgcaagtacctgagctcgtctgtcaggctctggccaaaagaaaaggttcaagaagttatcattgaagtcttcagaagtatgaaggaggacgtcaaggaaactctgcaatgtatcacttcccggctctctgttactctggacttttggacttcgtacgagaaaatagtatacatgtccgtcaaatgccattggattgatgaaaactgggtctcacagaatgttctacttgatgtgtgtagaatcccatacccatccactggttctgaggtttttcaagttctaatggatgtcttggtgatgtataacatcgattcaagaatccttgcttgcacacacaataacagccaacactcaatacatgcttgtcatgagctcgcacggcagcttaagacccgtaacctcccattctgttacattccttgtgctgctagaacactgaagaccatcattgaagcaggactggaaaatgtgaaaccaattttgtccaagatccgcgagtttattcttcacatccattcaaaccaggagatgatggaggattttaagcactggactgaagtttatcaagaaggttcatggaaactcccctttgaccattcagcaaattggaacagtgattataatatgcttgatgtggtaaagaaggctcctaacgcaatagagaacaccatcaagaaggttgaagagatcttcgtaccaagggattgggttctgactactgcagagaagtcagtgatcgatgtgttgcactcataccttgaaccattcttcaaaactactacaaacctttgtaattgcaagctaccaactcttgggctcgtcttcttcttcatggaccatgtcttcgagttgatcaatctgtgtcatggcagcagccaccaagaatggctcaagaacattgccggtgacatgtccaagacaactcaaaagttcacatctgaagcttacaacatcttcaccttcacagccgcaattcttgatccaaggatcaagggagagctcatccctgaaactctgaactccacgagcaacttggacgatgtaagaaaccattttgtccgggactacagcagcaccttccaagctgttggaaatggtcatggcgctcaggacaccacagaggatgctgtatctcgcagagccccccgcaccgatttccactgatgcccttgagtggtggagggggcattcctcccgctatccacgtctctccctgatggcccgagactttttggcaattcaggggacctcattggatcctgaagaactgttcacaagtaaaggggacaacatccacaagcagcagtactgcctccctcttagtagcatgcaggctatagtatgcataaagtcatggatgcaaagtgggtaccagttcaattttcagtcgactatcatagattttgagagattggtcgaatcagctactgctcctgatgatatcgatagttctggccttcacagctaaatgcatattcagcaaatcaaggatcccagaatagttctttggtttctgttttttcttcttttttctaggtgctcatgtaaatagtccttagaacttgtgaatgcgacttctattgctgtcccctgcaaaatcccagggtcagaactgcagcgagcagcttgtccttgcataactatgacacttcagaatcatgtactcattgtggtagtgaccaatcttgtagccgcaacttatttctgcttcttgaagaggccatgccgtcataccaaaaggaaactttgcttagtcttgacatttt

SEQ ID NO: 71808 - DNA, 2600 bp, Zea Mays
ccctagctcgctggctggatcggcgccgtcgccggctcgtccccacttcgtttccccttctcctcgtcggctccccgtcctgtcgtctcccatctagagcggcggctcggctcccgcgccgcatccccctcgccggcgcccctgccccctcccagtccgcgggatcggctcggtccccgcgcttcccgatcattctcctcagaagcggactccaccaggcatggggaactcgactctcaccgacatgacgctgctgccgggcgtcgagccgatcgtggctggcctggccgccggcccctcctccccgggccaggagggcaaggcaaagaagaagcccatgaagtccctctacctcaggttcttcgaaaccgcgctcgacggcaagtcccgcatctgcaggctttgcaggaagagctactgcatgaccaccgccacggggaatttgggaaagcatcttaataaccgccaccctggttatcaccaacttcctgagggcgtcagcttcactaaccagagtaccatagaggctaccatgcttaatagaagcaggaaacctcatgttcctgtgcgagctcgggcccaagctcagcctcaagttcaatctcaatctcaagttcaagatcaagctcaacctaaactacggtctcaacctaaaacgaaagcaactgttgatattgaccatgtcaactggttacttcttaggtggcttatcagtgcctcccttccaccttctactctcgaagataatatgcttattgatagctgcaagtacctgagctcgtctgtcaggctctggccaaaagaaaaggttcaagaagttatcattgaagtcttcagaagtatgaaggaggacgtcaaggaaactctgcaatgtatcacttcccggctctctgttactctggacttttggacttcgtacgagaaaatagtatacatgtccgtcaaatgccattggattgatgaaaactgggtctcacagaatgttctacttgatgtgtgtagaatcccatacccatccactggttctgaggtttttcaagttctaatggatgtcttggtgatgtataacatcgattcaagaatccttgcttgcacacacaataacagccaacactcaatacatgcttgtcatgagctcgcacggcagcttaagacccgtaacctcccattctgttacattccttgtgctgctagaacactgaagaccatcattgaagcaggactggaaaatgtgaaaccaattttgtccaagatccgcgagtttattcttcacatccattcaaaccaggagatgatggaggattttaagcactggactgaagtttatcaagaaggttcatggaaactcccctttgaccattcagcaaattggaacagtgattataatatgcttgatgtggctcctaacgcaatagagaacaccatcaagaaggttgaagagatcttcgtaccaagggattgggttctgactactgcagagaagtcagtgatcgatgtgttgcactcataccttgaaccattcttcaaaactactacaaacctttgtaattgcaagctaccaactcttgggctcgtcttcttcttcatggaccatgtcttcgagttgatcaatctgtgtcatggcagcagccaccaagaatggctcaagaacattgccggtgacatgtccaagacaactcaaaagttcacatctgaagcttacaacatcttcaccttcacagccgcaattcttgatccaaggatcaagggagagctcatccctgaaactctgaactccacgagcaacttggacgatgtaagaaaccattttgtccgggactacagcagcaccttccaagctgttggaaatggtcatggcgctcaggacaccacagaggatgctggtgcgttcgcctttgctgaagagattattcgcaaaaggcgccgggtgagcatgaccactgctgatgatgagctctcgcagtatctcgcagagccccccgcaccgatttccactgatgcccttgagtggtggagggggcattcctcccgctatccacgtctctccctgatggcccgagactttttggcaattcaggggacctcattggatcctgaagaactgttcacaagtaaaggggacaacatccacaagcagcagtactgcctccctcttagtagcatgcaggctatagtatgcataaagtcatggatgcaaagtgggtaccagttcaattttcagtcgactatcatagattttgagagattggtcgaatcagctactgctcctgatgatatcgatagttctggccttcacagctaaatgcatattcagcaaatcaaggatcccagaatagttctttggtttctgttttttcttcttttttctaggtgctcatgtaaatagtccttagaacttgtgaatgcgacttctattgctgtcccctgcaaaatcccagggtcagaactgcagcgagcagcttgtccttgcataactatgacacttcagaatcatgtactcattgtggtagtgaccaatcttgtagccgcaacttatttctgcttcttgaagaggccatgccgtcataccaaaaggaaactttgcttagtcttgacatttt

SEQ ID NO: 71809 - DNA, 1275 bp, Zea Mays
ggcagaacccagcgctttgtcccgtcccgcctgtgcacagctagcgccctctcggaaccgtgtacgtcatcgatcgtgtcacgcgcgcgacggaagaagttaagcacgctgcagcaacgcggcagagcacatccgtagtgtgtgcatgcatcacagtcacacacacacagcagaagaagaagaaaccgaacgagggtttagctagcaaaataaacagaagcaagcaagctagctagagctaaggatcgagatcgagatcgaccgaccgacgacgatcagctagcatggcgcgcttcgtggatccgctggtggtggggcgggtgatcggcgaggtggtggacctgttcgtgccttccatctccatgaccgtcgcctatgatggccccaaggacatcagcaacggctgcctcctcaagccgtccgccaccgccgcgccgccgctcgtccgcatctccggccgccgcaacgacctctacacgctgatcatgacggaccccgatgcgcctagccccagcaacccgaccatgagggagtacctccactgtgattaacataccaggaggaacagatgctactaaaggtgaggaggtggtggagtacatgggcccgcggccgccggtgggtatccaccgctacgtgctggtgctgttcgagcagaagacgcgcgtgcacgcggaggcccccggcgaccgcgccaacttcaagacgcgcgcgttcgcggcggcgcacgagctcggcctccccactgccgtcgtctacttcaacgcgcagaaggagcccgccagccgccgccgctagctagcagctcctctctgaggcatgccagatgcatgcgtgtgcgtgcaggtgcaaccaccgcactgccggcggctacgtatgaccggtgaataaaaagttttactgcaccgtaagcatgctcgccctgttgctattggtatatgttagcagtgtggcagtctgtatgtagtagctattcgcttgcatctatgcactctatgttagtatgcgtacgtgtggttccggaacttttggagtcttatctaaatactaggtaggtgcccgtgcgttgcaacgataacaaaatgttagtgcacaatgattatatagaaacaaacaccacgtaactgagaaaaaacctttaaatttagcatgttgggactactactcgacgataatgctgatctggcctttatcaagcatgtgtgggcctagagtaaggtaggcatattccattgaaaagaatgtcgaacaaactgatcagttactcatttcatc

SEQ ID NO: 71810 - DNA, 720 bp, Zea Mays
ggcagaacccagcgctttgtcccgtcccgcctgtgcacagctagcgccctctcggaaccgtgtacgtcatcgatcgtgtcacgcgcgcgacggaagaagttaagcacgctgcagcaacgcggcagagcacatccgtagtgtgtgcatgcatcacagtcacacacacacagcagaagaagaagaaaccgaacgagggtttagctagcaaaataaacagaagcaagcaagctagctagagctaaggatcgagatcgagatcgaccgaccgacgacgatcagctagcatggcgcgcttcgtggatccgctggtggtggggcgggtgatcggcgaggtggtggacctgttcgtgccttccatctccatgaccgtcgcctatgatggccccaaggacatcagcaacggctgcctcctcaagccgtccgccaccgccgcgccgccgctcgtccgcatctccggccgccgcaacgacctctacacgctgatcatgacggaccccgatgcgcctagccccagcaacccgaccatgagggagtacctccactggatagtgattaacataccaggaggaacagatgctactaaagtggatccaaattgcaggtctactatcaagtaagaactatgacctctaaagctgcatagcatggataaagttgttcaaatgcaggaatcaaacagaaatatggagtctatacacaacccaagcagtggaggttgag

SEQ ID NO: 71811 - DNA, 1529 bp, Zea Mays
cagtcaggcagaagcaggcgcgcggtctccacacacactctgcaccgccaccgaccaaccaccgtcgtcaccttgaagctgaaggcgctggagctgagtcctcctcccttatttacacgcgcacactccacttcatcaccggatcaccagcctacagctcgtcacatctctctctctctccgcccggccggcctctctaggctcactctagccatggccacggcgcacggcagcaggctcatcttcctcttcgaggccacgctcttctcggcgctgctgctcgtcccggcacgccctgcttccgccgcagacggcagcgcgtacccggccggcgactgcccctacccgtgcctgccgccgcccgccgtcaccgccaactgcccgccgcctccgccggctgcggcgtcgtactcgtacccgccaccgccgggggcttacattccctacttccagcctgcggcgggtggcggtggtggcggcggtagtggggggtacggcggctacccggcgccgccgccgcccaaccccatcctgccgtggtacccatggtactacaagacgccgccgtcgtccgcggccgccacgtcgggcagggggagtcgcgttcttcttgggtcggccgccatggtagctgctgctgccctgctgatcatggcttagccgcagcccgcagcagtcgttctttttgcatcttcgatcttgttctctcccccaggttttttttcctcttgttaaaatttactgctcaggatttatattcagaggtatataacgagggagcattatatatattgcttgtactcctaatttatcagctacatgtttctagttccttgattaaaatgattaccactcaactttgagtagtggagcaactatgagcgtgtttgccaccttggtccagcggccaggctgcgctcgtaggctacaactcccgtgtttgtgttgcctcatctgctcaggagcctagcctgcaaaaagtggcttctctccaagaaaacaaagtcagggtccgttttctagggctcagctgctcgcggcgcagggggaggcgattttgggagcctcttagccggctctctgttgggtggcaaactagatcgtttgagcctaacttatttggtacaagtgcacaatcaaagtgagttgtaggcctgcagtagataggatatgctggtttcaacttagactgaaccaacgcggaccaagccaacgagcgtgggccaagccggtcagatacacgtcgcaaacacgaccccctatatagcactctaggatgaaagggggagagacagagagcagtatatgtgcatggcgacatggctagtgagcagtgagtacaataatactcgcctttttctcagtgcatctcctttatttccgtttttacatatgtgtgtatagtgctactactgtgctagttagttcgttctcctccctctcgtcaacttgtgtgtgtaaacaacactgcacgttatttgcaatcggcgctaattaatttgttgttaaaaatgtacgttcgatcttct

SEQ ID NO: 71812 - DNA, 247 bp, Zea Mays
atgacgtgggcttgtggaggtgaggaggccggcgaccaagtgtggaggcgcaaagccgctgcgccaaatccccgagagcagcagatccggagggagcatgggagcaggcgagtagccaacgacgagcgagcagcatactgcgcggggctggaggcagggcgagggcgcgatacggctagggttgagggcggaggcggtatggtggcgccgtcgggagaaggggagaagaggaggtagggtttgctag

SEQ ID NO: 71813 - DNA, 738 bp, Zea Mays
agcggtcatgacattcacagaatctctcctcccgagaggttaaagcaaatagaaataggtgctcattctgaaacacttgcaaccttctcctcgcccaccttcatctccaaatacatcccatgaactcgcataaatttcttctggcagtgctgctgcttttgcttcacaactatgcatcctatgctgccacatcgaaggaagatgatgacttcctcaaaacttgcccatcgcatcgatgccacaagcatggaccagagatccggttcccctttcggcttccaagccaccctccatcatgtggcgcacctgggatgcaattatcatgctctgggcatgacaccatccttgatcatccagttcttggctcctgcagagtgacagcaatatattacaggcatcgtgtcatgaatgtcatcccgccagaggactcatcatcacactgccaacttcagaagcttgttaaaagaaatcaatcaactgatgtgtacacacctgtagcacatcctttctcagtacttgtaggatgctcaagagaagcaacaaatcaagatggtattgtcggcccaagctcttgtttaagcctcattaacaatgcaagccagctctggtacctggtggatccttctacagatatgtctactcttcccatgggctgcgaggttgttgcaaagggaatcccagtaccctacacttacgacaaaaatggtccaatagatgagacattctccggaaggtcac

SEQ ID NO: 71814 - DNA, 1607 bp, Zea Mays
gacttgtctatcttcttttgtctgtcttttggtttgtatacaccttccacgtaacagctatttgagcaagaggatcacacttcaactggccctacatgattgtgatgccattgacttagagtcttttcttcttttgtgtcttctcttttttggttcgcatggatctctcttttgggtctttcacgcaactggaagctggaacacggcagaggtcccgtctgatagctgaacttctactcaccagtcactcatctatcacaagccttatccaaaattaaagtcttatagtgacttgactaggaaaataaaagccaggtcgttaggcgtgcacaaagtagtcaaaataatactaacagacgataaatataatattcgagaagggaggaataagactgaagaagaaaggcatcttcctggtaaagcaatactggcagcaggaattccttgccaccgcgtagcggtcatgacattcacagaatctctcctcccgagaggttaaagcaaatagaaataggtgctcattctgaaacacttgcaaccttctcctcgcccaccttcatctccaaatacatcccatgaactcgcataaatttcttctggcggtgctgctgcttttgcttctcaactatgcatcctatgctgccacatcgaaggaggatgacgacttcctcaaaacttgcccatcgcatcgatgccataagcatggaccagagatccggttcccctttcggcttccaagcctccctccatcctgtggcgcacctgggatgcaattatcatgttctgggcatgacaccatccttgatcatccagttcttggctcctgtagtgaatcctgtctcagtacttgtaggatgctcaagagaagcaacaaaccaagatggtattgttggcccaagctcttgccgaagcctcattaacaatgcaagccagctctggtacctggtggatccttatacagatatgtctactcttcccatgggctgcgaggttgttgcaaagggaatcccagtaccctacacttacgacaaaaatggtccaaaagatgagacattctccggaaggtcactgttcaacaaaaaggcaaatagagcaatcaattttggtgaaacatcattcaattggaacctcaacaacatcaccggctcttgtcaaaggtgtgaacaggaagggaaacattgtggattcagttcaaacaggcgacaagcattctgcctgcatcacgctgcagcagtccaaacagtcggctttaatccaaagcgaacaaatatgttcctttgatttatctgtgctcatcaatgttgtgtactacaacaagtccctgcataactcagaaaggtgttctactcttttatctcttttttttttgtgtttgtgtgtttgtggaacaaggtgttttctacttttcctatttgtggtgcataagagttattataaattcatcatgctgggtaattgataaacaactaaacctcagcaatgtgttctatatgtccttccgatgggccataattggtcaagatgcaaagacactataacctaaattgtgccaggggcgaagccagccaagtaagtcgccaggtcatccactttgctagctagagttt

SEQ ID NO: 71815 - DNA, 1253 bp, Zea Mays
gacttgtctatcttcttttgtctgtcttttggtttgtatacaccttccacgtaacagctatttgagcaagaggatcacacttcaactggccctacatgattgtgatgccattgacttagagtcttttcttcttttgtgtcttctcttttttggttcgcatggatctctcttttgggtctttcacgcaactggaagctggaacacggcagaggtcccgtctgatagctgaacttctactcaccagtcactcatctatcacaagccttatccaaaattaaagtcttatagtgacttgactaggaaaataaaagccaggtcgttaggcgtgcacaaagtagtcaaaataatactaacagacgataaatataatattcgagaagggaggaataagactgaagaagaaaggcatcttcctggtaaagcaatactggcagcaggaattccttgccaccgcgtagcggtcatgacattcacagaatctctcctcccgagaggttaaagcaaatagaaataggtgctcattctgaaacacttgcaaccttctcctcgcccaccttcatctccaaatacatcccatgaactcgcataaatttcttctggcggtgctgctgcttttgcttctcaactatgcatcctatgctgccacatcgaaggaggatgacgacttcctcaaaacttgcccatcgcatcgatgccataagcatggaccagagatccggttcccctttcggcttccaagcctccctccatcctgtggcgcacctgggatgcaattatcatgttctgggcatgacaccatccttgatcatccagttcttggctcctgtagtgaatcctgtctcagtacttgtaggatgctcaagagaagcaacaaaccaagatggtattgttggcccaagctcttgccgaagcctcattaacaatgcaagccagctctggtacctggtggatccttatacagatatgtctactcttcccatgggctgcgaggttgttgcaaagggaatcccagtaccctacacttacgacaaaaatggtccaaaagatgagacattctccggaaggtcactgttcaacaaaaaggcaaatagagcaatcaattttggtgaaacatcattcaattggaacctcaacaacatcaccggctcttgtcaaaggtgtgaacaggaagggaaacattgtggattcagttcaaacaggcgacaagcattctgcctgcatcacggtggcgcggaggtagaggcatgagggga

SEQ ID NO: 71816 - DNA, 2401 bp, Zea Mays
atggcagacgtcccgttcggcgtcctgctctccggtgggctggactcgtcgctggtggctgccgtcgccgttcgccacctcgctgagacagaggccgccaggcgcgggggcaccaagctccactccttctgcgtgggcctggaggggtcccctaacctcaaggcggccaggggtcagggtcgagcacgttctgcatccccaggacatcatcccaaatcaagggttgggtcaagcaagattgttatgactgctccccctcacgctttcgtcgtcgtcgtggaccgctcgctggcgctgacctctcccaagcgtgacacggtggtgcgggtgccgtacaaggtctccatcccgctgggcagggtcaagacagccacgccgggtgggaacaaggaccgaccggagcagaagtaccaggtgtccctgcacgaactggagaaggccatcgagcaggcgaaccttcggggctggatccaccgactctcgttcggtggcctcacgttgtgcttttgtgtggctattcgttcactggagaaggccattgaactattgaataagaggaaagttcaggggagaattcttttgtgtggctattcgttcaattacatttctgggacagcttcaataaagaaaaatatttacccaggaacaaaatttgaccctgtaccagtcagcatccctggaattctcatcacagatgtcagcaaaacggaggatcttatagactactacaattcttccaccataagagattgggctggaagggctacagccttcaaagcaacagcagattttagctttcaagacgctgatgtccttaaacttaaactagacatacttgctcctagcaatctcatatgggctgcatgggcgcctaatggaacggatgaatcaaactatgctgtgaactgccagaatttcttggtggcaaatgcaattgtattgaaggttgccaaagatctgacaaagagagtcctcaatgacgaggcaaactacgacagacaaattgtgaccatatccagcattgatggaaaaataatacgttatgctaggccagatcacccaactagaaaagggagtgatgcatctaccgagtctggatctgaagtggaagatgtaacatctcctactgcatcaaggaacctgattacacatcctattttgacccctgttcacgaggagttgggactcatgactcatccattgatgtgttgcactaaaaaagatggggatggcgttcaccggcccagagattaagatgacacaagcttggcacaaatgatgggtcgtgaaccaggagataatttccaagacttgataaaggagtatggcgtgtactgaagggtccattcaactacacgactcgtgatgaagctggtataccctgagaatggtaacttctgaccagcatggcataagtctgtaagcattcacatctttatgaggttaatttttatattatatcatgtacgacaagaagttcaaacaagaagcagcacaaaaactttcagatgtgagagactgtcatagttttttatgataatgttttgctatggagctaaactggcaatatgttcttgacgggtccatgatagattagcttgtattgttgagatggagaaaaagaatgcaagtttgggtaggcgctctactaattatttaccatatttaaaccagtcttcttaaccctgaaaactataaaatatctcattagccatacttgccattcatataatcatatccttttcagttacatgtgttaaatttgagggactatttgtacttccatataagtatatttgttatctatttgtctgcccacccagatgttcttagtttggattgcatgttgctgttggcaactttggaagctgagctcatgtgacttgtgcgaaatcgctagaaaatatgtctaccaatccagtttctctcataggctcaaggtatgggtcgtttggtgtgggtcatggatgaattctctatctctatgtgtgtgtgtgtgtcttttttgttttgctgagcatctaacactggtcgttttactggattgggagaaactactatagaaggggtctggagagcaataacatccactagacaaatgttccccacatcaggttgaattttgacacactgtatatacctacctccatatttaaatggtgtatctctatgtgatgttcttgttgtatctgtttatgatccatcttatacttattctggactacagatctggaaagaacaaatggagctgatacattttggaaatgttaaagtagtcgaagaagaaattgacaggtgaagtgtaggggaattgtcatggtgtggcagtagaggtctagaagtggcggtaagagagattgatactaatgatttgtttattgtagactacttgcattagctt

SEQ ID NO: 71817 - DNA, 1260 bp, Zea Mays
accaggtcccacgtgcccctacctcccgcacgcgctctccccaaaccctaggtcgcgcgctcccagccgccgccgcactcacgtagccccgcgccctcgcgtctccccagcccacgcgcagggacgcccacactcgcccgcgcagcagctcgcggtggcggtggccagccaactcacggcagcgcgacggcgtggtcgcacagcctcatgcggcattctgtctagccaccagcgagcctgtccatcgcagccgccccgccatggccccggcgcggtccctggccgacgagctcggctgctggccgcctgttgcatccgcccgccatggccgcgcgccacagccgcctgccagccatgccttgcccgcttcccctggcccgctcgtcgaggtccagccgtgtgatggctggtgagccccgtcgggtcccgtgctccctccgccgcgccgctcggtgcacccagccggcacatctcctctggcgagcgcccacagttgaagctgccacagtcgtcccatccgcgcgttgaagagtcgacgtttgcgttctccactacccgagggagccccactgaagcttcgtccgtagctcgtccatgtcgcgccgttgcatgccagccctgacctcaaccaccggcggtgctacatctgctccgacgaggccacccatcgtgagcagttgagcaccatcgcatggctccgtccgtccctgcatgcgtccagttgagattattggggaagaaaccgcccgtggcccccacctgcatgccgatatcaaccttcccacgatgtcctggtggctgcatcttgcatactgcgatccatttccgagcttcgaggaatcgacggtcaagcttcggcgaccaagtgatccagttcttcgagttccacgagattgaagaccctgagcatctgtttggtgaaggcaagtgtcctctgacctattatgtcccatttactttataattcatcaaccgcataccatgatcaacttaaggattgactagctttgtatttacctcacccttgattaccttttgggctactatggttagcttcatgctattgctttactttaatcaatgaacatgatgagatacaatgatgatactatgattttattctggacatgatgatatacttgtggcatttaggggactcgggttgtttcccgagtacctctccgtaaggacctgttcgttgagagaccacccgggataacagtgcaaccatgagggtgaaatgggatgcccttagctaat

SEQ ID NO: 71818 - DNA, 1205 bp, Zea Mays
ccaggtcccacgtgcccctacctcccgcacgcgctctccccaaaccctaggtcgcgcgctcccagccgccgccgcactcacgtagccccgcgccctcgcgtctccccagcccacgcgcagggacgcccacactcgcccgcgcagcagctcgcggtggcggtggccagccaactcacggcagcgcgacggcgtggtcgcacagcctcatgcggcattctgtctagccaccagcgagcctgtccatcgcagccgccccgccatggccccggcgcggtccctggccgacgagctcggctgctggccgcctgttgcatccgcccgccatggccgcgcgccacagccgcctgccagccatgccttgcccgcttcccctggcccgctcgtcgaggtccagccgtgtgatggctggtgagccccgtcgggtcccgtgctccctccgccgcgccgctcggtgcacccagccggcacatctcctctggcgagcgcccacagttgaagctgccacagtcgtcccatccgcgcgttgaagagtcgacgtttgcgttctccactacccgagggagccccactgaagcttcgtccgtagctcgtccatgtcgcgccgttgcatgccagccctgacctcaaccaccggcggtgctacatctgctccgacgaggccacccatcgtgagcagttgagcaccatcgcatggctccgtccgtccctgcatgcgtccagttgagattattggggaagaaaccgcccgtggcccccacctgcatgccgatatcaaccttcccacgatgtcctggtggctgcatcttgcatgtgagtatgcatttatgtacgttgcatccctgcgcaactttagtttttttccacgcatgcgggcatgcaacgagtgtgtccagatcggatccagagatcctcagcgatggcaatctttggacccctctttgtggcttcgatccgaccaatcacgccacgcaacgccacattaaatccgagaatcgttaattacgtgttaacttttgcgtagccattagatttattttgttcctatgcgttagcttcgtaggagtgtcgtgcccacagtaaaagtattttttgttatgacacatgctttgtgtatttaagtgattaattatttacccgatcggttattaaaatagagataaacaaatctgtaattttaatttatgctttataaatatacgttaatg

SEQ ID NO: 71819 - DNA, 1034 bp, Zea Mays
caggtcccacgtgcccctacctcccgcacgcgctctccccaaaccctaggtcgcgcgctcccagccgccgccgcactcacgtagccccgcgccctcgcgtctccccagcccacgcgcagggacgcccacactcgcccgcgcagcagctcgcggtggcggtggccagccaactcacggcagcgcgacggcgtggtcgcacagcctcatgcggcattctgtctagccaccagcgagcctgtccatcgcagccgccccgccatggccccggcgcggtccctggccgacgagctcggctgctggccgcctgttgcatccgcccgccatggccgcgcgccacagccgcctgccagccatgccttgcccgcttcccctggcccgctcgtcgaggtccagccgtgtgatggctggtgagccccgtcgggtcccgtgctccctccgccgcgccgctcggtgcacccagccggcacatctcctctggcgagcgcccacagttgaagctgccacagtcgtcccatccgcgcgttgaagagtcgacgtttgcgttctccactacccgagggagccccactgaagcttcgtccgtagactgcgatccatttccgagcttcgaggaatcgacggtcaagcttcggcgaccaagtgatccagttcttcgagttccacgagattgaagaccctgagcatctgtttggtgaaggcaagtgtcctctgacctattatgtcccatttactttataattcatcaaccgcataccatgatcaacttaaggattgactagctttgtatttacctcacccttgattaccttttgggctactatggttagcttcatgctattgctttactttaatcaatgaacatgatgagatacaatgatgatactatgattttattctggacatgatgatatacttgtggcatttaggggactcgggttgtttcccgagtacctctccgtaaggacctgttcgttgagagaccacccgggataacagtgcaaccatgagggtgaaatgggatgcccttagctaat

SEQ ID NO: 71820 - DNA, 1679 bp, Zea Mays
atggcatctaggatctgctattttagtataggtatcaagagctacctctatggttcacatgtcatcctcattgcagctacaacatcagtagccacattcgttgttctggtagtcactgcactctatctttcactgaagaaaagatataatgaagcaatacatctcaaagtagaaatgtttctcaaaacatatggcacatcaaaacccacaaggtacactttctccgaagttaagaagatagcaaggcggttcaaggaaaaagtaggccaaggtggattcggaactgtttacaaagggcagctaccaaatggtgttccagtggcggtcaaaatgctagagaactctacaggagagggagaagacttcatcaatgaagtagcaaccattggacaaatacatcatgcaaatatcgtccgcctcctaggcattgctagaggaatggagtacctacatcaaggatgtaaccagcgcatcctccactttgacatcaagcctcacaacattctgctggactacagcttcaacccaaaaatttcagattttggtcttgctaagttgtgtgccagggaccaaagcattgttaccttgaccgcagcaagaggcacaatggggtacatcgcaccagagatatattctccaaatttcggtggggtatcatacaagtcagatgtttacagtttcggcatgctggtgttagagatggtgagtggaaggaggaattcagacccaggtatcgagaaccaaaatggggtgtatctaccagagtgggtctatgagagagtagtcactgggcaggacctcacacttagtaagaaaatagctgatcaggagaaagaaacagtgaggcagctggccattgttgcactctggtgcattcagtggaaccccaaaaacaggccatcaatgacaaaagtggttaacatgttgacaggaaggttacagaatttaccaataccacctaagccatatgcctagcctgaaagacatcctatgccataaaacatggaggatatacaccatgctttaggaagcatgaaaagcagttatgcttactttcatgtgcgagcttagtaatgcttagcaatagattacacagtatttggatcattccactgtatcagacacatgaactgtgactcttttaattttcgatgtgtggtaacttaattagagacgtatcacattggatttgatttccagtgttgttcaattattgtgattttccggaaaatatatctgttcggttggctttaatccgtaccggtttctactgtttctttttttctcgaaagcgtaggagaactacgccccattatatattaagcagaaaaaggggtggccaaaaaagaccaatacaaacggcctccttacggaggccagtaggaagcatacataaatgaatccatcagaccttcttaattctcagctaagggtgctgctaaatggcaaagccccttggcaccagcaatctcccattgtgccctttcctcatccgcagctctaagactcatggtaacactagggctgcagccatcaaagacgcatttgtttctatgcttccacaaggtccaggctcccagaatgataagggaatcaagtctttttttgtgagtccattaacaatattccccaccgattcccaccagcctagatatgagctaacatctggttgaggagcc

SEQ ID NO: 71821 - DNA, 1544 bp, Zea Mays
aaatgtgttcctttgatttatctgtgctcatcaatgttgtgtactactacaagtccatgcataactcagaaagatagaataaatctcacataaacttaaggatgataagggtcaaaatgagatatgttgttctgaaactgaagcaataaagggtacatagcttccaactctatggattcttgttagcaatggaagagtttgatttgactttaactatttcagtggttctcggtcaaacgccagcaggcacaggcctgtcccccaccgccgttggatccgagatcccaccctcgtccttcctctccttctccgatccgctcatgaactgcctcagccgaggcacataatgcaaaggggctttctataagaccaatattatttggtatatgaattcaggcaaatcacaacggtgcatctatgtttcgtttctccaaacgatgacttactatgtctagaggctacgattgtgcatgacagatgtgtcgaccttgtggacaagcaacgtggatgagaggtatgcacaagcagcaatgacatgggtatgcagagagccatggaggcaacggccacacgaggtgtgttgtgtgctacaactgcatcaatttgcttcctacttgtgtaacttggtgaaaattgtaattccacgatctaaccccaacgatcggtgttggaaagaaatattgcggaggacgcgatcaatattacataaactgaaggaacaaatcagtgacggtactccagttattcgagctggtgctggaacaggcatatctgcaaagttcgaagaagctggtggtggggttgatcttatagtgctgtagctgtacaactctggacggtttcaaatggctggaaggggctcactagctgggctcttgccctttggtgatgcaaatgacattgtacttcagatggccaacgaagtgttgcctgtggttaaaggagttcctgttcttgctggggtatgcgctacagatccatttcgtcgaatggaatactttctgagacaactagaaaccattggaatttgcggtgtgcaaaacttcccaaccgtaggtctgtttgatgggaattttagacagaatttggaggaaactggaatgagcatggaagtggagatgatttcaatggctcatcgcatgggtttccttactactccatatgctttcaatccggatgaagttgctgccatggccaaggcaggatctcatatcgtagttgcacatatgggtctgacaactgcagggtctttcggggcaatgacagctaccactttagatgatagtgttttacgtgttcaggccattgcggatgcggcatttggggttaatcctgatatcattgttttatgtcacgaaggtaacttggtgaaaattgtaattccacgatctaaccccaacgatgctcatgttgccggtgttggaaagttcctcatgtttcctagagagttgcaactctcaggggagtcagtcaagctaatgaagcttggggaagcagttgcaaagggaactattaataacgagacacttggttacttcacctga

SEQ ID NO: 71822 - DNA, 3723 bp, Zea Mays
gataggtgctcattctgaagcacttgcaaccttctcctcgcccaccttcatctccgaacacatcccccatgaactcgcataaatttcttctggcagtgctgctgcttttgcttctcaactatgcatcctatgctgccacatcgaaggaagatgatgacttccgcaaatcttgcccatcgcatcgatgccacaagcatggaccagagatccggttcccctttcggcttccaagccaccctccatcctgtggcacacctgggatgcaattatcatgctctgggcatgacaccatccttgatcatccagttcttggctcctgcagagtgacagcaatatattacaggcatcgtgtcatgaatgtcatcccgccagaggactcatcatcacactgccaacttcagaagcttgttaaaagaaatcaatcaactgatgtgtacacacctgtagtgaatcctgtctcagtacttgtaggatgctcaagagaagcaacaaaccaagatgatattgcaggcccaagctcttgccgaagcctcattaacaatgcaagccagctctggtacctggtggatccttatacagatatgtctactcttcccatgggctgcgaggttgttgcaaagggaatcccagtaccctacacttacgacaaaaatggtccaaaagttgagacattctccggaaggtcactgttcaacgaaaaggcaaatagagcaatcaattttggtgaaacatcattcaattggaacctcaacaacatcactggctcttgtcaaacttgtgaacaggaagggaaacattgtggattcagttcaaacaggcgacaagcattctgcctgcatcacggttcacatgtcatcctcattgcagctacaacatcagtagccacattcgttgttctggtagtcactgcactctatctttcactgaagaaaagatataatgaagcaatacatctcaaagtagaaatgtttctcaaaacatatggcacatcaaaacccacaaggtacactttctccgaagttaagaagatagcaaggcggttcaaggaaaaagtaggccaaggtggattcggaactgtttacaaagggcagctaccaaatggtgttccagtggcggtcaaaatgctagagaactctacaggagagggagaagacttcatcaatgaagtagcaaccattggacaaatacatcatgcaaatatcgtccgcctcctaggattttgctctgaaggaacaagacgtgcgcttatttatgaattcatgcctaacgagtcattggggagatatatattcttgccgcaagagctcctagtaccagaaaaaatgctagatatcgctacaggcattgctagaggaatggagtacctacatcaaggatgtaaccagcgcatcctccactttgacatcaagcctcacaacattctgctggactacagcttcaatccaaaaatttcagattttggtcttgctaagctgtgtgccagggaccaaagcattgttaccttgaccgcagcaagaggcacaatggggtacatcgcaccagagatatattctccaaattttggtggggtatcatacaagtcagatgtttacagtttcggcatgctggtgttagagatggtgagtggaaggaggaattcagacccaggtattgagaaccaaaatggggtgtatctaccagagtgggtctatgagagagtagtcactgggcaggacctcacacttagtaagaaaatagctgatcaggagaaagaaacagtgaggcagctggccattgttgcactctggtgcattcagtggaaccccaaaaacaggccatcaatgacaaaagtggttaacatgttgacaggaaggttacagaatttaccaataccacctaagccatatgcctagcctgaaagacatcctatgccataaaacatggaggatatacaccatgttttaggaagcatgacaagcagttatgcttactttcatgtgtgagcttagtaatgcttagcaatagattacacagtatttggatcattccactgtatcagacacatgaactgtgactcttttaattttcgatgtgtggtaacttaattagagacgtatcacattggatttgatttccagtgttgttcaattattgtgattttccggaaaatatacctgttcggttggctttaatccgtaccggtttctactgtttctttttttctcgaaagcgcagtagaactgtgctccattatatattaagcagaaaaaggggtggccaaaaaagaccaatacaaacggcctccttacggaggccagtaggaagcatacataaatgaatccatcagaccttcttaattctcagctaagggtgctgctaaatggcaaagccccttggcaccagcaatctcccattgtgccctttcctcatctgtagctctaagactcatggtaacactagggctgcagccatcaaagacgcatttgtttctatgcttccacaaggtccaggctcccagaatgataagggaatcaagtcctttttttgtgagtccattagcaatattccccaccgattcctaccagcctagatatgagctaacatctggttgaggagccaaagaatgcagaccagatttccttaacaacagataccagaattccctggagaaagaataggtaacaaggagatgatcgatagtttcatcctcttgatcacaaagagggcacttctcaggatgaatcagccctcttttaccaagcctatctgctgtcaagactctattttgtgcaaccagccagatgaagaagcgacattttggcaaggcccaagttttccaaattttcttgtgatgagggaaaaccacaaaccccaaaaagaaaccttcgtaagcagtctttgctgaatagatgccagtaggaacaatactgaaaacatgttatcgtcaacctcaggctgcagctgccaagctgaagtcatattccacaactggagataatctgttaagacttccactgtcagcggacccttaatatcatagatccattttctatctgtaattgcctcataaacagtcatgttattgacaatcctcttgggtataacattatacaaacttggagcaaggtctttaattctcttaccatttaaccacttatccttccaaaactttgtatttctactgtttctacaatgtttttgtctctatgaattgcagctgcagcagtccaaacagtcggctttaatccaaagcgaacaaatatgttcctttgatttatctgtgctcatcaatgttgtgtactacaacaagtccctgcataactcagaaaggtgttctactcttttatctcatttttttgtgtttgtgtgtgtgtggaacaaggtgttctacttttcctatttgtggtgcataagagttattataaattcatcatgctgggtaattgataaacaactaaacctcagcaatgtgttctatatgtccttccgatgggccataattggtcaagatgcaaagacactataacctaaattgtgccagggacgaagccagccaagtaagtcgccaggtcatccactttgctagctagagtttgcactgcagtaatacagtgcgtacagtgattttcaacttcaaaccatcagggtcagacctagctctgcacttgaactatgcatagtttcttattccccacacagccacaccccaagtaacaatgtcaccccgcatatatcccaggtttg

SEQ ID NO: 71823 - DNA, 2318 bp, Zea Mays
ctcactatatatcccccgcaccctcgtggtctcccctctctctccatctcctgtctctttctctttctacaaagtcgcttgcgaacagccggtgctgcctgctgccgctgtgttggagagaaagaaagcgagcgagcgaggagggaggagggagagggaccgcaaatccctcggtcgctttcgacggcctggatctcccgcacgcgggatcgtacgaccggcacgctgctgtcgctttccaccgcatagtaaattgccaaggctgttgtaatgggggcaaatggtcatcatgaacctcgcagaggatgtaatggcaccgtctgcaatggtagtataagaccactcgattactttggtgatgtagatccatggacggcttgggcatacaagcctcgaacgatctcgctcttgctgacgggaacatgccttttaatttgggcaagtggtgctctcgatccagaaaggagctcatctgctgatcgtgtttggtcagtcaagaggggtgtatttgcgatgattgctgtttttttggcttactcttttcttcaggcaccttcaactggactcattagaccacatcctgccatttggaggcttgttcatgggatgacagttgtttaccttgtcgccctcactttcttgctttttcagggctgttttcaccccctcctgcttaagatcgaaaccaggccaggagttatgcaatactgtgtttccaccatgtgaagccaatctcagtcccaaattttccgttcatatctttaatcttgtgttatcttgtattattacttaatgtctcatcctcataaagtagaacagtattgcagcaagtcagagttcagtcgcaagattttaaagagtagagcaggaaaacttagtatggcatttcatattttcattaactttgttttgcagactcgtgatgatgctaggcaattcatgaagtatcttcatcctgatcttggtgtcgaattgcctgaaagatcttatggaactgattgtcgcatatatgtccctgatcatccaaaaagcaggtttaacaatgtttatgagatcatttttgatgaatttgttatagctcatatccttggatggtggggtaaggctataatgatacgaaaccaaccacttttgtgggtcttgtcaattggttttgagttaatggagctcacttttcgtcatatgttgccaaatttcaatgagtgctggtgggatagcattgtcctagacatattgatatgcaattggtttggtatttgggctggaatgaaaaccgtgcagtacttcgatgggaggacatacgaatgggttggtttgagccgccaacccaacattatcagtaaggtaaaaaggatgctgggacagttcacaccagcacagtgggacaaggacgagtggcaacctacgctgggtccttggagattcatccaggtgctgagcctttgtgttgttttcatggctgtcgaactgaacacgttcttcctcaagttctgcctgtggattcctccgcggaaccctttggtcgtgtatcggttggtcctttggtggttaatcgcgataccgaccatccgggagtacaatacctacttgcaagacagcaaaccatttaaaaaggtgggatccttctgctggctttccctggctatatgcattgtagagctcctgatctgcatcaagtttgggcatggtctgtttccgaggtcaatgccttcgtggttggttacgttctggtcagcagtcgccttgcttcttgcgctctttgtgtggacatggaaataccgaacagtgaaaaggaaaagggtataattgttacaaaggaatgtttattttgcctccattctttacccaattcggtgttaccgtgtacataaaaaatctattcaaattgtgtacatgtagcagtagtagtcagttttggtgatctgaagaggattatccatggtaatttttttttgccttgtttgtcttcctattttccgtcagcaaagtattttgaccggctcttagatgtggattttaattttttcagttctcaatcccaaaccgttgaaaaatgtttctggatggcccaggcaaccatatgtgcaggttacaccacactgacactgccttgggcacgggaatttgcattgtgatgtgtgaagataggggtagccgggtaggcctgtcttgctggtgaatgtactcttgtcaggctgggacactctagtctaggttggtactccatagtcttcccggcttccagcaggcctgtgcaaatattttggccccatttgtttacttgagtcacatttgttacttgagtcacatgactaaag

SEQ ID NO: 71824 - DNA, 2161 bp, Zea Mays
ctcactatatatcccccgcaccctcgtggtctcccctctctctccatctcctgtctctttctctttctacaaagtcgcttgcgaacagccggtgctgcctgctgccgctgtgttggagagaaagaaagcgagcgagcgaggagggaggagggagagggaccgcaaatccctcggtcgctttcgacggcctggatctcccgcacgcgggatcgtacgaccggcacgctgctgtcgctttccaccgcatagtaaattgccaaggctgttgtaatgggggcaaatggtcatcatgaacctcgcagaggatgtaatggcaccgtctgcaatggtagtataagaccactcgattactttggtgatgtagatccatggacggcttgggcatacaagcctcgaacgatctcgctcttgctgacgggaacatgccttttaatttgggcaagtggtgctctcgatccagaaaggagctcatctgctgatcgtgtttggtcagtcaagaggggtgtatttgcgatgattgctgtttttttggcttactcttttcttcaggcaccttcaactggactcattagaccacatcctgccatttggaggcttgttcatgggatgacagttgtttaccttgtcgccctcactttcttgctttttcagggctgttttcaccccctcctgcttaagatcgaaaccaggccaggagttatgcaatactgtgtttccaccatgtgaagccaatctcagtcccaaattttccgttcatatctttaatcttgtgttatcttgtattattacttaatgtctcatcctcataaagtagaacagtattgcagcaagtcagagttcagtcgcaagattttaaagagtagagcaggaaaacttagtatggcatttcatattttcattaactttgttttgcagactcgtgatgatgctaggcaattcatgaagtatcttcatcctgatcttggtgtcgaattgcctgaaagatcttatggaactgattgtcgcatatatgtccctgatcatccaaaaagcaggtttaacaatgtttatttttttctaggagatcatttttgatgaatttgttatagctcatatccttggatggtggggtaaggctataatgatacgaaaccaaccacttttgtgggtcttgtcaattggttttgagttaatggagctcacttttcgtcatatgttgccaaatttcaatgagtgctggtgggatagcattgtcctagacatattgatatgcaattggtttggtatttgggctggaatgaaaaccgtgcagtacttcgatgggaggacatacgaatgggttggtttgagccgccaacccaacattatcagtaaggtaaaaaggatgctgggacagttcacaccagcacagtgggacaaggacgagtggcaacctacgctgggtccttggagattcatccagcaaaccatttaaaaaggtgggatccttctgctggctttccctggctatatgcattgtagagctcctgatctgcatcaagtttgggcatggtctgtttccgaggtcaatgccttcgtggttggttacgttctggtcagcagtcgccttgcttcttgcgctctttgtgtggacatggaaataccgaacagtgaaaaggaaaagggtataattgttacaaaggaatgtttattttgcctccattctttacccaattcggtgttaccgtgtacataaaaaatctattcaaattgtgtacatgtagcagtagtagtcagttttggtgatctgaagaggattatccatggtaatttttttttgccttgtttgtcttcctattttccgtcagcaaagtattttgaccggctcttagatgtggattttaattttttcagttctcaatcccaaaccgttgaaaaatgtttctggatggcccaggcaaccatatgtgcaggttacaccacactgacactgccttgggcacgggaatttgcattgtgatgtgtgaagataggggtagccgggtaggcctgtcttgctggtgaatgtactcttgtcaggctgggacactctagtctaggttggtactccatagtcttcccggcttccagcaggcctgtgcaaatattttggccccatttgtttacttgagtcacatttgttacttgagtcacatgactaaag

SEQ ID NO: 71825 - DNA, 1966 bp, Zea Mays
ctcactatatatcccccgcaccctcgtggtctcccctctctctccatctcctgtctctttctctttctacaaagtcgcttgcgaacagccggtgctgcctgctgccgctgtgttggagagaaagaaagcgagcgagcgaggagggaggagggagagggaccgcaaatccctcggtcgctttcgacggcctggatctcccgcacgcgggatcgtacgaccggcacgctgctgtcgctttccaccgcatagtaaattgccaaggctgttgtaatgggggcaaatggtcatcatgaacctcgcagaggatgtaatggcaccgtctgcaatggtagtataagaccactcgattactttggtgatgtagatccatggacggcttgggcatacaagcctcgaacgatctcgctcttgctgacgggaacatgccttttaatttgggcaagtggtgctctcgatccagaaaggagctcatctgctgatcgtgtttggtcagtcaagaggggtgtatttgcgatgattgctgtttttttggcttactcttttcttcaggcaccttcaactggactcattagaccacatcctgccatttggaggcttgttcatgggatgacagttgtttaccttgtcgccctcactttcttgctttttcagactcgtgatgatgctaggcaattcatgaagtatcttcatcctgatcttggtgtcgaattgcctgaaagatcttatggaactgattgtcgcatatatgtccctgatcatccaaaaagcaggtttaacaatgtttatgagatcatttttgatgaatttgttatagctcatatccttggatggtggggtaaggctataatgatacgaaaccaaccacttttgtgggtcttgtcaattggttttgagttaatggagctcacttttcgtcatatgttgccaaatttcaatgagtgctggtgggatagcattgtcctagacatattgatatgcaattggtttggtatttgggctggaatgaaaaccgtgcagtacttcgatgggaggacatacgaatgggttggtttgagccgccaacccaacattatcagtaaggtaaaaaggatgctgggacagttcacaccagcacagtgggacaaggacgagtggcaacctacgctgggtccttggagattcatccaggtgctgagcctttgtgttgttttcatggctgtcgaactgaacacgttcttcctcaagttctgcctgtggattcctccgcggaaccctttggtcgtgtatcggttggtcctttggtggttaatcgcgataccgaccatccgggagtacaatacctacttgcaagacagcaaaccatttaaaaaggtgggatccttctgctggctttccctggctatatgcattgtagagctcctgatctgcatcaagtttgggcatggtctgtttccgaggtcaatgccttcgtggttggttacgttctggtcagcagtcgccttgcttcttgcgctctttgtgtggacatggaaataccgaacagtgaaaaggaaaagggtataattgttacaaaggaatgtttattttgcctccattctttacccaattcggtgttaccgtgtacataaaaaatctattcaaattgtgtacatgtagcagtagtagtcagttttggtgatctgaagaggattatccatgttctcaatcccaaaccgttgaaaaatgtttctggatggcccaggcaaccatatgtgcaggttacaccacactgacactgccttgggcacgggaatttgcattgtgatgtgtgaagataggggtagccgggtaggcctgtcttgctggtgaatgtactcttgtcaggctgggacactctagtctaggttggtactccatagtcttcccggcttccagcaggcctgtgcaaatattttggccccatttgtttacttgagtcacatttgttacttgagtcacatgactaaag

SEQ ID NO: 71826 - DNA, 1950 bp, Zea Mays
ctcactatatatcccccgcaccctcgtggtctcccctctctctccatctcctgtctctttctctttctacaaagtcgcttgcgaacagccggtgctgcctgctgccgctgtgttggagagaaagaaagcgagcgagcgaggagggaggagggagagggaccgcaaatccctcggtcgctttcgacggcctggatctcccgcacgcgggatcgtacgaccggcacgctgctgtcgctttccaccgcatagtaaattgccaaggctgttgtaatgggggcaaatggtcatcatgaacctcgcagaggatgtaatggcaccgtctgcaatggtagtataagaccactcgattactttggtgatgtagatccatggacggcttgggcatacaagcctcgaacgatctcgctcttgctgacgggaacatgccttttaatttgggcaagtggtgctctcgatccagaaaggagctcatctgctgatcgtgtttggtcagtcaagaggggtgtatttgcgatgattgctgtttttttggcttactcttttcttcaggcaccttcaactggactcattagaccacatcctgccatttggaggcttgttcatgggatgacagttgtttaccttgtcgccctcactttcttgctttttcagactcgtgatgatgctaggcaattcatgaagtatcttcatcctgatcttggtgtcgaattgcctgaaagatcttatggaactgattgtcgcatatatgtccctgatcatccaaaaagcaggagatcatttttgatgaatttgttatagctcatatccttggatggtggggtaaggctataatgatacgaaaccaaccacttttgtgggtcttgtcaattggttttgagttaatggagctcacttttcgtcatatgttgccaaatttcaatgagtgctggtgggatagcattgtcctagacatattgatatgcaattggtttggtatttgggctggaatgaaaaccgtgcagtacttcgatgggaggacatacgaatgggttggtttgagccgccaacccaacattatcagtaaggtaaaaaggatgctgggacagttcacaccagcacagtgggacaaggacgagtggcaacctacgctgggtccttggagattcatccaggtgctgagcctttgtgttgttttcatggctgtcgaactgaacacgttcttcctcaagttctgcctgtggattcctccgcggaaccctttggtcgtgtatcggttggtcctttggtggttaatcgcgataccgaccatccgggagtacaatacctacttgcaagacagcaaaccatttaaaaaggtgggatccttctgctggctttccctggctatatgcattgtagagctcctgatctgcatcaagtttgggcatggtctgtttccgaggtcaatgccttcgtggttggttacgttctggtcagcagtcgccttgcttcttgcgctctttgtgtggacatggaaataccgaacagtgaaaaggaaaagggtataattgttacaaaggaatgtttattttgcctccattctttacccaattcggtgttaccgtgtacataaaaaatctattcaaattgtgtacatgtagcagtagtagtcagttttggtgatctgaagaggattatccatgttctcaatcccaaaccgttgaaaaatgtttctggatggcccaggcaaccatatgtgcaggttacaccacactgacactgccttgggcacgggaatttgcattgtgatgtgtgaagataggggtagccgggtaggcctgtcttgctggtgaatgtactcttgtcaggctgggacactctagtctaggttggtactccatagtcttcccggcttccagcaggcctgtgcaaatattttggccccatttgtttacttgagtcacatttgttacttgagtcacatgactaaag

SEQ ID NO: 71827 - DNA, 1729 bp, Zea Mays
ctcactatatatcccccgcaccctcgtggtctcccctctctctccatctcctgtctctttctctttctacaaagtcgcttgcgaacagccggtgctgcctgctgccgctgtgttggagagaaagaaagcgagcgagcgaggagggaggagggagagggaccgcaaatccctcggtcgctttcgacggcctggatctcccgcacgcgggatcgtacgaccggcacgctgctgtcgctttccaccgcatagtaaattgccaaggctgttgtaatgggggcaaatggtcatcatgaacctcgcagaggatgtaatggcaccgtctgcaatgttgggcaagtggtgctctcgatccagaaaggagctcatctgctgatcgtgtttggtcagtcaagaggggtgtatttgcgatgattgctgtttttttggcttactcttttcttcaggcaccttcaactggactcattagaccacatcctgccatttggaggcttgttcatgggatgacagttgtttaccttgtcgccctcactttcttgctttttcagactcgtgatgatgctaggcaattcatgaagtatcttcatcctgatcttggtgtcgaattgcctgaaagatcttatggaactgattgtcgcatatatgtccctgatcatccaaaaagcaggtttaacaatgtttatttttttctaggagatcatttttgatgaatttgttatagctcatatccttggatggtggggtaaggctataatgatacgaaaccaaccacttttgtgggtcttgtcaattggttttgagttaatggagctcacttttcgtcatatgttgccaaatttcaatgagtgctggtgggatagcattgtcctagacatattgatatgcaattggtttggtatttgggctggaatgaaaaccgtgcagtacttcgatgggaggacatacgaatgggttggtttgagccgccaacccaacattatcagtaaggtaaaaaggatgctgggacagttcacaccagcacagtgggacaaggacgagtggcaacctacgctgggtccttggagattcatccaggtgctgagcctttgtgttgttttcatggctgtcgaactgaacacgttcttcctcaagttctgcctgtggattcctccgcggaaccctttggtcgtgtatcggttggtcctttggtggttaatcgcgataccgaccatccgggagtacaatacctacttgcaagacagcaaaccatttaaaaaggtgggatccttctgctggctttccctggctatatgcattgtagagctcctgatctgcatcaagtttgggcatggtctgtttccgaggtcaatgccttcgtggttggttacgttctggtcagcagtcgccttgcttcttgcgctctttgtgtggacatggaaataccgaacagtgaaaaggaaaaggttctcaatcccaaaccgttgaaaaatgtttctggatggcccaggcaaccatatgtgcaggttacaccacactgacactgccttgggcacgggaatttgcattgtgatgtgtgaagataggggtagccgggtaggcctgtcttgctggtgaatgtactcttgtcaggctgggacactctagtctaggttggtactccatagtcttcccggcttccagcaggcctgtgcaaatattttggccccatttgtttacttgagtcacatttgttacttgagtcacatgactaaag

SEQ ID NO: 71828 - DNA, 2064 bp, Zea Mays
ctcactatatatcccccgcaccctcgtggtctcccctctctctccatctcctgtctctttctctttctacaaagtcgcttgcgaacagccggtgctgcctgctgccgctgtgttggagagaaagaaagcgagcgagcgaggagggaggagggagagggaccgcaaatccctcggtcgctttcgacggcctggatctcccgcacgcgggatcgtacgaccggcacgctgctgtcgctttccaccgcatagtaaattgccaaggctgttgtaatgggggcaaatggtcatcatgaacctcgcagaggatgtaatggcaccgtctgcaatggtagtataagaccactcgattactttggtgatgtagatccatggacggcttgggcatacaagcctcgaacgatctcgctcttgctgacgggaacatgccttttaatttgggcaagtggtgctctcgatccagaaaggagctcatctgctgatcgtgtttggtcagtcaagaggggtgtatttgcgatgattgctgtttttttggcttactcttttcttcaggcaccttcaactggactcattagaccacatcctgccatttggaggcttgttcatgggatgacagttgtttaccttgtcgccctcactttcttgctttttcagactcgtgatgatgctaggcaattcatgaagtatcttcatcctgatcttggtgtcgaattgcctgaaagatcttatggaactgattgtcgcatatatgtccctgatcatccaaaaagcaggtttaacaatgtttatttttttctaggagatcatttttgatgaatttgttatagctcatatccttggatggtggggtaaggctataatgatacgaaaccaaccacttttgtgggtcttgtcaattggttttgagttaatggagctcacttttcgtcatatgttgccaaatttcaatgagtgctggtgggatagcattgtcctagacatattgatatgcaattggtttggtatttgggctggaatgaaaaccgtgcagtacttcgatgggaggacatacgaatgggttggtttgagccgccaacccaacattatcagtaaggtaaaaaggatgctgggacagttcacaccagcacagtgggacaaggacgagtggcaacctacgctgggtccttggagattcatccaggtgctgagcctttgtgttgttttcatggctgtcgaactgaacacgttcttcctcaagttctgcctgtggattcctccgcggaaccctttggtcgtgtatcggttggtcctttggtggttaatcgcgataccgaccatccgggagtacaatacctacttgcaagacagcaaaccatttaaaaaggtgggatccttctgctggctttccctggctatatgcattgtagagctcctgatctgcatcaagtttgggcatggtctgtttccgaggtcaatgccttcgtggttggttacgttctggtcagcagtcgccttgcttcttgcgctctttgtgtggacatggaaataccgaacagtgaaaaggaaaagggtataattgttacaaaggaatgtttattttgcctccattctttacccaattcggtgttaccgtgtacataaaaaatctattcaaattgtgtacatgtagcagtagtagtcagttttggtgatctgaagaggattatccatggtaatttttttttgccttgtttgtcttcctattttccgtcagcaaagtattttgaccggctcttagatgtggattttaattttttcagttctcaatcccaaaccgttgaaaaatgtttctggatggcccaggcaaccatatgtgcaggttacaccacactgacactgccttgggcacgggaatttgcattgtgatgtgtgaagataggggtagccgggtaggcctgtcttgctggtgaatgtactcttgtcaggctgggacactctagtctaggttggtactccatagtcttcccggcttccagcaggcctgtgcaaatattttggccccatttgtttacttgagtcacatttgttacttgagtcacatgactaaag

SEQ ID NO: 71829 - DNA, 2048 bp, Zea Mays
ctcactatatatcccccgcaccctcgtggtctcccctctctctccatctcctgtctctttctctttctacaaagtcgcttgcgaacagccggtgctgcctgctgccgctgtgttggagagaaagaaagcgagcgagcgaggagggaggagggagagggaccgcaaatccctcggtcgctttcgacggcctggatctcccgcacgcgggatcgtacgaccggcacgctgctgtcgctttccaccgcatagtaaattgccaaggctgttgtaatgggggcaaatggtcatcatgaacctcgcagaggatgtaatggcaccgtctgcaatggtagtataagaccactcgattactttggtgatgtagatccatggacggcttgggcatacaagcctcgaacgatctcgctcttgctgacgggaacatgccttttaatttgggcaagtggtgctctcgatccagaaaggagctcatctgctgatcgtgtttggtcagtcaagaggggtgtatttgcgatgattgctgtttttttggcttactcttttcttcaggcaccttcaactggactcattagaccacatcctgccatttggaggcttgttcatgggatgacagttgtttaccttgtcgccctcactttcttgctttttcagactcgtgatgatgctaggcaattcatgaagtatcttcatcctgatcttggtgtcgaattgcctgaaagatcttatggaactgattgtcgcatatatgtccctgatcatccaaaaagcagttttttctaggagatcatttttgatgaatttgttatagctcatatccttggatggtggggtaaggctataatgatacgaaaccaaccacttttgtgggtcttgtcaattggttttgagttaatggagctcacttttcgtcatatgttgccaaatttcaatgagtgctggtgggatagcattgtcctagacatattgatatgcaattggtttggtatttgggctggaatgaaaaccgtgcagtacttcgatgggaggacatacgaatgggttggtttgagccgccaacccaacattatcagtaaggtaaaaaggatgctgggacagttcacaccagcacagtgggacaaggacgagtggcaacctacgctgggtccttggagattcatccaggtgctgagcctttgtgttgttttcatggctgtcgaactgaacacgttcttcctcaagttctgcctgtggattcctccgcggaaccctttggtcgtgtatcggttggtcctttggtggttaatcgcgataccgaccatccgggagtacaatacctacttgcaagacagcaaaccatttaaaaaggtgggatccttctgctggctttccctggctatatgcattgtagagctcctgatctgcatcaagtttgggcatggtctgtttccgaggtcaatgccttcgtggttggttacgttctggtcagcagtcgccttgcttcttgcgctctttgtgtggacatggaaataccgaacagtgaaaaggaaaagggtataattgttacaaaggaatgtttattttgcctccattctttacccaattcggtgttaccgtgtacataaaaaatctattcaaattgtgtacatgtagcagtagtagtcagttttggtgatctgaagaggattatccatggtaatttttttttgccttgtttgtcttcctattttccgtcagcaaagtattttgaccggctcttagatgtggattttaattttttcagttctcaatcccaaaccgttgaaaaatgtttctggatggcccaggcaaccatatgtgcaggttacaccacactgacactgccttgggcacgggaatttgcattgtgatgtgtgaagataggggtagccgggtaggcctgtcttgctggtgaatgtactcttgtcaggctgggacactctagtctaggttggtactccatagtcttcccggcttccagcaggcctgtgcaaatattttggccccatttgtttacttgagtcacatttgttacttgagtcacatgactaaag

SEQ ID NO: 71830 - DNA, 2422 bp, Zea Mays
ctcactatatatcccccgcaccctcgtggtctcccctctctctccatctcctgtctctttctctttctacaaagtcgcttgcgaacagccggtgctgcctgctgccgctgtgttggagagaaagaaagcgagcgagcgaggagggaggagggagagggaccgcaaatccctcggtcgctttcgacggcctggatctcccgcacgcgggatcgtacgaccggcacgctgctgtcgctttccaccgcgtacgtgtttccctctccacttctcccctcctctccaccccgcctgcgcctccctttcctatgccgcgcgcgctccggtttccatcggccattgccatccccgcacaagttccgcggattagcttttcggctcggggggagatattactgccctaatcctgctttagcagcgcgccccgttcctgcggttatgcccgggctcgttctctcgtggctcgtgggacaccgtacgcagcgccacggtctctgccgctggcggccggcggctacccggctcttatggagcggcagttactgttccggtttatcgttgcggcctggattctgaattaattcgtcctggccgttggggttgggcggcggaccaccgcggttgtttctcgcgtccatgcggggacgggacgggtctcaacgggaccccgccttttccggtgcttattctgttgctgttaatcataatgcccagtgccatatagtaaattgccaaggctgttgtaatgggggcaaatggtcatcatgaacctcgcagaggatgtaatggcaccgtctgcaatggtagtataagaccactcgattactttggtgatgtagatccatggacggcttgggcatacaagcctcgaacgatctcgctcttgctgacgggaacatgccttttaatttgggcaagtggtgctctcgatccagaaaggagctcatctgctgatcgtgtttggtcagtcaagaggggtgtatttgcgatgattgctgtttttttggcttactcttttcttcaggcaccttcaactggactcattagaccacatcctgccatttggaggcttgttcatgggatgacagttgtttaccttgtcgccctcactttcttgctttttcagactcgtgatgatgctaggcaattcatgaagtatcttcatcctgatcttggtgtcgaattgcctgaaagatcttatggaactgattgtcgcatatatgtccctgatcatccaaaaagcaggagatcatttttgatgaatttgttatagctcatatccttggatggtggggtaaggctataatgatacgaaaccaaccacttttgtgggtcttgtcaattggttttgagttaatggagctcacttttcgtcatatgttgccaaatttcaatgagtgctggtgggatagcattgtcctagacatattgatatgcaattggtttggtatttgggctggaatgaaaaccgtgcagtacttcgatgggaggacatacgaatgggttggtttgagccgccaacccaacattatcagtaaggtaaaaaggatgctgggacagttcacaccagcacagtgggacaaggacgagtggcaacctacgctgggtccttggagattcatccaggtgctgagcctttgtgttgttttcatggctgtcgaactgaacacgttcttcctcaagttctgcctgtggattcctccgcggaaccctttggtcgtgtatcggttggtcctttggtggttaatcgcgataccgaccatccgggagtacaatacctacttgcaagacagcaaaccatttaaaaaggtgggatccttctgctggctttccctggctatatgcattgtagagctcctgatctgcatcaagtttgggcatggtctgtttccgaggtcaatgccttcgtggttggttacgttctggtcagcagtcgccttgcttcttgcgctctttgtgtggacatggaaataccgaacagtgaaaaggaaaagggtataattgttacaaaggaatgtttattttgcctccattctttacccaattcggtgttaccgtgtacataaaaaatctattcaaattgtgtacatgtagcagtagtagtcagttttggtgatctgaagaggattatccatgttctcaatcccaaaccgttgaaaaatgtttctggatggcccaggcaaccatatgtgcaggttacaccacactgacactgccttgggcacgggaatttgcattgtgatgtgtgaagataggggtagccgggtaggcctgtcttgctggtgaatgtactcttgtcaggctgggacactctagtctaggttggtactccatagtcttcccggcttccagcaggcctgtgcaaatattttggccccatttgtttacttgagtcacatttgttacttgagtcacatgactaaag

SEQ ID NO: 71831 - DNA, 502 bp, Zea Mays
tgggttcttagcataagaaccactgaaaaccccagttttttccttctgaagttcagtcctttctagttcactctttcttgctgaaagttctctgtattcctctacctgccacttctgattagtccatagtatacttcattttttatgatattaaggaaaaggaacatacatgtgctcgttgttcctcagatgttagagatgacagtaaaacatgctcaggtgccacaacaagatacgttgcaccaaaaatcgtgtcaggcctcgttgtgtaaaccaataaagtggcacccaggtcatgtccttcctggtcaactgcagaaaaaataagctcagcaccttttgatctccctatccagtttctttgcatttccttgatactctcgggccaatcaagatcattcaaatcttcaagaagacgatcagcataagatgttatccttagcatccactggcgcattggctatacagcaggggagaaaatggatagtcacaatatgacttt

SEQ ID NO: 71832 - DNA, 1375 bp, Zea Mays
cttgctcccagtaccccccgtgccaccccaacgaagcgagacaccaacacgtaggccaacccctccgctgagtcgctgaccgcctcgcacccgtcgttcccctccttccggcacaaccagcacgcgagcggcacgagaagactagggttccggcgaggcgacggcgagaaccatggcagggattcgatggccgccagaggacccggagatcttcccttccaggatggtcagcggcggggcttgggtccccgtcgcgcccccaggagagatggcgtcggacgacgaccggtcggtggccgcggactcgtggtcgatcaagagcgactacggcagcaccctcgacgacgatcagcgttactccgacaccgccgaggtcctcctagcctcctcctccgcctcctctgcggccgcgccctccgcaacggttgccgtccacccctcctccgacttcagcttcgacaaggatgtccatgactccagctacgttgaacctcccttgctgggcttgcagaattttcaggatggtgcttacgctgaggatcttgcaaatttccatgaacgcagccacgctgatgactggtttggcactgatatcatggatatccgcgtaggttggaccaaaaatttgtgctcaagtagagatttacccagctgcagcgtacttgacattgggactgggagtggcagactcttgcagcagcttgcgaagcaggggttttctgatctgactgggattgactatagtgaaagtgcaattgagcttgctcgtagccttgcaatcggtgatgggtttgagcacattaatttcttggttgatgatgttttggagtcgaagttggagagaagatttgaacttgtcatggatgaagggactcttgatgcgattgggctccatcctgatggacctgtgaagagaatgatgtattggcagtccgttgatagcttggtttcccgtggtggtatattgcagaaccaaggatgagttggtgcaggaggtagagaacttcaaccaaaggaagcttggtgctgtgggctcaggctcagaaggattgccggctagtgaagctgcggtgttcagctacctggaccacgtccaaagttaccctagtgtggatagttcttgcataacgaccgttgctttacttcataagtgaaaaacataattgtattgtatgcttggtttattggccctagaaagttaccgtatacctgctacgatattaactatgtacccagtcacttgtgtatctggacaatattctactagtattttaccttgtcgggttggtattgctggatcctggattccactttggcatgctctttgaaagcagaagacatgtagatgtttcaatgcgtcgacacagggtacaat

SEQ ID NO: 71833 - DNA, 1392 bp, Zea Mays
ccatgaacagcaaagcaagggccgaatagtatattagtataggccagttccctcactccccagattccccttttcatagcacctctatacctcttcttctcgtcgtcactctatcccgcatctgctgttctttatttctatacatacatatatactatcatcggttatttgcttctctattctgtccgagtactttacggtgttccgcacatagatctcgtggccggctgttttgcgctttcgcttgcgtttcttggccctgctggtgttgaccggtccgaacgggggcagatcgatgctttgggtttgaagcggagctcctatcattccaatgaagggtcgttccgaagggctggttccgctgctcgttcatggttcccactatcctatctcatcatgtgtatatatgtaatccatgggggagggtttctctcgtctttgagataggcttgtggtttgcatgaccgaggagctgcaccgcccccttgctggccgctctttggattgaagggagctctgcatcctgatccacccctccatttttttttgcttgttgcgtccttcctgggacctgagatccgaggctcgtggtggctcactgtagcctcgctacactgttttcttctcctctcctgtgctatttgctgtttctcctaagattctttaggccgtgcttatccgtgctggagtttaacgaagcagcacgttgctgctgctggtgctgccctcatgccctggtggtcgactggtatcggtacccgtacttgcgtcgctttattataccctatcttcgccggtgaggtttccggccgttcggtacagtgctaggactgctgctgcaacgcttcgcgatgcaaggacgtcgttccagcaggacgattctgtttggactccggaactgcggtttggagttctgaaggcgaataggcgataataatgcggtgtaaattgtgatgaaagctgagattctttgtatgaaatacggaatgtatcgcttggacactgtatcgcgaattggtggatgagcatgttgtattccgttgcccttttggttcgaaacaatgcccacgtacatcgcatgcgtatggtcagatgttaggatcggcatctggttgtcagaatctgatcgttaatagcttcgtttttagttcattttttgtcaaaaatctctcaaatgttcgatgttgtcgcgccggtagtcatccttttatcttcctgtgtaccaggacacgtccttagtgctgattgagtgactagaaaccctcttgctatttaaaataaagtggttctattcaaataggatgacattatttcttatcagtacaaaatatgaggactgaggtgataatagattagctaattccattctacaaaacaaaataaaaataaaaa

SEQ ID NO: 71834 - DNA, 4234 bp, Zea Mays
ccgccgccgccccttcacggaacccgcggccgactccccctccgccttccccgctcgtccgcttctccgccgtccgctcctccactgcatggcctccacccctccgaccctgcacctcggctcctccacccttcggccccacgcctcggctgctccgctcgtccagccttcggccccacgcgcaccgcggccgccgtatctcccgtcatctgatcacccacaacggtgatgtggacgacgtggtgcgtcttggaggcagttccatttctggcgttacggtgagggaatgccacaacgtggtggacgccactgccgtggcgctcccgttgcaggccggagtctggacgcctaagcttcttgttttgctgggtttggtgcaagtggcccatatgttgcgcagaggagcactggtgaagcctaagaaccctttatgtcgatgggggcggtctcgagggaggtgtcgtcagcatgtgagaggctctgcttcatttgcccatcactgcggacgaggtcccgccatccagtcaagcgctacaagaagttgcttgcagaaatcttccctcggacacaggatgaaggaccaaatgatcgcaagatagggaaactgtgcgaatatatttcaaggaatcctatgcgtgttccaaagattacagtttacttagagcaaaaatgctacaaggaatttagggctgagcgctatggttcagtgaaagttgttatggcaatctatcgaaaggtgatatgttcttgtcaggagcagttgtaagtttttctacttgtaaacatatatgcattttctcttttgcatatgccacacatttatagtttcaaagcgttataatttgctctcttctgacagtttctaattttttcttcaatgattgttatttgtttttgtcaattttgatggaccttgctctatgacaccatttgaatttgtacttggagcaaaaatttagttctttttcgtataacgtgctcttactcatttttattggaactttaataagaattagtttataaacatgaacaattactgtaatgggtgaagccattgatttgcaggccactttttgccaacagcttgctaacaattgtagagacattattggagcaaaatagacaggatgacttgcggaaattagcatgtcaaacactttttgactttataaatagtcaggttgacagtacttacatgttcaatttagaaaaccagattcctaaactatgtcatctggcccaagagatgggtgaaaaggagaagatatgcattcttcatgcagctgggctacaagctctttcatctatggaaaagatatgttgcctcttaggacctgcttgaaagaggaggatttttttttgtcaaacttgaactaaatcctttggatcttaacccttcttcctcttacaaaaagatttggtttatgggtgagcactcccatatgtctgcagagcttgataatgttgtttctgcagttctggaaaattatgagagcccatatgcaaatgctgataatgatgctgctgttgaggatattcgaactcagtgggtggatgaagtgctcaaagccgaaggtcatgaacctcctgctgttaccattttgaccagggttccttcatggaaagttattagagctgttcatggtgaattaagtttgacaatagaagaatcaacaagcccaaatttttggtcagggatttgtctacataaccttgctagaatatccagggaaacaacaacaacgcgacgagttctggaagctatatttcgttattttgataataacaatctatggtcaccttctaaaggatttgcgctgtgtgtcctgctggatatgcagattgtgatggagaaatctggacagaatgctcatatattgttgtctatgttagtcaagcatcttgaacacaagaatgtattgaaacaaccagatatgaatctagatatcattgaagttacttcacgccttgctgaacactccaaagctcagtcttctatagcactaatgtcttcaataagtgatatggtcaggcatatgggtaaaagcatgcaatccttggccagtgatgcaggtcctggagacaacatggtcaaatggaatagcagatatgggaaagctgtagatgaatgtcttgttcagttgtctagaaaggtcaatttttctaaataaattttaaaggtgtatgtttttttcatctatagctctacagctgcactctatggataatttgttcaactttttttatcctcttcaggtcggtgatgctggacctatccttgatacgttagctgtagtactggaaaatatttcgagttctatgattgttgcacggtctactatctctgcagcatatcgcactgctcaaatagttgcatcattgccaaacttgtcacatcagagcaaagcatttcctgaggcgttgtttcatcaacttcttttagcaatgctctatccagattgtgagacacatttaggagcacatcggattttctctgttgttcttgttccctcttccgttgctccgttttcatttgcagacacttcacagacaaggaagattgatctccgaaggacattatctagaacaacatcagtgttttcatcttctgctgctttgtttgggaaacttaaaagagatatgctttcatttcgtgaaagtgcactccaggataacacaaagctactgcccatcagtgagaatgcaaatgagatcagtgcaaatgatgcaaaattattcaagtcacagactattcaaaggatggttagtacaagagatatttctctcccctcttccacagatacaagtacttcgagtgaaccaacttcatatcaggaaaaggatgctgtcaccctcatgctcagtgttcgtcaggcaaatcttcttctttcctccttatggactcaggcactgtcacctgaaaatgttccacggaattatgaagcaatttctcatacttacagcttgatgctattgttttctagagccaagggctcaggtgctgaagttttggttggtagctttcagcttgctttttcattaagaagtgtttcattacaagcaggctttcttccaccttcacgcaggcgttctctttttactttggcaacttcaatgctcgtgtttttttcgaaagcttttaacgttcttgcgctcattccagttgtgaagcaagtgttgacagaaagtacagttgatccatttctttgtttaatagaagactgtagattgcaggctcttgatagtgctaatgagtcctgcacgaaactctatggttcaaaagaagatgatgagctagctctgaaatcactgtcgaacattgacatgaatgaaaatcagtcaaaagaaacatcagtgcctcttatacttgacagcttggaagatatgtcggagtcagaattgtctgctattaggaaacagttgcttgaggaattttcagcagatgacagctgtctgggatctcattttactgaaacaccttcacagtatccagcacaaaatgggaaactgcaccataagtctatggaggttattccattgggatttgtttttgaagatgatactctcgctgaagcatctgacagctcagtagaacctcacttgcaacatccgccatgtaacaacattcttgatgtcaatcggcttcttgattcagttttggaaacatctcagcatgttggaaggtcgtcagtgtcaacaaaccaggatctgcctttcaaggacgtagccaaccaatgtgaagcacttctgattgggaagcagcaaaagctatctgcgtgcatgagtgtctgtgaaaaagaggctggtgaatcttccgtcgagcagtcatctcggcaggatcctcaagcagatacgtttctctgcacagctgatgaacaatggcaccccaattcctggcctgcctgcaggtgcgttttcaatcctaaacccggtgtaatgaaggtttcatggaccgaactgaaaaatagtctttacaagcctgaagacctcgttatgtctcaccagggatgaaaacgagtgggagaattttttgcttcgtctggtaccgtattttatttttatcgagacccttttcgtatttacggggaaacaagaatgagatataaacggaaacatgaatgggatataaacgaaatgatatattacgggaacagaaacggaaacggaaacgttgtcgacgacgggactcgcaccggtcggtcgacgtcaatcaatcgctctcactagctttcct

SEQ ID NO: 71835 - DNA, 3593 bp, Zea Mays
ccgccgccgccccttcacggaacccgcggccgactccccctccgccttccccgctcgtccgcttctccgccgtccgctcctccactgcatggcctccacccctccgaccctgcacctcggctcctccacccttcggccccacgcctcggctgctccgctcgtccagccttcggccccacgcgcaccgcggccgccgtatctcccgtcatctgatcacccacaacggtgatgtggacgacgtggtgcgtcttggaggcagttccatttctggcgttacggtgagggaatgccacaacgtggtggacgccactgccgtggcgctcccgttgcaggccggagtctggacgcctaagcttcttgttttgctgggtttggtgcaagtggcccatatgttgcgcagaggagcactggtgaagcctaagaaccctttatgtcgatgggggcggtctcgagggaggtgtcgtcagcatgtgagaggctctgcttcatttgcccatcactgcggacgaggtcccgccatccagtcaagcgctacaagaagttgcttgcagaaatcttccctcggacacaggatgaaggaccaaatgatcgcaagatagggaaactgtgcgaatatatttcaaggaatcctatgcgtgttccaaagattacagtttacttagagcaaaaatgctacaaggaatttagggctgagcgctatggttcagtgaaagttgttatggcaatctatcgaaaggtgatatgttcttgtcaggagcagttgtaagtttttctacttgtaaacatatatgcattttctcttttgcatatgccacacatttatagtttcaaagcgttataatttgctctcttctgacagtttctaattttttcttcaatgattgttatttgtttttgtcaattttgatggaccttgctctatgacaccatttgaatttgtacttggagcaaaaatttagttctttttcgtataacgtgctcttactcatttttattggaactttaataagaattagtttataaacatgaacaattactgtaatgggtgaagccattgatttgcaggccactttttgccaacagcttgctaacaattgtagagacattattggagcaaaatagacaggatgacttgcggaaattagcatgtcaaacactttttgactttataaatagtcaggttgacagtacttacatgttcaatttagaaaaccagattcctaaactatgtcatctggcccaagagatgggtgaaaaggagaagatatgcattcttcatgcagctgggctacaagctctttcatctatgatttggtttatgggtgagcactcccatatgtctgcagagcttgataatttctggaaaattatgagagcccatatgcaaatgctgataatgatgctgctgttgaggatattcgaactcagtgggtggatgaagtgctcaaagccgaaggtcatgaacctcctgctgttaccattttgaccagggttccttcatggaaagttattagagctgttcatggtgaattaagtttgacaatagaagaatcaacaagcccaaatttttggtcagggatttgtctacataaccttgctagaatatccagggaaacaacaacaacgcgacgagttctggaagctatatttcgttattttgataataacaatctatggtcaccttctaaaggatttgcgctgtgtgtcctgctggatatgcagattgtgatggagaaatctgaatgctcatatattgttgtctatgttagtcaagcatcttgaacacaagaatgtattgaaacaaccagatatgaatctagatatcattgaagttacttcacgccttgctgaacactccaaagctcagtcttctatagcactaatgtcttcaataagtgatatggtcaggcatatgggtaaaagcatgcaatccttggccagtgatgcaggtcctggagacaacatggtcaaatggaatagcagatatgggaaagctgtagatgaatgtcttgttcagttgtctagaaaggataacacaaagctactgcccatcagtgagaatgcaaatgagatcagtgcaaatgatgcaaaattattcaagtcacagactattcaaaggatggttagtacaagagatatttctctcccctcttccacagatacaagtacttcgagtgaaccaacttcatatcaggaaaaggatgctgtcaccctcatgctcagtgttcgtcaggcaaatcttcttctttcctccttatggactcaggcactgtcacctgaaaatgttccacggaattatgaagcaatttctcatacttacagcttgatgctattgttttctagagccaagggctcaggtgctgaagttttggttggtagctttcagcttgctttttcattaagaagtgtttcattacaagcaggctttcttccaccttcacgcaggcgttctctttttactttggcaacttcaatgctcgtgtttttttcgaaagcttttaacgttcttgcgctcattccagttgtgaagcaagtgttgacagaaagtacagttgatccatttctttgtttaatagaagactgtagattgcaggctcttgatagtgctaatgagtcctgcacgaaactctatggttcaaaagaagatgatgagctagctctgaaatcactgtcgaacattgacatgaatgaaaatcagtcaaaagaaacatcagtgcctcttatacttgacagcttggaagatatgtcggagtcagaattgtctgctattaggaaacagttgcttgaggaattttcagcagatgacagctgtctgggatctcattttactgaaacaccttcacagtatccagcacaaaatgggaaactgcaccataagtctatggaggttattccattgggatttgtttttgaagatgatactctcgctgaagcatctgacagctcagtagaacctcacttgcaacatccgccatgtaacaacattcttgatgtcaatcggcttcttgattcagttttggaaacatctcagcatgttggaaggtcgtcagtgtcaacaaaccaggatctgcctttcaaggacgtagccaaccaatgtgaagcacttctgattgggaagcagcaaaagctatctgcgtgcatgagtgtctgtgaaaaagaggctggtgaatcttccgtcgagcagtcatctcggcaggatcctcaagcagatacgtttctctgcacagctgatgaacaatggcaccccaattcctggcctgcctgcaggtgcgttttcaatcctaaacccggtgtaatgaaggtttcatggaccgaactgaaaaatagtctttacaagcctgaagacctcgttatgtctcaccagggatgaaaacgagtgggagaattttttgcttcgtctggtaccgtattttatttttatcgagacccttttcgtatttacggggaaacaagaatgagatataaacggaaacatgaatgggatataaacgaaatgatatattacgggaacagaaacggaaacggaaacgttgtcgacgacgggactcgcaccggtcggtcgacgtcaatcaatcgctctcactagctttcct

SEQ ID NO: 71836 - DNA, 4153 bp, Zea Mays
ccgccgccgccccttcacggaacccgcggccgactccccctccgccttccccgctcgtccgcttctccgccgtccgctcctccactgcatggcctccacccctccgaccctgcacctcggctcctccacccttcggccccacgcctcggctgctccgctcgtccagccttcggccccacgcgcaccgcggccgccgtatctcccgtcatctgatcacccacaacggtgatgtggacgacgtggtgcgtcttggaggcagttccatttctggcgttacggtgagggaatgccacaacgtggtggacgccactgccgtggcgctcccgttgcaggccggagtctggacgcctaagcttcttgttttgctgggtttggtgcaagtggcccatatgttgcgcagaggagcactggtgaagcctaagaaccctttatgtcgatgggggcggtctcgagggaggtgtcgtcagcatgtgagaggctctgcttcatttgcccatcactgcggacgaggtcccgccatccagtcaagcgctacaagaagttgcttgcagaaatcttccctcggacacaggatgaaggaccaaatgatcgcaagatagggaaactgtgcgaatatatttcaaggaatcctatgcgtgttccaaagattacagtttacttagagcaaaaatgctacaaggaatttagggctgagcgctatggttcagtgaaagttgttatggcaatctatcgaaaggtgatatgttcttgtcaggagcagttgtaagtttttctacttgtaaacatatatgcattttctcttttgcatatgccacacatttatagtttcaaagcgttataatttgctctcttctgacagtttctaattttttcttcaatgattgttatttgtttttgtcaattttgatggaccttgctctatgacaccatttgaatttgtacttggagcaaaaatttagttctttttcgtataacgtgctcttactcatttttattggaactttaataagaattagtttataaacatgaacaattactgtaatgggtgaagccattgatttgcaggccactttttgccaacagcttgctaacaattgtagagacattattggagcaaaatagacaggatgacttgcggaaattagcatgtcaaacactttttgactttataaatagtcaggttgacagtacttacatgttcaatttagaaaaccagattcctaaactatgtcatctggcccaagagatgggtgaaaaggagaagatatgcattcttcatgcagctgggctacaagctctttcatctatggaaaagatatgttgcctcttaggacctgcttgaaagaggaggatttttttttgtcaaacttgaactaaatcctttggatcttaacccttcttcctcttacaaaaagatttggtttatgggtgagcactcccatatgtctgcagagcttgataatgttgtttctgcagttctggaaaattatgagagcccatatgcaaatgctgataatgatgctgctgttgaggatattcgaactcagtgggtggatgaagtgctcaaagccgaaggtcatgaacctcctgctgttaccattttgaccagggttccttcatggaaagttattagagctgttcatggtgaattaagtttgacaatagaagaatcaacaagcccaaatttttggtcagggatttgtctacataaccttgctagaatatccagggaaacaacaacaacgcgacgagttctggaagctatatttcgttattttgataataacaatctatggtcaccttctaaaggatttgcgctgtgtgtcctgctggatatgcagattgtgatggagaaatctgaatgctcatatattgttgtctatgttagtcaagcatcttgaacacaagaatgtattgaaacaaccagatatgaatctagatatcattgaagttacttcacgccttgctgaacactccaaagctcagtcttctatagcactaatgtcttcaataagtgatatggtcaggcatatgggtaaaagcatgcaatccttggccagtgatgcaggtcctggagacaacatggtcaaatggaatagcagatatgggaaagctgtagatgaatgtcttgttcagttgtctagaaaggtcaatttttctaaataaattttaaaggtcggtgatgctggacctatccttgatacgttagctgtagtactggaaaatatttcgagttctatgattgttgcacggtctactatctctgcagcatatcgcactgctcaaatagttgcatcattgccaaacttgtcacatcagagcaaagcatttcctgaggcgttgtttcatcaacttcttttagcaatgctctatccagattgtgagacacatttaggagcacatcggattttctctgttgttcttgttccctcttccgttgctccgttttcatttgcagacacttcacagacaaggaagattgatctccgaaggacattatctagaacaacatcagtgttttcatcttctgctgctttgtttgggaaacttaaaagagatatgctttcatttcgtgaaagtgcactccaggataacacaaagctactgcccatcagtgagaatgcaaatgagatcagtgcaaatgatgcaaaattattcaagtcacagactattcaaaggatggttagtacaagagatatttctctcccctcttccacagatacaagtacttcgagtgaaccaacttcatatcaggaaaaggatgctgtcaccctcatgctcagtgttcgtcaggcaaatcttcttctttcctccttatggactcaggcactgtcacctgaaaatgttccacggaattatgaagcaatttctcatacttacagcttgatgctattgttttctagagccaagggctcaggtgctgaagttttggttggtagctttcagcttgctttttcattaagaagtgtttcattacaagcaggctttcttccaccttcacgcaggcgttctctttttactttggcaacttcaatgctcgtgtttttttcgaaagcttttaacgttcttgcgctcattccagttgtgaagcaagtgttgacagaaagtacagttgatccatttctttgtttaatagaagactgtagattgcaggctcttgatagtgctaatgagtcctgcacgaaactctatggttcaaaagaagatgatgagctagctctgaaatcactgtcgaacattgacatgaatgaaaatcagtcaaaagaaacatcagtgcctcttatacttgacagcttggaagatatgtcggagtcagaattgtctgctattaggaaacagttgcttgaggaattttcagcagatgacagctgtctgggatctcattttactgaaacaccttcacagtatccagcacaaaatgggaaactgcaccataagtctatggaggttattccattgggatttgtttttgaagatgatactctcgctgaagcatctgacagctcagtagaacctcacttgcaacatccgccatgtaacaacattcttgatgtcaatcggcttcttgattcagttttggaaacatctcagcatgttggaaggtcgtcagtgtcaacaaaccaggatctgcctttcaaggacgtagccaaccaatgtgaagcacttctgattgggaagcagcaaaagctatctgcgtgcatgagtgtctgtgaaaaagaggctggtgaatcttccgtcgagcagtcatctcggcaggatcctcaagcagatacgtttctctgcacagctgatgaacaatggcaccccaattcctggcctgcctgcaggtgcgttttcaatcctaaacccggtgtaatgaaggtttcatggaccgaactgaaaaatagtctttacaagcctgaagacctcgttatgtctcaccagggatgaaaacgagtgggagaattttttgcttcgtctggtaccgtattttatttttatcgagacccttttcgtatttacggggaaacaagaatgagatataaacggaaacatgaatgggatataaacgaaatgatatattacgggaacagaaacggaaacggaaacgttgtcgacgacgggactcgcaccggtcggtcgacgtcaatcaatcgctctcactagctttcct

SEQ ID NO: 71837 - DNA, 1025 bp, Zea Mays
cgccgccccttcacggaacccgcggccgactccccctccgccttccccgctcgtccgcttctccgccgtccgctcctccactgcatggcctccacccctccgaccctgcacctcggctcctccacccttcggccccacgcctcggctgctccgctcgtccagccttcggccccacgcgcaccgcggccgccgtatctcccgtcatctgatcacccacaacggtgatgtggacgacgtggtgcgtcttggaggcagttccatttctggcgttacggtgagggaatgccacaacgtggtggacgccactgccgtggcgctcccgttgcaggccggagtctggacgcctaagcttcttgttttgctgggtttggtgcaagtggcccatatgttgcgcagaggagcactggtgaagcctaagaaccctttatgtcgatgggggcggtctcgagggaggtgtcgtcagcatgtgagaggctctgcttcatttgcccatcactgcggacgaggtcccgccatccagtcaagcgctacaagaagttgcttgcagaaatcttccctcggacacaggatgaaggaccaaatgatcgcaagatagggaaactgtgcgaatatatttcaaggaatcctatgcgtgttccaaagtcccattacagattacagtttacttagagcaaaaatgctacaaggaatttagggctgagcgctatggttcagtgaaagttgttatggcaatctatcgaaaggtgatatgttcttgtcaggagcagttgccactttttgccaacagcttgctaacaattgtagagacattattggagcaaaatagacaggatgacttgcggaaattagcatgtcaaacactttttgactttataaatagtcaggttgacagtacttacatgttcaatttagaaaaccagattcctaaactatgtcatctggcccaagagatgggtgaaaaggagaagatatgcattcttcatgcagctgggctacaagctctttcatctatggtatttgtttct

SEQ ID NO: 71838 - DNA, 4205 bp, Zea Mays
cgccgccccttcacggaacccgcggccgactccccctccgccttccccgctcgtccgcttctccgccgtccgctcctccactgcatggcctccacccctccgaccctgcacctcggctcctccacccttcggccccacgcctcggctgctccgctcgtccagccttcggccccacgcgcaccgcggccgccgtatctcccgtcatctgatcacccacaacggtgatgtggacgacgtggtgcgtcttggaggcagttccatttctggcgttacggtgagggaatgccacaacgtggtggacgccactgccgtggcgctcccgttgcaggccggagtctggacgcctaagcttcttgttttgctgggtttggtgcaagtggcccatatgttgcgcagaggagcactggtgaagcctaagaaccctttatgtcgatgggggcggtctcgagggaggtgtcgtcagcatgtgagaggctctgcttcatttgcccatcactgcggacgaggtcccgccatccagtcaagcgctacaagaagttgcttgcagaaatcttccctcggacacaggatgaaggaccaaatgatcgcaagatagggaaactgtgcgaatatatttcaaggaatcctatgcgtgttccaaagattacagtttacttagagcaaaaatgctacaaggaatttagggctgagcgctatggttcagtgaaagttgttatggcaatctatcgaaaggtgatatgttcttgtcaggagcagttgccactttttgccaacagcttgctaacaattgtagagacattattggagcaaaatagacaggatgacttgcggaaattagcatgtcaaacactttttgactttataaatagtcaggttgacagtacttacatgttcaatttagaaaaccagattcctaaactatgtcatctggcccaagagatgggtgaaaaggagaagatatgcattcttcatgcagctgggctacaagctctttcatctatgatttggtttatgggtgagcactcccatatgtctgcagagcttgataatttctggaaaattatgagagcccatatgcaaatgctgataatgatgctgctgttgaggatattcgaactcagtgggtggatgaagtgctcaaagccgaaggtcatgaacctcctgctgttaccattttgaccagggttccttcatggaaagttattagagctgttcatggtgaattaagtttgacaatagaagaatcaacaagcccaaatttttggtcagggatttgtctacataaccttgctagaatatccagggaaacaacaacaacgcgacgagttctggaagctatatttcgttattttgataataacaatctatggtcaccttctaaaggatttgcgctgtgtgtcctgctggatatgcagattgtgatggagaaatctgaatgctcatatattgttgtctatgttagtcaagcatcttgaacacaagaatgtattgaaacaaccagatatgaatctagatatcattgaagttacttcacgccttgctgaacactccaaagctcagtcttctatagcactaatgtcttcaataagtgatatggtcaggcatatgggtaaaagcatgcaatccttggccagtgatgcaggtcctggagacaacatggtcaaatggaatagcagatatgggaaagctgtagatgaatgtcttgttcagttgtctagaaaggtcaatttttctaaataaattttaaaggtgtatgtttttttcatctatagctctacagctgcactctatggataatttgttcaactttttttatcctcttcaggtcggtgatgctggacctatccttgatacgttagctgtagtactggaaaatatttcgagttctatgattgttgcacggtctactatctctgcagcatatcgcactgctcaaatagttgcatcattgccaaacttgtcacatcagagcaaagcatttcctgaggcgttgtttcatcaacttcttttagcaatgctctatccagattgtgagacacatttaggagcacatcggattttctctgttgttcttgttccctcttccgttgctccgttttcatttgcagacacttcacagacaaggaagattgatctccgaaggacattatctagaacaacatcagtgttttcatcttctgctgctttgtttgggaaacttaaaagagatatgctttcatttcgtgaaagtgcactccaggataacacaaagctactgcccatcagtgagaatgcaaatgagatcagtgcaaatgatgcaaaattattcaagtcacagactattcaaaggatggttagtacaagagatatttctctcccctcttccacagatacaagtacttcgagtgaaccaacttcatatcaggaaaaggatgctgtcaccctcatgctcagtgttcgtcaggcaaatcttcttctttcctccttatggactcaggcactgtcacctgaaaatgttccacggaattatgaagcaatttctcatacttacagcttgatgctattgttttctagagccaagggctcaggtgctgaagttttggttggtagctttcagcttgctttttcattaagaagtgtttcattacaagcaggctttcttccaccttcacgcaggcgttctctttttactttggcaacttcaatgctcgtgtttttttcgaaagcttttaacgttcttgcgctcattccagttgtgaagcaagtgttgacagaaagtacagttgatccatttctttgtttaatagaagactgtagattgcaggctcttgatagtgctaatgagtcctgcacgaaactctatggttcaaaagaagatgatgagctagctctgaaatcactgtcgaacattgacatgaatgaaaatcagtcaaaagaaacatcagtgcctcttatacttgacagcttggaagatatgtcggagtcagaattgtctgctattaggaaacagttgcttgaggaattttcagcagatgacagctgtctgggatctcattttactgaaacaccttcacagtatccagcacaaaatgggaaactgcaccataagtctatggaggttattccattgggatttgtttttgaagatgatactctcgctgaagcatctgacagctcagtagaacctcacttgcaacatccgccatgtaacaacattcttgatgtcaatcggcttcttgattcagttttggaaacatctcagcatgttggaaggtcgtcagtgtcaacaaaccaggatctgcctttcaaggacgtagccaaccaatgtgaagcacttctgattgggaagcagcaaaagctatctgcgtgcatgagtgtctgtgaaaaagaggctggtgaatcttccgtcgagcagtcatctcggcaggatcctcaagcagatacgtttctctgcacagctgatgaacaatggcaccccaattcctgtaagctgccagcgctgtgtccctacgaccggttccttgcaacgtctgggtgctaagatgatctcttctgcgatgtggatctctataaccaagaacgtgttcagtggacgcctaaaaattggtggttccagagctcatgcatgctaaaatatgtgctgtcgtgtgtgagtgccagatgacatgatttccctgttttgtaaatggttctcgtctaccatgcatgggaaatatagggggtgcatcattgagtttatttcattgcttttgacagaaccattctatctctctctcatgctttgtactaattattagcaaacgacggatgatgaggggcagagaatcaacccattttatttctcaaaatataaacaaaaaagagtgaaaaatgatgaatcgcttcagggcctgcctgcaggtgcgttttcaatcctaaacccggtgtaatgaaggtttcatggaccgaactgaaaaatagtctttacaagcctgaagacctcgttatgtctcaccagggatgaaaacgagtgggagaattttttgcttcgtctggtaccgtattttatttttatcgagacccttttcgtatttacggggaaacaagaatgagatataaacggaaacatgaatgggatataaacgaaatgatatattacgggaacagaaacggaaacggaaacgttgtcgacgacgggactcgcaccggtcggtcgacgtcaatcaatcgctctcactagctttcct

SEQ ID NO: 71839 - DNA, 3174 bp, Zea Mays
gtgagcactcccatatgtctgcagagcttgataatgttgtttctgcagttctggaaaattatgagagcccatatgcaaatgctgataatgatgctgctgttgaggatattcgaactcagtgggtggatgaagtgctcaaagccgaaggtcatgaacctcctgctgttaccattttgaccagggttccttcatggaaagttattagagctgttcatggtgaattaagtttgacaatagaagaatcaacaagcccaaatttttggtcagggatttgtctacataaccttgctagaatatccagggaaacaacaacaacgcgacgagttctggaagctatatttcgttattttgataataacaatctatggtcaccttctaaaggatttgcgctgtgtgtcctgctggatatgcagattgtgatggagaaatctgaatgctcatatattgttgtctatgttagtcaagcatcttgaacacaagaatgtattgaaacaaccagatatgaatctagatatcattgaagttacttcacgccttgctgaacactccaaagctcagtcttctatagcactaatgtcttcaataagtgatatggtcaggcatatgggtaaaagcatgcaatccttggccagtgatgcaggtcctggagacaacatggtcaaatggaatagcagatatgggaaagctgtagatgaatgtcttgttcagttgtctagaaaggtcaatttttctaaataaattttaaaggtgtatgtttttttcatctatagctctacagctgcactctatggataatttgttcaactttttttatcctcttcaggtcggtgatgctggacctatccttgatacgttagctgtagtactggaaaatatttcgagttctatgattgttgcacggtctactatctctgcagcatatcgcactgctcaaatagttgcatcattgccaaacttgtcacatcagagcaaagcatttcctgaggcgttgtttcatcaacttcttttagcaatgctctatccagattgtgagacacatttaggagcacatcggattttctctgttgttcttgttccctcttccgttgctccgttttcatttgcagacacttcacagacaaggaagattgatctccgaaggacattatctagaacaacatcagtgttttcatcttctgctgctttgtttgggaaacttaaaagagatatgctttcatttcgtgaaagtgcactccaggataacacaaagctactgcccatcagtgagaatgcaaatgagatcagtgcaaatgatgcaaaattattcaagtcacagactattcaaaggatggttagtacaagagatatttctctcccctcttccacagatacaagtacttcgagtgaaccaacttcatatcaggaaaaggatgctgtcaccctcatgctcagtgttcgtcaggcaaatcttcttctttcctccttatggactcaggcactgtcacctgaaaatgttccacggaattatgaagcaatttctcatacttacagcttgatgctattgttttctagagccaagctttcagcttgctttttcattaagaagtgtttcattacaagcaggctttcttccaccttcacgcaggcgttctctttttactttggcaacttcaatgctcgtgtttttttcgaaagcttttaacgttcttgcgctcattccagttgtgaagcaagtgttgacagaaagtacagttgatccatttctttgtttaatagaagactgtagattgcaggctcttgatagtgctaatgagtcctgcacgaaactctatggttcaaaagaagatgatgagctagctctgaaatcactgtcgaacattgacatgaatgaaaatcagtcaaaagaaacatcagtgcctcttatacttgacagcttggaagatatgtcggagtcagaattgtctgctattaggaaacagttgcttgaggaattttcagcagatgacagctgtctgggatctcattttactgaaacaccttcacagtatccagcacaaaatgggaaactgcaccataagtctatggaggttattccattgggatttgtttttgaagatgatactctcgctgaagcatctgacagctcagtagaacctcacttgcaacatccgccatgtaacaacattcttgatgtcaatcggcttcttgattcagttttggaaacatctcagcatgttggaaggtcgtcagtgtcaacaaaccaggatctgcctttcaaggacgtagccaaccaatgtgaagcacttctgattgggaagcagcaaaagctatctgcgtgcatgagtgtctgtgaaaaagaggctggtgaatcttccgtcgagcagtcatctcggcaggatcctcaagcagatacgtttctctgcacagctgatgaacaatggcaccccaattcctgtaagctgccagcgctgtgtccctacgaccggttccttgcaacgtctgggtgctaagatgatctcttctgcgatgtggatctctataaccaagaacgtgttcagtggacgcctaaaaattggtggttccagagctcatgcatgctaaaatatgtgctgtcgtgtgtgagtgccagatgacatgatttccctgttttgtaaatggttctcgtctaccatgcatgggaaatatagggggtgcatcattgagtttatttcattgcttttgacagaaccattctatctctctctcatgctttgtactaattattagcaaacgacggatgatgaggggcagagaatcaacccattttatttctcaaaatataaacaaaaaagagtgaaaaatgatgaatcgcttcagggcctgcctgcaggtgcgttttcaatcctaaacccggtgtaatgaaggtttcatggaccgaactgaaaaatagtctttacaagcctgaagacctcgttatgtctcaccagggatgaaaacgagtgggagaattttttgcttcgtctggtaccgtattttatttttatcgagacccttttcgtatttacggggaaacaagaatgagatataaacggaaacatgaatgggatataaacgaaatgatatattacgggaacagaaacggaaacggaaacgttgtcgacgacgggactcgcaccggtcggtcgacgtcaatcaatcgctctcactagctttcct

SEQ ID NO: 71840 - DNA, 3113 bp, Zea Mays
gtgagcactcccatatgtctgcagagcttgataatgttgtttctgcagttctggaaaattatgagagcccatatgcaaatgctgataatgatgctgctgttgaggatattcgaactcagtgggtggatgaagtgctcaaagccgaaggtcatgaacctcctgctgttaccattttgaccagggttccttcatggaaagttattagagctgttcatggtgaattaagtttgacaatagaagaatcaacaagcccaaatttttggtcagggatttgtctacataaccttgctagaatatccagggaaacaacaacaacgcgacgagttctggaagctatatttcgttattttgataataacaatctatggtcaccttctaaaggatttgcgctgtgtgtcctgctggatatgcagattgtgatggagaaatctggacagaatgctcatatattgttgtctatgttagtcaagcatcttgaacacaagaatgtattgaaacaaccagatatgaatctagatatcattgaagttacttcacgccttgctgaacactccaaagctcagtcttctatagcactaatgtcttcaataagtgatatggtcaggcatatgggtaaaagcatgcaatccttggccagtgatgcaggtcctggagacaacatggtcaaatggaatagcagatatgggaaagctgtagatgaatgtcttgttcagttgtctagaaaggtcaatttttctaaataaattttaaaggtgtatgtttttttcatctatagctctacagctgcactctatggataatttgttcaactttttttatcctcttcaggtcggtgatgctggacctatccttgatacgttagctgtagtactggaaaatatttcgagttctatgattgttgcacggtctactatctctgcagcatatcgcactgctcaaatagttgcatcattgccaaacttgtcacatcagagcaaagcatttcctgaggcgttgtttcatcaacttcttttagcaatgctctatccagattgtgagacacatttaggagcacatcggattttctctgttgttcttgttccctcttccgttgctccgttttcatttgcagacacttcacagacaaggaagattgatctccgaaggacattatctagaacaacatcagtgttttcatcttctgctgctttgtttgggaaacttaaaagagatatgctttcatttcgtgaaagtgcactccaggataacacaaagctactgcccatcagtgagaatgcaaatgagatcagtgcaaatgatgcaaaattattcaagtcacagactattcaaaggatggttagtacaagagatatttctctcccctcttccacagatacaagtacttcgagtgaaccaacttcatatcaggaaaaggatgctgtcaccctcatgctcagtgttcgtcaggcaaatcttcttctttcctccttatggactcaggcactgtcacctgaaaatgttccacggaattatgaagcaatttctcatacttacagcttgatgctattgttttctagagccaaggcgttctctttttactttggcaacttcaatgctcgtgtttttttcgaaagcttttaacgttcttgcgctcattccagttgtgaagcaagtgttgacagaaagtacagttgatccatttctttgtttaatagaagactgtagattgcaggctcttgatagtgctaatgagtcctgcacgaaactctatggttcaaaagaagatgatgagctagctctgaaatcactgtcgaacattgacatgaatgaaaatcagtcaaaagaaacatcagtgcctcttatacttgacagcttggaagatatgtcggagtcagaattgtctgctattaggaaacagttgcttgaggaattttcagcagatgacagctgtctgggatctcattttactgaaacaccttcacagtatccagcacaaaatgggaaactgcaccataagtctatggaggttattccattgggatttgtttttgaagatgatactctcgctgaagcatctgacagctcagtagaacctcacttgcaacatccgccatgtaacaacattcttgatgtcaatcggcttcttgattcagttttggaaacatctcagcatgttggaaggtcgtcagtgtcaacaaaccaggatctgcctttcaaggacgtagccaaccaatgtgaagcacttctgattgggaagcagcaaaagctatctgcgtgcatgagtgtctgtgaaaaagaggctggtgaatcttccgtcgagcagtcatctcggcaggatcctcaagcagatacgtttctctgcacagctgatgaacaatggcaccccaattcctgtaagctgccagcgctgtgtccctacgaccggttccttgcaacgtctgggtgctaagatgatctcttctgcgatgtggatctctataaccaagaacgtgttcagtggacgcctaaaaattggtggttccagagctcatgcatgctaaaatatgtgctgtcgtgtgtgagtgccagatgacatgatttccctgttttgtaaatggttctcgtctaccatgcatgggaaatatagggggtgcatcattgagtttatttcattgcttttgacagaaccattctatctctctctcatgctttgtactaattattagcaaacgacggatgatgaggggcagagaatcaacccattttatttctcaaaatataaacaaaaaagagtgaaaaatgatgaatcgcttcagggcctgcctgcaggtgcgttttcaatcctaaacccggtgtaatgaaggtttcatggaccgaactgaaaaatagtctttacaagcctgaagacctcgttatgtctcaccagggatgaaaacgagtgggagaattttttgcttcgtctggtaccgtattttatttttatcgagacccttttcgtatttacggggaaacaagaatgagatataaacggaaacatgaatgggatataaacgaaatgatatattacgggaacagaaacggaaacggaaacgttgtcgacgacgggactcgcaccggtcggtcgacgtcaatcaatcgctctcactagctttcct

SEQ ID NO: 71841 - DNA, 3134 bp, Zea Mays
ctggaaaattatgagagcccatatgcaaatgctgataatgatgctgctgttgaggatattcgaactcagtgggtggatgaagtgctcaaagccgaaggtcatgaacctcctgctgttaccattttgaccagggttccttcatggaaagttattagagctgttcatgagaagaatcaacaagcccaaatttttggtcagggatttgtctacataaccttgctagaatatccagggaaacaacaacaacgcgacgagttctggaagctatatttcgttattttgataataacaatctatggtcaccttctaaaggatttgcgctgtgtgtcctgctggatatgcagattgtgatggagaaatctgaatgctcatatattgttgtctatgttagtcaagcatcttgaacacaagaatgtattgaaacaaccagatatgaatctagatatcattgaagttacttcacgccttgctgaacactccaaagctcagtcttctatagcactaatgtcttcaataagtgatatggtcaggcatatgggtaaaagcatgcaatccttggccagtgatgcaggtcctggagacaacatggtcaaatggaatagcagatatgggaaagctgtagatgaatgtcttgttcagttgtctagaaaggtcaatttttctaaataaattttaaaggtgtatgtttttttcatctatagctctacagctgcactctatggataatttgttcaactttttttatcctcttcaggtcggtgatgctggacctatccttgatacgttagctgtagtactggaaaatatttcgagttctatgattgttgcacggtctactatctctgcagcatatcgcactgctcaaatagttgcatcattgccaaacttgtcacatcagagcaaagcatttcctgaggcgttgtttcatcaacttcttttagcaatgctctatccagattgtgagacacatttaggagcacatcggattttctctgttgttcttgttccctcttccgttgctccgttttcatttgcagacacttcacagacaaggaagattgatctccgaaggacattatctagaacaacatcagtgttttcatcttctgctgctttgtttgggaaacttaaaagagatatgctttcatttcgtgaaagtgcactccaggataacacaaagctactgcccatcagtgagaatgcaaatgagatcagtgcaaatgatgcaaaattattcaagtcacagactattcaaaggatggttagtacaagagatatttctctcccctcttccacagatacaagtacttcgagtgaaccaacttcatatcaggaaaaggatgctgtcaccctcatgctcagtgttcgtcaggcaaatcttcttctttcctccttatggactcaggcactgtcacctgaaaatgttccacggaattatgaagcaatttctcatacttacagcttgatgctattgttttctagagccaagggctcaggtgctgaagttttggttggtagctttcagcttgctttttcattaagaagtgtttcattacaagcaggctttcttccaccttcacgcaggcgttctctttttactttggcaacttcaatgctcgtgtttttttcgaaagcttttaacgttcttgcgctcattccagttgtgaagcaagtgttgacagaaagtacagttgatccatttctttgtttaatagaagactgtagattgcaggctcttgatagtgctaatgagtcctgcacgaaactctatggttcaaaagaagatgatgagctagctctgaaatcactgtcgaacattgacatgaatgaaaatcagtcaaaagaaacatcagtgcctcttatacttgacagcttggaagatatgtcggagtcagaattgtctgctattaggaaacagttgcttgaggaattttcagcagatgacagctgtctgggatctcattttactgaaacaccttcacagtatccagcacaaaatgggaaactgcaccataagtctatggaggttattccattgggatttgtttttgaagatgatactctcgctgaagcatctgacagctcagtagaacctcacttgcaacatccgccatgtaacaacattcttgatgtcaatcggcttcttgattcagttttggaaacatctcagcatgttggaaggtcgtcagtgtcaacaaaccaggatctgcctttcaaggacgtagccaaccaatgtgaagcacttctgattgggaagcagcaaaagctatctgcgtgcatgagtgtctgtgaaaaagaggctggtgaatcttccgtcgagcagtcatctcggcaggatcctcaagcagatacgtttctctgcacagctgatgaacaatggcaccccaattcctgtaagctgccagcgctgtgtccctacgaccggttccttgcaacgtctgggtgctaagatgatctcttctgcgatgtggatctctataaccaagaacgtgttcagtggacgcctaaaaattggtggttccagagctcatgcatgctaaaatatgtgctgtcgtgtgtgagtgccagatgacatgatttccctgttttgtaaatggttctcgtctaccatgcatgggaaatatagggggtgcatcattgagtttatttcattgcttttgacagaaccattctatctctctctcatgctttgtactaattattagcaaacgacggatgatgaggggcagagaatcaacccattttatttctcaaaatataaacaaaaaagagtgaaaaatgatgaatcgcttcagggcctgcctgcaggtgcgttttcaatcctaaacccggtgtaatgaaggtttcatggaccgaactgaaaaatagtctttacaagcctgaagacctcgttatgtctcaccagggatgaaaacgagtgggagaattttttgcttcgtctggtaccgtattttatttttatcgagacccttttcgtatttacggggaaacaagaatgagatataaacggaaacatgaatgggatataaacgaaatgatatattacgggaacagaaacggaaacggaaacgttgtcgacgacgggactcgcaccggtcggtcgacgtcaatcaatcgctctcactagctttcct

SEQ ID NO: 71842 - DNA, 1639 bp, Zea Mays
atgaataatgatgatatgagtttgggtatgaataagcatgaattgtccatatcctccctagttgcaggctttcttccaccttcacgcaggcgttctctttttactttggcaacttcaatgctcgtgtttttttcgaaagcttttaacgttcttgcgctcattccagttgtgaagcaagtgttgacagaaagtacagttgatccatttctttgtttaatagaagactgtagattgcaggctcttgatagtgctaatgagtcctgcacgaaactctatggttcaaaagaagatgatgagctagctctgaaatcactgtcgaacattgacatgaatgaaaatcagtcaaaagaaacatcagtgcctcttatacttgacagcttggaagatatgtcggagtcagaattgtctgctattaggaaacagttgcttgaggaattttcagcagatgacagctgtctgggatctcattttactgaaacaccttcacagtatccagcacaaaatgggaaactgcaccataagtctatggaggttattccattgggatttgtttttgaagatgatactctcgctgaagcatctgacagctcagtagaacctcacttgcaacatccgccatgtaacaacattcttgatgtcaatcggcttcttgattcagttttggaaacatctcagcatgttggaaggtcgtcagtgtcaacaaaccaggatctgcctttcaaggacgtagccaaccaatgtgaagcacttctgattgggaagcagcaaaagctatctgcgtgcatgagtgtctgtgaaaaagaggctggtgaatcttccgtcgagcagtcatctcggcaggatcctcaagcagatacgtttctctgcacagctgatgaacaatggcaccccaattcctgtaagctgccagcgctgtgtccctacgaccggttccttgcaacgtctgggtgctaagatgatctcttctgcgatgtggatctctataaccaagaacgtgttcagtggacgcctaaaaattggtggttccagagctcatgcatgctaaaatatgtgctgtcgtgtgtgagtgccagatgacatgatttccctgttttgtaaatggttctcgtctaccatgcatgggaaatatagggggtgcatcattgagtttatttcattgcttttgacagaaccattctatctctctctcatgctttgtactaattattagcaaacgacggatgatgaggggcagagaatcaacccattttatttctcaaaatataaacaaaaaagagtgaaaaatgatgaatcgcttcagggcctgcctgcaggtgcgttttcaatcctaaacccggtgtaatgaaggtttcatggaccgaactgaaaaatagtctttacaagcctgaagacctcgttatgtctcaccagggatgaaaacgagtgggagaattttttgcttcgtctggtaccgtattttatttttatcgagacccttttcgtatttacggggaaacaagaatgagatataaacggaaacatgaatgggatataaacgaaatgatatattacgggaacagaaacggaaacggaaacgttgtcgacgacgggactcgcaccggtcggtcgacgtcaatcaatcgctctcactagctttcct

SEQ ID NO: 71843 - DNA, 2417 bp, Zea Mays
cagcaatagccggggcgcggaagcggttccccgtgttgcggtggtacaaagcgacaggcgcctcacgctcgcgtccctcctccccttccccacctcttcccattgccaagcaagagagaaacgcacgcgagccgcgagcagaacagagcagcgcggcgccatcccgatctcgctatttcccttctcccccgatgcgatctcgccgaaccctaatccccacgcccgacgcccggccgtcgccggagccctagccccgaatgcggcggtgacgcgcggcgtgccaccaccaccacctcagcgcccgcgcccgcgcccgcgcccgccaccgaccgtcctgcccggccgacaccagctgccatgggcgccgccgacaagtggctgctcccgctcgtctccgtctccttcgtctcgctcctgctcttcctctccgcgctctcgggcttctccgcctcctccgcactcttcgcgcgcctcccgccaccctcctacgtgcgccgaggcgccgccgcaccgccctccttcgcctacctgctcgcgggcggccggggggacggcaggaagctcctgcggctgctcctcgccgtctaccaccccaggaaccgctacctgctccacctctccgccgacgcgccggcctccgagcgcgccgagctcgccgcggccgtcgcgcgcgccgctcccgccgtgcgcgccttctcgaacgtcgatgtcgtgggcaggcccaccgcgggcaccccaatgggatcctccggcctcgccgccacgctccgtgcggccgccgcgatgctccggctggatgcggagtgggactggttcatcacgctcaacgccgccgactacccccttctcacccaggacgacttgatccatgttttctcctctgttccaaggcacctcaactttattgatcacaccagtgacattggatggaaagagtctcagagagtgcagccgattatagtagatgctggagtgtatttggcagggaggaatcagttcttccaagccacagagaaacgggacactcctgatagtttcaaatttttcacaggttctccatgggtcattttaaacagacgctttgttgagtattgtatttttggctgggagaatctccctagaacactcctcatgtacttgacaaacgtgatgctacctctcgaggggtatttccattcggttgcatgcaactcggacttccgcaatttcacagtgaacaacgacttgcggtatatgatttgggacaatccacctcagatggagccccatttcctaaatgttacacattacgatgagctagtagggactggggttccttttgcccggaagtttaaggagaatgaacccttgttggacaagattgatgatcaagtgcttcgacgatggcatcagagacctgttcctggtgcgtggtgcacaggcaggaggaggtggttcagtgatccttgctcccagtggagcaacgtcaacattgtaagacctggtcctcaagctgagaagttccgaacatatataaaccagattatggaagaatcaaagtcaggcaacaactcttgcaagcaatagcggttgaagcattgagattgtctcattttgcacagaggagaggagcgaactccccatgtctcgagaacttcctggcatctggttcgggagcaagcatttttgcacctgttatatgaacacacggccaaggtgagagatgggtctattctttccggaatttttttggtgtcatggcttcaagggcttagtgcacactagcattactggaagccaagagagcttactgtgggaatacggaagctaataggcattgtaattagtagcggtgagttgaatgaccggtgcctttgtttatagaactggtggaattgttggcgcttccatacagaattgagaaaatgaagaactggggatgttattgattggttggtcatggctgtggctgttgtggacacgtgtggttaatacaatgctttactgattttcccaccttgacatgaagtttattctcatagtctcatgtctcctattctgcattttcatctcgtctgtgcatgtgcatgtacactacactaacaactctggtctcttgcagtgacgcagtgccccttaactgcaggagtttagtgagctaatgagctgtggatgtgaacaatggcaaattggcagtacagcatccctacacttcgtaggatctgtttgcatgaattgtgtggccttcaatggtatccctgctccagtgtagtccagtgtggaaggctactgtatccatgtcgaaacatgctaggttacaatggattaaaatgtgcagtaccagtagcgtttgatgcagcaatctatatatgaattgcaatggattctgcaaaagctcgatcgttggttatacttatgtggcgtgcttaataggatag

SEQ ID NO: 71844 - DNA, 3535 bp, Zea Mays
gttgcggtggtacaaagcgacaggcgcctcacgctcgcgtccctcctccccttccccacctcttcccattgccaagcaagagagaaacgcacgcgagccgcgagcagaacagagcagcgcggcgccatcccgatctcgctatttcccttctcccccgatgcgatctcgccgaaccctaatccccacgcccgacgcccggccgtcgccggagccctagccccgaatgcggcggtgacgcgcggcgtgccaccaccaccacctcagcgcccgcgcccgcgcccgcgcccgccaccgaccgtcctgcccggccgacaccagctgccatgggcgccgccgacaagtggctgctcccgctcgtctccgtctccttcgtctcgctcctgctcttcctctccgcgctctcgggcttctccgcctcctccgcactcttcgcgcgcctcccgccaccctcctacgtgcgccgaggcgccgccgcaccgccctccttcgcctacctgctcgcgggcggccggggggacggcaggaagctcctgcggctgctcctcgccgtctaccaccccaggaaccgctacctgctccacctctccgccgacgcgccggcctccgagcgcgccgagctcgccgcggccgtcgcgcgcgccgctcccgccgtgcgcgccttctcgaacgtcgatgtcgtgggcaggcccaccgcgggcaccccaatgggatcctccggcctcgccgccacgctccgtgcggccgccgcgatgctccggctggatgcggagtgggactggttcatcacgctcaacgccgccgactacccccttctcacccaggacggtaagattcaaatgctcgcttcccatctgttagcgagatctgtttgagtagctgttttgcttcacagccgcacagacttgtccggatctaaggcaaacctcagctctttacttggtccttattatgaatactcaaaattgcgtttgcggagcatttccattcttgaattagaggcaaagcatgctgtacgaacagatcataaaattgcaaggggagcaactggcactgttcggttgaggggtcgccgtagctacaaaaatcaattttgtgttcttcacagcatgttgttgacttgtattaagttgcgtttaatgttatctgtcaagttgcataattgaaatatgcctgaaaggacgaagggcccactaccccatcagaattaggaagaggcctgctgcttggtcgtttggatttctgttggactgtggtacgatagccgccttaggtgaaatagtgcaactacatgattgacatgatgtcttcttcattctctatttaggtaccagctcaaccactgtgtgctctcgtccttatgaggactctaatcaccaggaacaagctatgtaattcttggtgtggctttgtttgtgtcatctacctgtgtacgcctgtacacatacaaccatttattttatataaaccatataaatatacatgctgtctttcgtgccatcaataacaacaacaaagccttttagtcccaagcaagttggggccatctttcatgctatatgctgccaattgatgctgaattgctaactaggatcagagagtactgagcttattcttgtggtcaattagctaaagcttggttggacttcttgggaaccatcttcaactctttcttttgggcaatcaaatccttttcttttgcacagaatagattgtaatggtagttaactgtagctactgcactggattccaagtgaatctgattgctgatttacttgatacactccaccagaggtatcatgcatggtgacatgcataagaaaatatggggattttttttgacagagatcatgtagcattagttgctctatatgtctatagtcatgttatgtacttgctccttgagtttaagtaacataaatcagggcacgtctgccatactgtgagttcagggtatttaaactcaaagtctcatactgagcagaatatcttggacagtaactcagcaactgattaacccttcatttaaatgacatctaagagagctttaacaagtgcatcactgaattatcaacacaggatgcacaaactgatgttctgatttgtggcgtcctttttcctcatttcctgatactacctatataacattgcctttttatgtgatacacggtaattattgtaacttcatctgtgttatgtgctgcttccactatgtcgcacttagttcacaccctttcttatgaagtctaattttgttttttaatagatactagcatgttctagttttgcttttggcttgtgtattccgactgacacctcttaggggttcttgagtttcgtgttcatgattctctgttttctttttgtcttttgtcccttgctgcagacttgatccatgttttctcctctgttccaaggcacctcaactttattgatcacaccagtgacattggatggaaagagtctcagagagtgcagccgattatagtagatgctggagtgtatttggcagggaggaatcagttcttccaagccacagagaaacgggacactcctgatagtttcaaatttttcacaggttctccatgggtcattttaaacagacgctttgttgagtattgtatttttggctgggagaatctccctagaacactcctcatgtacttgacaaacgtgatgctacctctcgaggggtatttccattcggttgcatgcaactcggacttccgcaatttcacagtgaacaacgacttgcggtatatgatttgggacaatccacctcagatggagccccatttcctaaatgttacacattacgatgagctagtagggactggggttccttttgcccggaagtttaaggagaatgaacccttgttggacaagattgatgatcaagtgcttcgacgatggcatcagagacctgttcctggtgcgtggtgcacaggcaggaggaggtggttcagtgatccttgctcccagtggagcaacgtcaacattgtaagacctggtcctcaagctgagaagttccgaacatatataaaccagattatggaagaatcaaagtcaggcaacaactcttgcaagcaatagcggttgaagcattgagattgtctcattttgcacagaggagaggagcgaactccccatgtctcgagaacttcctggcatctggttcgggagcaagcatttttgcacctgttatatgaacacacggccaagtgacgcagtgccccttaactgcaggagtttagtgagctaatgagctgtggatgtgaacaatggcaaattggcagtacagcatccctacacttcgtaggatctgtttgcatgaattgtgtggccttcaatggtatccctgctccagtgtagtccagtgtggaaggctactgtatccatgtcgaaacatgctaggttacaatggattaaaatgtgcagtaccagtagcgtttgatgcagcaatctatatatgaattgcaatggattctgcaaaagctcgatcgttggttatacttatgtggcgtgcttaataggatag

SEQ ID NO: 71845 - DNA, 1803 bp, Zea Mays
ataacattgcctttttatgtgatacacggtaattattgtaacttcatctgtgttatgtgctgcttccactatgtcgcacttagttcacaccctttcttatgaagtctaattttgttttttaatagatactagcatgttctagttttgcttttggcttgtgtattccgactgacacctcttaggggttcttgagtttcgtgttcatgattctctgttttctttttgtcttttgtcccttgctgcagacttgatccatgttttctcctctgttccaaggcacctcaactttattgatcacaccagtgacattggatggaaagagtctcagagagtgcagccgattatagtagatgctggagtgtatttggcagggaggaatcagttcttccaagccacagagaaacgggacactcctgatagtttcaaatttttcacaggttctccatgggtcattttaaacagacgctttgttgagtattgtatttttggctgggagaatctccctagaacactcctcatgtacttgacaaacgtgatgctacctctcgaggggtatttccattcggttgcatgcaactcggacttccgcaatttcacagtgaacaacgacttgcggtatatgatttgggacaatccacctcagatggagccccatttcctaaatgttacacattacgatgagctagtagggactggggttccttttgcccggaagtttaaggagaatgaacccttgttggacaagattgatgatcaagtgcttcgacgatggcatcagagacctgttcctggtgcgtggtgcacaggcaggaggaggtggttcagtgatccttgctcccagtggagcaacgtcaacattgtaagacctggtcctcaagctgagaagttccgaacatatataaaccagattatggaagaatcaaagtcaggcaacaactcttgcaagcaatagcggttgaagcattgagattgtctcattttgcacagaggagaggagcgaactccccatgtctcgagaacttcctggcatctggttcgggagcaagcatttttgcacctgttatatgaacacacggccaaggtgagagatgggtctattctttccggaatttttttggtgtcatggcttcaagggcttagtgcacactagcattactggaagccaagagagcttactgtgggaatacggaagctaataggcattgtaattagtagcggtgagttgaatgaccggtgcctttgtttatagaactggtggaattgttggcgcttccatacagaattgagaaaatgaagaactggggatgttattgattggttggtcatggctgtggctgttgtggacacgtgtggttaatacaatgctttactgattttcccaccttgacatgaagtttattctcatagtctcatgtctcctattctgcattttcatctcgtctgtgcatgtgcatgtacactacactaacaactctggtctcttgcagtgacgcagtgccccttaactgcaggagtttagtgagctaatgagctgtggatgtgaacaatggcaaattggcagtacagcatccctacacttcgtaggatctgtttgcatgaattgtgtggccttcaatggtatccctgctccagtgtagtccagtgtggaaggctactgtatccatgtcgaaacatgctaggttacaatggattaaaatgtgcagtaccagtagcgtttgatgcagcaatctatatatgaattgcaatggattctgcaaaagctcgatcgttggttatacttatgtggcgtgcttaataggatag

SEQ ID NO: 71846 - DNA, 1376 bp, Zea Mays
gatggagtgaagtctttttcggaacttctctcttcattcacgcgacatgacttgtttgctcgttcaagccatccatagaccgtagcccgtgttgggttggggccagaaggggcttctgtagttctgttcttgtgcttgtggttaccaccgaccgagctcacgttctgatcgtttcccagttccccaaaccgaacaagatgatttggtacactgcagctggcactactacactcgagtaaggggaggagatggctggacagagcaaaaggggcacgcagtcgcagctggacaacggcgagcaggtccacaacggcaagaaggcgagggcgcaggccatgcccgacggcgtggtcaagcgggagcagcaagagacaggcgaggcagcggatgagggacaagagcaggaggaaggggaggttagccaaggcggcggcgcgggggccatggaggaggcgcagatcagtttgagtgcgaacacgggcacgtgatatgcggcgtctgccgcaatagccacgcgcaggtgtgccgcggcgccgtctactcgccgtgcgtggaggtggacgccttcgtgcgcgacgccaagcagccgtgcccgtacgaggagttcgggtgcaagagcgccgtggtgtacttcgaggcggcggagcaccagcgcgcgtgcccctgggcgccctgctcgtgcccggccccgggatgcggcttcttcagctcgccagcgaggctggccggccacttcacgggcgcccacgcctggcccgtcacggaggtaagctacgggaagccgttcagggtcgcgctgccgccgccgcagggctggcacgtccttgtgggcgcggaggaccggtgcgtgttcctggtgtccgcgtgcgcgctcggcgtgggcgcggccgccgcggtgtcgctcgtgtgcgtgcgggccaacggcgacgcggcggacggggcgccccagttcaggtgcaggctctgggcggaggccgccaacagcaaggagagcgtggtggtgatgatgtccatggtgaagagcagccgcttgtgcgggggtgctggcgcgttctcggccgccgaccagggcatgttcttcgtgatgccaccggagatcatggacgacgcgttgggcgagacgcccgccgtcatggttcgcatcgacagagcaggcgctgctgccagaagctctagctctaggagagtagctgagtaggaggcattgcatgtaattaggcgctgctgccatgagtgccttgaacacgagaatgcattgcaagtgcaagggatctgggccatgacatgatgcaccactggtacagaaatacctatggtacgtaacttgtgactgtttgttgggggagatgttttgtgaatgtgaaccatggtgctag

SEQ ID NO: 71847 - DNA, 2812 bp, Zea Mays
gacggaggcccaagacaagcccaggcgtgcgtgaggggttgagatatactccatataggagagagagagagcgcgcgcgccagcagggcacaggtgatgcgttgtagtgtagcggagcggagcagagcagagcaggtgagagagaggaggagcgtcgccgagccattcttaaatgtgagcgggcgggggtaagtgaggtgagtagagtagtagtggcttggcttcacctgctactgcaacggaacaagaacagaaccaccatcactcctccgctcttcaccatcagctgccgcttcctctcttttctccccccagtagccagcagtctccgtcactctctcacacacacaaaagcagcgacttgctcacagtagtgctccacggacagaatgaccaaagacgacgagttcaagctggtcaagatccagaaccatgtgctcaaggtgaacatacactgcgacgggtgcaagcacaaggtcaagaagctccttcagaagatcgaaggtacttcttctttctttctttctttcttgacactcacttcactgcccatatcttagactggctgcccggccaccaaaaagcacaccgccctgctgtgtcttgctaacatgcgttgcgttgacacgacaaagagatcccggcttctcatgtaaaaagaaaacagaagataaaaagaaccggtaaaacttcgtttcatgatgcgaatttttaactgtgctatggtaaagagggcggcccagactttcaccccctagggtgaggtgaaatttcctgccgttctttcggatggatgggcacagcagagccccccactcactgcacaagcccccacatctcgtgcttgtgacatgcagtcgccagtagtacatggtaattactagttaccgtggctcacgagcagcctgtgatctcctctctctctctctctgctgctggctgctgctgcatctcatggatggcaggcgtgtactcggtggccattgatgtggacaaccacaaggtgtcggtgacaggcgacgtggactcggagaccttgatcaggaagctcaccaggggcggcaagcacgcggagctgtggtcgcagcacaagggcggcagtgcccagcagaagcagcaggcccagcagcaacagcagcagaagcaaggtggcaatccgagcaaggatgggcacagcaagagcagcaacaacaacggcggccagaaaaaggaccaggggaagcaaggaggaggaggaggggttggtgggggcctcgtgcagggcctcaaggcgttcaagaaccagcacggcggcaacaagcagcaccaccagctccctgagctcctcagctcggaggacgatgacggcatgttcgacgacgatgacggcgagttcgacgacgactacgaggaggagctccggttcctcggggacaagatgagccagctcgggctccacggcaacggcaacggcaacaaccagcaccaccatcagaacaagaacgggaacaacgtcgtcgctgtcaacagtaaccacagcaatggcaagaagggtaacggcggcgctgcagccaatcgccaccagagccagaaccagaagaacgtgaatgtggtcaacgtggcagcagcgaatggcaagatgggcggcggtggaggagtccagaaccacaagaacgctaacgcgatcaacatggcggcggcggcgaacgccaagatgggtaatggcgcccagaggaacgctggcgccatgggtggcattggcatgctgggcctaagccatggcctgggagcgggcggcgctgctgctgctgctcctcctcctggcttccagcaaggctacgcaggcttcaaccacccgccctatgccgctgctgccggctatggaggaggtctacagcagcagcagcagcatctccagcaccaccagcagcagcagagtaacagcctcatggcgagcatgcaggggtaccatcatcaccagtaccctgccgcgacggccgccgtggtgaacaacttgaggggcctgaacggcaacatggtgatgatgcatcagcaccagccgcagccgcagccgcaggcccagatgatgtaccactcgtctccccagatcagcagcccttacaccggctactacaacccttacaattactactaccaccaccacccccatcccggcagcgctgggtaccctgccaccgccagcaacggggatgtggagagcatgttcagcgacgagaacaccaagggctgtgttgtcatgtagggcgggacgagaacaccattcctgctacctttctttctctctttcgtttctttttcattattttactgctcttatggttttcgcctgtatcaagagtgaatcatggtgttgacttagatgtgttgttgaaagtaggggcaacttgagaggggtgaccaaacagtggaatgtacaataggagtgccttttaggcttttttactgcctagcgatttgccctggctggcttgttatgatctgtgtactatatcgtaagatctgggtgttttgggttttggacttgtgtgctgtgccaatgcccaccatctgagtggtgatcgactgttagcagtcaacattggaggaagcttgcaaacctgtaaacctggagatgaagagaacccctaagcattttcctcgaaagagagttacgagcctgctgaaaaaccaaagatccaagccatgatcaagtcccatgcatgatgaaaagtgtgtggctggtaaaggtggttgaaaatgaatgcctatcattatggctgtggctcccttcatgaagggacgcattggtccctaaaccaaaaaaaaaaaaaaa

SEQ ID NO: 71848 - DNA, 2197 bp, Zea Mays
gtagtgtagcggagcggagcagagcagagcaggtgagagagaggaggagcgtcgccgagccattcttaaatgtgagcgggcgggggtaagtgaggtgagtagagtagtagtggcttggcttcacctgctactgcaacggaacaagaacagaaccaccatcactcctccgctcttcaccatcagctgccgcttcctctcttttctccccccagtagccagcagtctccgtcactctctcacacacacaaaagcagcgacttgctcacagtagtgctccacggacagaatgaccaaagacgacgagttcaagctggtcaagatccagaaccatgtgctcaaggtgaacatacactgcgacgggtgcaagcacaaggtcaagaagctccttcagaagatcgaaggcgacgtggactcggagaccttgatcaggaagctcaccaggggcggcaagcacgcggagctgtggtcgcagcacaagggcggcagtgcccagcagaagcagcaggcccagcagcaacagcagcagaagcaaggtggcaatccgagcaaggatgggcacagcaagagcagcaacaacaacggcggccagaaaaaggaccaggggaagcaaggaggaggaggaggggttggtgggggcctcgtgcagggcctcaaggcgttcaagaaccagcacggcggcaacaagcagcaccaccagctccctgagctcctcagctcggaggacgatgacggcatgttcgacgacgatgacggcgagttcgacgacgactacgaggaggagctccggttcctcggggacaagatgagccagctcgggctccacggcaacggcaacggcaacaaccagcaccaccatcagaacaagaacgggaacaacgtcgtcgctgtcaacagtaaccacagcaatggcaagaagggtaacggcggcgctgcagccaatcgccaccagagccagaaccagaagaacgtgaatgtggtcaacgtggcagcagcgaatggcaagatgggcggcggtggaggagtccagaaccacaagaacgctaacgcgatcaacatggcggcggcggcgaacgccaagatgggtaatggcgcccagaggaacgctggcgccatgggtggcattggcatgctgggcctaagccatggcctgggagcgggcggcgctgctgctgctgctcctcctcctggcttccagcaaggctacgcaggcttcaaccacccgccctatgccgctgctgccggctatggaggaggtctacagcagcagcagcagcatctccagcaccaccagcagcagcagagtaacagcctcatggcgagcatgcaggggtaccatcatcaccagtaccctgccgcgacggccgccgtggtgaacaacttgaggggcctgaacggcaacatggtgatgatgcatcagcaccagccgcagccgcagccgcaggcccagatgatgtaccactcgtctccccagatcagcagcccttacaccggctactacaacccttacaattactactaccaccaccacccccatcccggcagcgctgggtaccctgccaccgccagcaacggggatgtggagagcatgttcagcgacgagaacaccaagggctgtgttgtcatgtagggcgggacgagaacaccattcctgctacctttctttctctctttcgtttctttttcattattttactgctcttatggttttcgcctgtatcaagagtgaatcatggtgttgacttagatgtgttgttgaaagtaggggcaacttgagaggggtgaccaaacagtggaatgtacaataggagtgccttttaggcttttttactgcctagcgatttgccctggctggcttgttatgatctgtgtactatatcgtaagatctgggtgttttgggttttggacttgtgtgctgtgccaatgcccaccatctgagtggtgatcgactgttagcagtcaacattggaggaagcttgcaaacctgtaaacctggagatgaagagaacccctaagcattttcctcgaaagagagttacgagcctgctgaaaaaccaaagatccaagccatgatcaagtcccatgcatgatgaaaagtgtgtggctggtaaaggtggttgaaaatgaatgcctatcattatggctgtggctcccttcatgaagggacgcattggtccctaaaccaaaaaaaaaaaaaaa

SEQ ID NO: 71849 - DNA, 2128 bp, Zea Mays
caataataactaggagtaataaaaaagaatataaataaaaaataatatcatacatatacatttaaatagcctccaccactcccttctcgcgacctcagaatctcacggcatcacgcgaagcaaggagaaagaaaatggcgcagctggtggagacgtacgcgtgctcgccggcgacggaacgcggccgtggaatcctcctggccggggaccccaagacggacacgatcgcctactgcaccggccgcagcgtcatcattcgccgcctcgatgcgcccctcgacacttgggtctaccccgaccacgcctaccccaccaccgtcgcccgcttctcccccaacggcgagtgggtcgcctccgccgacgcctccggctgcgtccgcgtctggggccgctacggcgaccgcgcgctcaaggccgagtttcgccccctctcgggacgcgtcgacgacctccgctggtccccggacggcttacgcatcgttgtctccggggacggcaagggcaagtccttcgtccgcgcattcgtatgggactctggcagcacagttggtgagtttgatgggcactcaaagagggttctgagctgtgacttcaagccaacacgtccatttcgcattgtgacatgcggtgaagattttctggctaacttttatgaaggaccgccattcaaattcaagcattccataagggatcactcgaattttgttaactgtatccggtatgctcctgatggtagtaagtttatcactgtgagttctgataagaagggtttgatatatgatggtaaaactggagaaaaaataggagagctttccactgaaggcggtcacacagggagcatatatgctgttagctggaatcctgacagtaaacaggttctaacagtttctgctgataaatctgcgaaagtatgggatatctttgaagatgcaagtgggaaattgaatcgaactttggtttgccctggtataggaggtgtggatgatatgcttgttggttgtctctggcagaatgatcatctcgtgacagtctctcttggtgggacatttaatgtgttctctgcaagcaacccagaccaagaaccagttacatttgcaggacatttgaagactgttagttctttggtcttctttcctcaaagtagcccaagaactatactatctactagctatgatggtgtcatcatgaggtggatattgggtgttgggtttggtgggagactgatgcgcaaaaacaacactcaaataaaatgctttgctgcagtagaagaagagcttgttacctcaggttatgataataagatcttcaggattcctcttaatggaaaccagtgtggagatgctgagtcagttgatgtaggtggtcagccaaatgctttgaaccttgcacttcaaaaacctgaatttgcactggtcactactgattctgggattgtattgctgcacaactcaaaagtcatttctacaaccaaagttaactataccatcacttcatcttcggtgtctcctgatgggacagaagctgttgtgggtgctcaagatgggaaactgagaatctattccatcagtggtgatacacttacagaagaagctctgcttgagaagcaccggggtgctatcacttccatacattattcaccagatgtttctatgtttgcttctgctgatgccaacagggaagctgttgtgtgggatcgggccagtagagagatcaaactgaagaacatgttgtaccacacagctaggataaactccctggcttggtcaccggacagtcgattggttgccactggctcactggacacctgtgcaattgtctacgagatagacaagccagtagccagtcgcgtcactatcaagggagctcatctgggtggagttcatggtttaaccttcctggagaatgatactctggtgactgccggcgaggatgcttgcattcgtgtttggaaggtggtggagtaataggttactcattattctggaactgtgagaatatagggatactactgttgcttttctcccctatgtcttgaaatagtcggtaataactggcttcgctgtggtgctagttttcatgaatgttgactgtgctttcatatacttattatatataacctacctctatc

SEQ ID NO: 71850 - DNA, 532 bp, Zea Mays
taaggagagccagtagccagtcgcgtcactatcaagggagctcatctgggtggagttcatggtttaaccttcctggagaatgatactctggtgactgccggcgaggatgcttgcattcgtgtttggaaggtggtggagtaataggttactcattattctggtgtgcattgagaatgtctttgctattcattggaataaacttctttctttttctgtgcttgttggtacggttgttgttacctgacaggtcatagcatcgttgttgccttctcagcgatttgtgctctaaatttcctttacaattcttttttgagttgtattatttttgcctttttccccgaaagaaagactcctttgtaagtgtatctccgcatctgattttgtcaggaactgtgagaatatagggatactactgttgcttttctcccctatgtcttgaaatagtcggtaataactggcttcgctgtggtgctagttttcatgaatgttgactgtgctttcatatacttattatatataacctacctctatc

SEQ ID NO: 71851 - DNA, 3361 bp, Zea Mays
ggccttgtccccacgtttgcctcttctcgacttctcctgtagggctgttcgtgttttttctgctttcgcctttttcccagcatttttttcctctcctgcgcctcgccaccgcttcctcttgtcgcccgcctctctcatcgaccctaggcgcgccgcctcgccgccgccgatcccgcagccgtcgatcctggccgctccgatagccgagggctacttgattgtttggaatctacttttatagttgattccaagcatggaaagtctaccaaatggttcagtaaacaatgcggagcataaccaggaaaacaagaagtccatggatgctagtgtgcctgaagaagtacaagatgtttttatttacagagaagatgttgtgagcttgaagtccaaggaggatgtccgtggattagttttagaggtagctggggaatatgattctgaaggtagcatcactgatgatgatattgatactgaggaacatgaagataaaactgttcgtggagcagaaaatggtgctgctgatggtgataatgctagtaatggagctgaagttgaaagccagagttctttgccggataacaaagttcgagtgttatggcttgatgatagtgaaaaaacagaagacattgatgaggtagttgttgttgatagaagtttccttcatggtgatttagttgcctctgcctcagatccaactggtcagatggggcttgttttggatgtcaatcttgtggttgatttgcaaggtgtgaatggcgatatgataaagggtgtttcttccaaggatttgagacgaatcagggaattcaatgtgggtgattatgttgtctctgggctatggcttggtcgagttgatgaagtgctcgatagtgttaatgtgctttttgacgatggctctgtctgtaaagtcaatagagcagatcctatgtgcttaaagccagtatttggcccaatgcatccagatacagattgtcctttttatccaggacagcgtgtgaaggcagtgtcatcatctgttttcaaaacatcaaggtggcttaatggattgtggagagcaagtcgtcttgaaggtactgtcacaaaagtggaaagtgtttctgttatagtctattggattgcatctgcacactttgcttcagatcagcaacctgttcctccagagaagcagaacccaaaggaccttactcttctgtcttgtttctcttatgcaaactggcaattaactgactggtgtcttcctcaccgatacactttatgtactaatgataccgtgattaattctgataagcatacaggtcagatctgtacatgcccagaaagctcagttccactgtctgatattccagaatctcaagctgatgttcagactgaacaagatcaaatgactgatacagatgcaggtcataggcaaatagatgttgattctactgcagatggattgagtatgtcggacggagataattcatgcatagccaaagaatcagaaactagtgtatcaagcattctaaaggagccacaggacaatgcaacatctaggaaaaagcttaggaaagtgtccctaaaaaaacataaaagaacgaaaaaaagagacgacagctttgagcgagctctactcattgcaaatacttgtaccaaagttgatgtaatctggcaggacgggacaaaggaatgtggggtagccgcaacatcgttgattcctatccacaatccaaatgaccatgagttcttccctgagcagtatgttgtggacaaggtcacaaatgatgttgatgattcttctgaaccaaggcgtgtgggtcttgttagaagtgttagtgctaaggaccgaacagtaactgtatcatggtttaagccttcgctacatccagaggagacaaagaatatcgtgtgtaatgaaattgtgagtgcatatgaactggatggccatccggattatgattattgctatggagatattgtcgttcgcttgccgcctgtctcacctgtaattgaatcaaccaataacaaggatcaaatggaactagataggacggtcgatgcctcggaaggatttgctgcctcaaatgatgcaccctctaatactagtgcaagtgaacaacttttgcagaaggaatcctgctcgcagtttacaagcctctcatgggctggaaatatagttggctttcaagacggtgagattgaagtcatttggggtgatgggtcgatttcaaaggttgggcctcatgaaatatatgttgttggccgtgaagatgatgatgcctcactagatgacggaacagcctctgatggtgctagctgggagactgttgatgacaatgaaatggatgtacttgatgattctgcaaagggcacgggtggaagaaagtgggtaaaaaaagtacagcaggaatggagcatacttgagaagaacctaccagactatatttatgtcagagtctttgaggatcgcatggatctcttgagagccgtgattgttggagcaagtggaacaccctaccaagatggcctgttcttctttgatttctaccttccacctgagtatccgcaagttcctccgtcagcatactaccattctggtggtttgcgtgtaaatccaaacctgtatgtggatggaaaggtttgcttaagtctcttaaatacttggaccggcagagggaacgaagtgtgggacccatcatcatcaagtattctacaagtactggtttcacttcagggattggttctcaatgaaaaaccctattttaatgaggctgggtacgagaagcaagttggtactgttgaaggggagaagaatgcagtgccgtataatgagaatacgtacctgctgagcgtgaaatccatgctgtatatattgagacggcctcctttgcattttgaggattttgtgaagagccatttccgcaagcgtggccactacatccttaaagcctgtgaggcatatttgcaaggaaatgttgttggcactctcactgacgacgcatgcaccaccaacagaagcacggagcactcgagctctgtcggcttcaagcttgcactagcaaagattttaccaaggttgattacagccctgaaggagcatggagctgattgcgaccaatacgagcaccttggcaaaacagaccccgttagagagagctgatcattgagtgacttgtacttggatcttttgccttttatatctgttcttttttcgggtttcagaaaagatggtgacttaataccaccaggctgttttcgtataaatgtacattcaaagtttgttgtttccgtcaaacatttggaaaatatggccccaaatgatttattcgatacatggaaccgagctaccctgtgcagttgatgtttccgttgaacttgcagg

SEQ ID NO: 71852 - DNA, 3821 bp, Zea Mays
gtccccacgtttgcctcttctcgacttctcctgtagggctgttcgtgttttttctgctttcgcctttttcccagcatttttttcctctcctgcgcctcgccaccgcttcctcttgtcgcccgcctctctcatcgaccctaggcgcgccgcctcgccgccgccgatcccgcagccgtcgatcctggccgctccgatagccgagggctacttgattgtttggaatctacttttatagttgattccaagcatggaaagtctaccaaatggttcagtaaacaatgcggagcataaccaggaaaacaagaagtccatggatgctagtgtgcctgaagaagtacaagatgtttttatttacagagaagatgttgtgagcttgaagtccaaggaggatgtccgtggattagttttagaggtagctggggaatatgattctgaaggtagcatcactgatgatgatattgatactgaggaacatgaagataaaactgttcgtggagcagaaaatggtgctgctgatggtgataatgctagtaatggagctgaagttgaaagccagagttctttgccggataacaaagttcgagtgttatggcttgatgatagtgaaaaaacagaagacattgatgaggtagttgttgttgatagaagtttccttcatggtgatttagttgcctctgcctcagatccaactggtcagatggggcttgttttggatgtcaatcttgtggttgatttgcaaggtgtgaatggcgatatgataaagggtgtttcttccaaggatttgagacgaatcagggaattcaatgtgggtgattatgttgtctctgggctatggcttggtcgagttgatgaagtgctcgatagtgttaatgtgctttttgacgatggctctgtctgtaaagtcaatagagcagatcctatgtgcttaaagccagtatttggcccaatgcatccagatacagattgtcctttttatccaggacagcgtgtgaaggcagtgtcatcatctgttttcaaaacatcaaggtggcttaatggattgtggagagcaagtcgtcttgaaggtactgtcacaaaagtggaaagtgtttctgttatagtctattggattgcatctgcacactttgcttcagatcagcaacctgttcctccagagaagcagaacccaaaggaccttactcttctgtcttgtttctcttatgcaaactggcaattaactgactggtgtcttcctcaccgatacactttatgtactaatgataccgtgattaattctgataagcatacaggtcagatctgtacatgcccagaaagctcagttccactgtctgatattccagaatctcaagctgatgttcagactgaacaagatcaaatgactgatacagatgcaggtcataggcaaatagatgttgattctactgcagatggattgagtatgtcggacggagataattcatgcatagccaaagaatcagaaactagtgtatcaagcattctaaaggagccacaggacaatgcaacatctaggaaaaagcttaggaaagtgtccctaaaaaaacataaaagaacgaaaaaaagagacgacagctttgagcgagctctactcattgcaaatacttgtaccaaagttgatgtaatctggcaggacgggacaaaggaatgtggggtagccgcaacatcgttgattcctatccacaatccaaatgaccatgagttcttccctgagcagtatgttgtggacaaggtcacaaatgatgttgatgattcttctgaaccaaggcgtgtgggtcttgttagaagtgttagtgctaaggaccgaacagtaactgtatcatggtttaagccttcgctacatccagaggagacaaagaatatcgtgtgtaatgaaattgtgagtgcatatgaactggatggccatccggattatgattattgctatggagatattgtcgttcgcttgccgcctgtctcacctgtaattgaatcaaccaataacaaggatcaaatggaactagataggacggtcgatgcctcggaaggatttgctgcctcaaatgatgcaccctctaatactagtgcaagtgaacaacttttgcagaaggaatcctgctcgcagtttacaagcctctcatgggctggaaatatagttggctttcaagacggtgagattgaagtcatttggggtgatgggtcgatttcaaaggttgggcctcatgaaatatatgttgttggccgtgaagatgatgatgcctcactagatgacggaacagcctctgatggtgctagctgggagactgttgatgacaatgaaatggatgtacttgatgattctgcaaagtttccttttgttctttatattattgtttcctatcctctgtcaggatgattcacaaagcatacctgagaatagcattgaaagggaagatggttcattcagctcccagaatggaagttctgttgcaactggtcccctttcagttgcttttgggtttgtgacccgactagcgagtgatctcttcgctcgaggtagaaggcatttagatagatcgtcaaactcggatgctatggatgaagttgagtctcaccagtctaatgaagtttcagaaactagtgatgacattgataagattaatgagaataatgtggaatcgccagaggatgctgcagtaatagaaaacgattcttctgtcgagaagtctgtagatgtggtcatggctgataatcttgtagatttggaatgtttcaaacactttgatattctgcaatgtcctccagaccaccattaccttgaaaacatagcccagggcacgggtggaagaaagtgggtaaaaaaagtacagcaggaatggagcatacttgagaagaacctaccagactatatttatgtcagagtctttgaggatcgcatggatctcttgagagccgtgattgttggagcaagtggaacaccctaccaagatggcctgttcttctttgatttctaccttccacctgagtatccgcaagttcctccgtcagcatactaccattctggtggtttgcgtgtaaatccaaacctgtatgtggatggaaaggtttgcttaagtctcttaaatacttggaccggcagagggaacgaagtgtgggacccatcatcatcaagtattctacaagtactggtttcacttcagggattggttctcaatgaaaaaccctattttaatgaggctgggtacgagaagcaagttggtactgttgaaggggagaagaatgcagtgccgtataatgagaatacgtacctgctgagcgtgaaatccatgctgtatatattgagacggcctcctttgcattttgaggattttgtgaagagccatttccgcaagcgtggccactacatccttaaagcctgtgaggcatatttgcaaggaaatgttgttggcactctcactgacgacgcatgcaccaccaacagaagcacggagcactcgagctctgtcggcttcaagcttgcactagcaaagattttaccaaggttgattacagccctgaaggagcatggagctgattgcgaccaatacgagcaccttggcaaaacagaccccgttagagagagctgatcattgagtgacttgtacttggatcttttgccttttatatctgttcttttttcgggtttcagaaaagatggtgacttaataccaccaggctgttttcgtataaatgtacattcaaagtttgttgtttccgtcaaacatttggaaaatatggccccaaatgatttattcgatacatggaaccgagctaccctgtgcagttgatgtttccgttgaacttgcagg

SEQ ID NO: 71853 - DNA, 425 bp, Zea Mays
cccggacacactggagaagcaaaacggcgcctaatatcattctcgaagattagtcccggtcgaaagtccaattttgaccaatccattctgaacgggagaagaagaccaagagggagaagagatgggtgcagaacggaaccacgaagcaatacaaacccgagagccacctggagaggaagagagtgttgttagcattcgggagccatccaccggaatccaccgctccttcggccaagcagcctacagaggagatccatggctggattgcccttcccgaacagcagacagtggcggcgcgggggacgacgacggaacgcagccaacctcgccggagccggacggcggggatgcgctcctacttcggatcccagctttcagcctcttcgacaaggacggcgacgacgagcaagccactgtggaaactg

SEQ ID NO: 71854 - DNA, 2957 bp, Zea Mays
ccccgccccatccccgcataggtcgcgtctgcgccatcgccgcacgccatcacgtccgcagcccacatgctccaccctcgcccccctccccgccattctcggcgcaccgctcgccatccccataggccatcattgctagcgcgcccatgccccctgcccctgtcatcggcaccagaaaccgctcccctcgcacgccggccctagctggctagctcccaaatccgcccctccgcctcagatccctacggtgggatgcgagggaacgacaaccacgcggcctcccgtccttagagcctcaaatccgatgccccctccctaagccattccctcggccgcgacatcaacgaaaacgagcatggcccccctctacctcctccaccttgccgtttatggcctccgcactgccccaacgtcgacaccttcgtcctccccctctactcccagtgcaccgccgccgcgtatgcgctatcccacccgatggacgtgttgccgcctctgcagcacgccctgtcgctgtcgaccccacccagccatgcatttggagtttacaatgtggagacatgatttatccaccggacgacgaggttggtgcgcggatggcgagggaggacctccactgggcctactccacacctcttcctgtctaccgaggtcgagcacatggaggacctgctccgctgtcgggcactcctgagccagcgactacaaaatccactctggctctctacttcaccctccatattacaatatgtactttgtatatgtgagatgagacacccaagcagtcaaactaaacactattgtccaatcccctcttccaaattcattacaatcctattagcatgcaaagatttaatttgatgcaatgttttgatttgtactacgtttttactagctttgcagatgcttcagaaggttatggtcagtgacttttttcttttcagatttgttagaatagacacagaaatttagatttctctcctgtaatgttgttagcattggtcttaattttatttgttgttgttaggagaggatttgattatcatgatcagtacaagatatcaatcattaaatagcgaattcactctaatttctagccaccatttttctaagtaccatgttgctgctctctttccgctggatgaacatttgaacagtggcaccgaatagtgatcttatagtgctggcccgcaacacatggggtgcttctgttcttttacccattgaaatgttatggatcttttttctaatctaagattagaagtatggtcgtgatactattttgctataatctatgaatgtttttctgtaaaaaccaatctgtttttgctttagattaccaaactaaattgtctctatgcttttttgtgggtgattttgttggacccctacagccgtgatggcatgggaggctggcaagtcgattctttgtatatagttagtagtacaaaactatatgctatgagggtccagagaaattgatgatgaggagcagctagaggtcgtggtggagaagggctagagaaagggatgacgagggacagttgcaagttgtggtggagaagggcgacgaccccatgacaacatggggtgaatttctatatcagttgccaatcataagaaacaaatcttattattgcactccagcaataaaagggccagatgctattattgttggctatatcagacagtttgtcatcaagcctttgtctggattcctttttggcactcttatggagtactaagccacactgaagaatttgggcttaagagtgaggttttgaaggtgactcttgcaactgacgtcgtgaactgagtgtgaatatctactggatgggcaagcaagtttccaaccccatgccctcccatcgattctgctgcctgatccggctagagtttattaggactcgcaactacctcggagttcactgctgtaaatatgggtaacaccctaccagtgcatgatatgtcggaatccacagcagccataggatctcccaacaaggaggatcttgcaacaatgacattgatcaagaattggatgttggaaattatggtttggcattgttacttctcttactcctgtttcatgtcccaatctgaggtgactcgtgttggtaatcatggcatctcagattgggagtgggaggaggatgaggagatgatttggtgctaccagggacaggccccatctcctagaaatggatcttcctcctttgcatgggcaacttgtgcatcgggctactcttcaccaacagaaaaccatcactgagaaagagcagttagcaactggtgttgtcgtgttgcgactcaaaagggcttgcctatgggcatccacataggagccatccccaaatgctgactgaccaaatgttcggtatgggagccacaaatagcagcacgatgggaatgcagcagcagcagcagcaaggggtatacgggaacatgcaggcaggtgcacagaacgtgcaaagtatggtgggccttcagaaccagacccagaatcccaacttcactcagcagattcaacaaaaccaacaatgattcaacactaacggtcatggaggttgaaagatgagcaatatagccatcgttttgctatttgtctgttggtctttactcagcttatctgtgagactgatagtagccccaggttgatagccttcgtttttctgtaaatcaatgtagatgcatcgccattagcgagatgcaggtcaattatatacgttgtaactgtgttttggatatgtgaatagtgttacgtgtgttccttttatttataattaagcctcgcagcaaggccgacaatcgaattgcatacgactagacgagtgggtggttcatcaggatgaaaattggtcatcaggtggaccctagaattatttgaggaactcacagatgtactgtaatatgtattccctgttgtctttctggataaatagcccaagatgttggcc

SEQ ID NO: 71855 - DNA, 2942 bp, Zea Mays
ccccgccccatccccgcataggtcgcgtctgcgccatcgccgcacgccatcacgtccgcagcccacatgctccaccctcgcccccctccccgccattctcggcgcaccgctcgccatccccataggccatcattgctagcgcgcccatgccccctgcccctgtcatcggcaccagaaaccgctcccctcgcacgccggccctagctggctagctcccaaatccgcccctccgcctcagatccctacggtgggatgcgagggaacgacaaccacgcggcctcccgtccttagagcctcaaatccgatgccccctccctaagccattccctcggccgcgacatcaacgaaaacgagcatggcccccctctacctcctccaccttgccgtttatggcctccgcactgccccaacgtcgacaccttcgtcctccccctctactcccagtgcaccgccgccgcgtatgcgctatcccacccgatggacgtgttgccgcctctgcagcacgccctgtcgctgtcgaccccacccagccatgcatttggagtttacaatgtggagacatgatttatccaccggacgacgaggttggtgcgcggatggcgagggaggacctccactgggcctactccacacctcttcctgtctaccgaggtcgagcacatggaggacctgctccgctgtcgggcactcctgagccagcgactacaaaatccactctggctctctacttcaccctccatattacaatatgtactttgtatatgtgagatgagacacccaagcagtcaaactaaacactattgtccaatcccctcttccaaattcattacaatcctattagcatgcaaagatttaatttgatgcaatgttttgatttgtactacgtttttactagctttgcagatgcttcagaaggttatggtcagtgacttttttcttttcagatttgttagaatagacacagaaatttagatttctctcctgtaatgttgttagcattggtcttaattttatttgttgttgttaggagaggatttgattatcatgatcagtacaagatatcaatcattaaatagcgaattcactctaatttctagccaccatttttctaagtaccatgttgctgctctctttccgctggatgaacatttgaacagtggcaccgaatagtgatcttatagtgctggcccgcaacacatggggtgcttctgttcttttacccattgaaatgttatggatcttttttctaatctaagattagaagtatggtcgtgatactattttgctataatctatgaatgtttttctgtaaaaaccaatctgtttttgctttagattaccaaactaaattgtctctatgcttttttgtgggtgattttgttggacccctacagccgtgatggcatgggaggctggcaagtcgattctttgtatatagttagtagtacaaaactatatgctatgagggtccagagaaattgatgatgaggagcagctagaggtcgtggtggagaagggctagagaaagggatgacgagggacagttgcaagttgtggtggagaagggcgacgaccccatgacaacatggggtgaatttctatatcagttgccaatcataagaaacaaatcttattattgcactccagatgctattattgttggctatatcagacagtttgtcatcaagcctttgtctggattcctttttggcactcttatggagtactaagccacactgaagaatttgggcttaagagtgaggttttgaaggtgactcttgcaactgacgtcgtgaactgagtgtgaatatctactggatgggcaagcaagtttccaaccccatgccctcccatcgattctgctgcctgatccggctagagtttattaggactcgcaactacctcggagttcactgctgtaaatatgggtaacaccctaccagtgcatgatatgtcggaatccacagcagccataggatctcccaacaaggaggatcttgcaacaatgacattgatcaagaattggatgttggaaattatggtttggcattgttacttctcttactcctgtttcatgtcccaatctgaggtgactcgtgttggtaatcatggcatctcagattgggagtgggaggaggatgaggagatgatttggtgctaccagggacaggccccatctcctagaaatggatcttcctcctttgcatgggcaacttgtgcatcgggctactcttcaccaacagaaaaccatcactgagaaagagcagttagcaactggtgttgtcgtgttgcgactcaaaagggcttgcctatgggcatccacataggagccatccccaaatgctgactgaccaaatgttcggtatgggagccacaaatagcagcacgatgggaatgcagcagcagcagcagcaaggggtatacgggaacatgcaggcaggtgcacagaacgtgcaaagtatggtgggccttcagaaccagacccagaatcccaacttcactcagcagattcaacaaaaccaacaatgattcaacactaacggtcatggaggttgaaagatgagcaatatagccatcgttttgctatttgtctgttggtctttactcagcttatctgtgagactgatagtagccccaggttgatagccttcgtttttctgtaaatcaatgtagatgcatcgccattagcgagatgcaggtcaattatatacgttgtaactgtgttttggatatgtgaatagtgttacgtgtgttccttttatttataattaagcctcgcagcaaggccgacaatcgaattgcatacgactagacgagtgggtggttcatcaggatgaaaattggtcatcaggtggaccctagaattatttgaggaactcacagatgtactgtaatatgtattccctgttgtctttctggataaatagcccaagatgttggcc

SEQ ID NO: 71856 - DNA, 2927 bp, Zea Mays
ccccgccccatccccgcataggtcgcgtctgcgccatcgccgcacgccatcacgtccgcagcccacatgctccaccctcgcccccctccccgccattctcggcgcaccgctcgccatccccataggccatcattgctagcgcgcccatgccccctgcccctgtcatcggcaccagaaaccgctcccctcgcacgccggccctagctggctagctcccaaatccgcccctccgcctcagatccctacggtgggatgcgagggaacgacaaccacgcggcctcccgtccttagagcctcaaatccgatgccccctccctaagccattccctcggccgcgacatcaacgaaaacgagcatggcccccctctacctcctccaccttgccgtttatggcctccgcactgccccaacgtcgacaccttcgtcctccccctctactcccagtgcaccgccgccgcgtatgcgctatcccacccgatggacgtgttgccgcctctgcagcacgccctgtcgctgtcgaccccacccagccatgcatttggagtttacaatgtggagacatgatttatccaccggacgacgaggttggtgcgcggatggcgagggaggacctccactgggcctactccacacctcttcctgtctaccgaggtcgagcacatggaggacctgctccgctgtcgggcactcctgagccagcgactacaaaatccactctggctctctacttcaccctccatattacaatatgtactttgtatatgtgagatgagacacccaagcagtcaaactaaacactattgtccaatcccctcttccaaattcattacaatcctattagcatgcaaagatttaatttgatgcaatgttttgatttgtactacgtttttactagctttgcagatgcttcagaaggttatggtcagtgacttttttcttttcagatttgttagaatagacacagaaatttagatttctctcctgtaatgttgttagcattggtcttaattttatttgttgttgttaggagaggatttgattatcatgatcagtacaagatatcaatcattaaatagcgaattcactctaatttctagccaccatttttctaagtaccatgttgctgctctctttccgctggatgaacatttgaacagtggcaccgaatagtgatcttatagtgctggcccgcaacacatggggtgcttctgttcttttacccattgaaatgttatggatcttttttctaatctaagattagaagtatggtcgtgatactattttgctataatctatgaatgtttttctgtaaaaaccaatctgtttttgctttagattaccaaactaaattgtctctatgcttttttgtgggtgattttgttggacccctacagccgtgatggcatgggaggctggcaagtcgattctttgtatatagttagtagtacaaaactatatgctatgagggtccagagaaattgatgatgaggagcagctagaggtcgtggtggagaagggctagagaaagggatgacgagggacagttgcaagttgtggtggagaagggcgacgaccccatgacaacatggggtgaatttctatatcagttgccaatcataagaaacaaatcttattattgcactccagggccagatgctattattgttggctatatcagacagtttgtcatcaagcctttgtctggattcctttttggcactcttatggagtactaagccacactgaagaatttgggcttaagagtgaggttttgaaggtgactcttgcaactgacgtcgtgaactgagtgtgaatatctactggatgggcaagcaagtttccaaccccatgccctcccatcgattctgctgcctgatccggctagagtttattaggactcgcaactacctcggagttcactgctgtaaatatgggtaacaccctaccagtgcatgatatgtcggaatccacagcagccataggatctcccaacaaggaggatcttgcaacaatgacattgatcaagaattggatgttggaaattatggtttggcattgttacttctcttactcctgtttcatgtcccaatctgagggcatctcagattgggagtgggaggaggatgaggagatgatttggtgctaccagggacaggccccatctcctagaaatggatcttcctcctttgcatgggcaacttgtgcatcgggctactcttcaccaacagaaaaccatcactgagaaagagcagttagcaactggtgttgtcgtgttgcgactcaaaagggcttgcctatgggcatccacataggagccatccccaaatgctgactgaccaaatgttcggtatgggagccacaaatagcagcacgatgggaatgcagcagcagcagcagcaaggggtatacgggaacatgcaggcaggtgcacagaacgtgcaaagtatggtgggccttcagaaccagacccagaatcccaacttcactcagcagattcaacaaaaccaacaatgattcaacactaacggtcatggaggttgaaagatgagcaatatagccatcgttttgctatttgtctgttggtctttactcagcttatctgtgagactgatagtagccccaggttgatagccttcgtttttctgtaaatcaatgtagatgcatcgccattagcgagatgcaggtcaattatatacgttgtaactgtgttttggatatgtgaatagtgttacgtgtgttccttttatttataattaagcctcgcagcaaggccgacaatcgaattgcatacgactagacgagtgggtggttcatcaggatgaaaattggtcatcaggtggaccctagaattatttgaggaactcacagatgtactgtaatatgtattccctgttgtctttctggataaatagcccaagatgttggcc

SEQ ID NO: 71857 - DNA, 2813 bp, Zea Mays
cgcataggtcgcgtctgcgccatcgccgcacgccatcacgtccgcagcccacatgctccaccctcgcccccctccccgccattctcggcgcaccgctcgccatccccataggccatcattgctagcgcgcccatgccccctgcccctgtcatcggcaccagaaaccgctcccctcgcacgccggccctagctggctagctcccaaatccgcccctccgcctcagatccctacggtgggatgcgagggaacgacaaccacgcggcctcccgtccttagagcctcaaatccgatgccccctccctaagccattccctcggccgcgacatcaacgaaaacgagcatggcccccctctacctcctccaccttgccgtttatggcctccgcactgccccaacgtcgacaccttcgtcctccccctctactcccagtgcaccgccgccgcgtatgcgctatcccacccgatggacgtgttgccgcctctgcagcacgccctgtcgctgtcgaccccacccagccatgcatttggagtttacaatgtggagacatgatttatccaccggacgacgaggttggtgcgcggatggcgagggaggacctccactgggcctactccacacctcttcctgtctaccgaggtcgagcacatggaggacctgctccgctgtcgggcactcctgagccagcgactacaaaatccactctggctctctacttcaccctccatattacaatatgtactttgtatatgtgagatgagacacccaagcagtcaaactaaacactattgtccaatcccctcttccaaattcattacaatcctattagcatgcaaagatttaatttgatgcaatgttttgatttgtactacgtttttactagctttgcagatgcttcagaaggttatggtcagtgacttttttcttttcagatttgttagaatagacacagaaatttagatttctctcctgtaatgttgttagcattggtcttaattttatttgttgttgttaggagaggatttgattatcatgatcagtacaagatatcaatcattaaatagcgaattcactctaatttctagccaccatttttctaagtaccatgttgctgctctctttccgctggatgaacatttgaacagtggcaccgaatagtgatcttatagtgctggcccgcaacacatggggtgcttctgttcttttacccattgaaatgttatggatcttttttctaatctaagattagaagtatggtcgtgatactattttgctataatctatgaatgtttttctgtaaaaaccaatctgtttttgctttagattaccaaactaaattgtctctatgcttttttgtgggtgattttgttggacccctacagccgtgatggcatgggaggctggcaagtcgattctttgtatatagttagtagtacaaaactatatgctatgagggtccagagaaattgatgatgaggagcagctagaggtcgtggtggagaagggctagagaaagggatgacgagggacagttgcaagttgtggtggagaagggcgacgaccccatgacaacatggggtgaatttctatatcagttgccaatcataagaaacaaatcttattattgcactccagggccagatgctattattgttggctatatcagacagtttgtcatcaagcctttgtctggattcctttttggcactcttatggagtactaagccacactgaagaatttgggcttaagagtgaggttttgaaggtgactcttgcaactgacgtcgtgaactgagtgtgaatatctactggatgggcaagcaagtttccaaccccatgccctcccatcgattctgctgcctgatccggctagagtttattaggactcgcaactacctcggagttcactgctgtaaatatgggtaacaccctaccagtgcatgatatgtcggaatccacagcagccataggatctcccaacaaggaggatcttgcaacaatgacattgatcaagaattggatgttggaaattatggtttggcattgttacttctcttactcctgtttcatgtcccaatctgaggtgactcgtgttgggcatctcagattgggagtgggaggaggatgaggagatgatttggtgctaccagggacaggccccatctcctagaaatggatcttcctcctttgcatgggcaacttgtgcatcgggctactcttcaccaacagtgttcggtatgggagccacaaatagcagcacgatgggaatgcagcagcagcagcagcaaggggtatacgggaacatgcaggcaggtgcacagaacgtgcaaagtatggtgggccttcagaaccagacccagaatcccaacttcactcagcagattcaacaaaaccaacaatgattcaacactaacggtcatggaggttgaaagatgagcaatatagccatcgttttgctatttgtctgttggtctttactcagcttatctgtgagactgatagtagccccaggttgatagccttcgtttttctgtaaatcaatgtagatgcatcgccattagcgagatgcaggtcaattatatacgttgtaactgtgttttggatatgtgaatagtgttacgtgtgttccttttatttataattaagcctcgcagcaaggccgacaatcgaattgcatacgactagacgagtgggtggttcatcaggatgaaaattggtcatcaggtggaccctagaattatttgaggaactcacagatgtactgtaatatgtattccctgttgtctttctggataaatagcccaagatgttggcc

SEQ ID NO: 71858 - DNA, 2798 bp, Zea Mays
cataggtcgcgtctgcgccatcgccgcacgccatcacgtccgcagcccacatgctccaccctcgcccccctccccgccattctcggcgcaccgctcgccatccccataggccatcattgctagcgcgcccatgccccctgcccctgtcatcggcaccagaaaccgctcccctcgcacgccggccctagctggctagctcccaaatccgcccctccgcctcagatccctacggtgggatgcgagggaacgacaaccacgcggcctcccgtccttagagcctcaaatccgatgccccctccctaagccattccctcggccgcgacatcaacgaaaacgagcatggcccccctctacctcctccaccttgccgtttatggcctccgcactgccccaacgtcgacaccttcgtcctccccctctactcccagtgcaccgccgccgcgtatgcgctatcccacccgatggacgtgttgccgcctctgcagcacgccctgtcgctgtcgaccccacccagccatgcatttggagtttacaatgtggagacatgatttatccaccggacgacgaggttggtgcgcggatggcgagggaggacctccactgggcctactccacacctcttcctgtctaccgaggtcgagcacatggaggacctgctccgctgtcgggcactcctgagccagcgactacaaaatccactctggctctctacttcaccctccatattacaatatgtactttgtatatgtgagatgagacacccaagcagtcaaactaaacactattgtccaatcccctcttccaaattcattacaatcctattagcatgcaaagatttaatttgatgcaatgttttgatttgtactacgtttttactagctttgcagatgcttcagaaggttatggtcagtgacttttttcttttcagatttgttagaatagacacagaaatttagatttctctcctgtaatgttgttagcattggtcttaattttatttgttgttgttaggagaggatttgattatcatgatcagtacaagatatcaatcattaaatagcgaattcactctaatttctagccaccatttttctaagtaccatgttgctgctctctttccgctggatgaacatttgaacagtggcaccgaatagtgatcttatagtgctggcccgcaacacatggggtgcttctgttcttttacccattgaaatgttatggatcttttttctaatctaagattagaagtatggtcgtgatactattttgctataatctatgaatgtttttctgtaaaaaccaatctgtttttgctttagattaccaaactaaattgtctctatgcttttttgtgggtgattttgttggacccctacagccgtgatggcatgggaggctggcaagtcgattctttgtatatagttagtagtacaaaactatatgctatgagggtccagagaaattgatgatgaggagcagctagaggtcgtggtggagaagggctagagaaagggatgacgagggacagttgcaagttgtggtggagaagggcgacgaccccatgacaacatggggtgaatttctatatcagttgccaatcataagaaacaaatcttattattgcactccagggccagatgctattattgttggctatatcagacagtttgtcatcaagcctttgtctggattcctttttggcactcttatggagtactaagccacactgaagaatttgggcttaagagtgaggttttgaaggtgactcttgcaactgacgtcgtgaactgagtgtgaatatctactggatgggcaagcaagtttccaaccccatgccctcccatcgattctgctgcctgatccggctagagtttattaggactcgcaactacctcggagttcactgctgtaaatatgggtaacaccctaccagtgcatgatatgtcggaatccacagcagccataggatctcccaacaaggaggatcttgcaacaatgacattgatcaagaattggatgttggaaattatggtttggcattgttacttctcttactcctgtttcatgtcccaatctgagggcatctcagattgggagtgggaggaggatgaggagatgatttggtgctaccagggacaggccccatctcctagaaatggatcttcctcctttgcatgggcaacttgtgcatcgggctactcttcaccaacagtgttcggtatgggagccacaaatagcagcacgatgggaatgcagcagcagcagcagcaaggggtatacgggaacatgcaggcaggtgcacagaacgtgcaaagtatggtgggccttcagaaccagacccagaatcccaacttcactcagcagattcaacaaaaccaacaatgattcaacactaacggtcatggaggttgaaagatgagcaatatagccatcgttttgctatttgtctgttggtctttactcagcttatctgtgagactgatagtagccccaggttgatagccttcgtttttctgtaaatcaatgtagatgcatcgccattagcgagatgcaggtcaattatatacgttgtaactgtgttttggatatgtgaatagtgttacgtgtgttccttttatttataattaagcctcgcagcaaggccgacaatcgaattgcatacgactagacgagtgggtggttcatcaggatgaaaattggtcatcaggtggaccctagaattatttgaggaactcacagatgtactgtaatatgtattccctgttgtctttctggataaatagcccaagatgttggcc

SEQ ID NO: 71859 - DNA, 2788 bp, Zea Mays
cataggtcgcgtctgcgccatcgccgcacgccatcacgtccgcagcccacatgctccaccctcgcccccctccccgccattctcggcgcaccgctcgccatccccataggccatcattgctagcgcgcccatgccccctgcccctgtcatcggcaccagaaaccgctcccctcgcacgccggccctagctggctagctcccaaatccgcccctccgcctcagatccctacggtgggatgcgagggaacgacaaccacgcggcctcccgtccttagagcctcaaatccgatgccccctccctaagccattccctcggccgcgacatcaacgaaaacgagcatggcccccctctacctcctccaccttgccgtttatggcctccgcactgccccaacgtcgacaccttcgtcctccccctctactcccagtgcaccgccgccgcgtatgcgctatcccacccgatggacgtgttgccgcctctgcagcacgccctgtcgctgtcgaccccacccagccatgcatttggagtttacaatgtggagacatgatttatccaccggacgacgaggttggtgcgcggatggcgagggaggacctccactgggcctactccacacctcttcctgtctaccgaggtcgagcacatggaggacctgctccgctgtcgggcactcctgagccagcgactacaaaatccactctggctctctacttcaccctccatattacaatatgtactttgtatatgtgagatgagacacccaagcagtcaaactaaacactattgtccaatcccctcttccaaattcattacaatcctattagcatgcaaagatttaatttgatgcaatgttttgatttgtactacgtttttactagctttgcagatgcttcagaaggttatggtcagtgacttttttcttttcagatttgttagaatagacacagaaatttagatttctctcctgtaatgttgttagcattggtcttaattttatttgttgttgttaggagaggatttgattatcatgatcagtacaagatatcaatcattaaatagcgaattcactctaatttctagccaccatttttctaagtaccatgttgctgctctctttccgctggatgaacatttgaacagtggcaccgaatagtgatcttatagtgctggcccgcaacacatggggtgcttctgttcttttacccattgaaatgttatggatcttttttctaatctaagattagaagtatggtcgtgatactattttgctataatctatgaatgtttttctgtaaaaaccaatctgtttttgctttagattaccaaactaaattgtctctatgcttttttgtgggtgattttgttggacccctacagccgtgatggcatgggaggctggcaagtcgattctttgtatatagttagtagtacaaaactatatgctatgagggtccagagaaattgatgatgaggagcagctagaggtcgtggtggagaagggctagagaaagggatgacgagggacagttgcaagttgtggtggagaagggcgacgaccccatgacaacatggggtgaatttctatatcagttgccaatcataagaaacaaatcttattattgcactccagacagtttgtcatcaagcctttgtctggattcctttttggcactcttatggagtactaagccacactgaagaatttgggcttaagagtgaggttttgaaggtgactcttgcaactgacgtcgtgaactgagtgtgaatatctactggatgggcaagcaagtttccaaccccatgccctcccatcgattctgctgcctgatccggctagagtttattaggactcgcaactacctcggagttcactgctgtaaatatgggtaacaccctaccagtgcatgatatgtcggaatccacagcagccataggatctcccaacaaggaggatcttgcaacaatgacattgatcaagaattggatgttggaaattatggtttggcattgttacttctcttactcctgtttcatgtcccaatctgaggtgactcgtgttggtaatcatggcatctcagattgggagtgggaggaggatgaggagatgatttggtgctaccagggacaggccccatctcctagaaatggatcttcctcctttgcatgggcaacttgtgcatcgggctactcttcaccaacagtgttcggtatgggagccacaaatagcagcacgatgggaatgcagcagcagcagcagcaaggggtatacgggaacatgcaggcaggtgcacagaacgtgcaaagtatggtgggccttcagaaccagacccagaatcccaacttcactcagcagattcaacaaaaccaacaatgattcaacactaacggtcatggaggttgaaagatgagcaatatagccatcgttttgctatttgtctgttggtctttactcagcttatctgtgagactgatagtagccccaggttgatagccttcgtttttctgtaaatcaatgtagatgcatcgccattagcgagatgcaggtcaattatatacgttgtaactgtgttttggatatgtgaatagtgttacgtgtgttccttttatttataattaagcctcgcagcaaggccgacaatcgaattgcatacgactagacgagtgggtggttcatcaggatgaaaattggtcatcaggtggaccctagaattatttgaggaactcacagatgtactgtaatatgtattccctgttgtctttctggataaatagcccaagatgttggcc

SEQ ID NO: 71860 - DNA, 2267 bp, Zea Mays
cataggtcgcgtctgcgccatcgccgcacgccatcacgtccgcagcccacatgctccaccctcgcccccctccccgccattctcggcgcaccgctcgccatccccataggccatcattgctagcgcgcccatgccccctgcccctgtcatcggcaccagaaaccgctcccctcgcacgccggccctagctggctagctcccaaatccgcccctccgcctcagatccctacggtgggatgcgagggaacgacaaccacgcggcctcccgtccttagagcctcaaatccgatgccccctccctaagccattccctcggccgcgacatcaacgaaaacgagcatggcccccctctacctcctccaccttgccgtttatggcctccgcactgccccaacgtcgacaccttcgtcctccccctctactcccagtgcaccgccgccgcgtatgcgctatcccacccgatggacgtgttgccgcctctgcagcacgccctgtcgctgtcgaccccacccagccatgcatttggagtttacaatgtggagacatgatttatccaccggacgacgaggttggtgcgcggatggcgagggaggacctccactgggcctactccacacctcttcctgtctaccgaggtcgagcacatggaggacctgctccgctgtcgggcactcctgagccagcgactacaaaatccactctggctctctacttcaccctccatattacaatatgtactttgtatatgtgagatgagacacccaagcagtcaaactaaacactattgtccaatcccctcttccaaattcattacaatcctattagcatgcaaagatttaatttgatgcaatgttttgatttgtactacgtttttactagctttgcagatgcttcagaaggttatgccgtgatggcatgggaggctggcaagtcgattctttgtatatagttagtagtacaaaactatatgctatgagggtccagagaaattgatgatgaggagcagctagaggtcgtggtggagaagggctagagaaagggatgacgagggacagttgcaagttgtggtggagaagggcgacgaccccatgacaacatggggtgaatttctatatcagttgccaatcataagaaacaaatcttattattgcactccagggccagatgctattattgttggctatatcagacagtttgtcatcaagcctttgtctggattcctttttggcactcttatggagtactaagccacactgaagaatttgggcttaagagtgaggttttgaaggtgactcttgcaactgacgtcgtgaactgagtgtgaatatctactggatgggcaagcaagtttccaaccccatgccctcccatcgattctgctgcctgatccggctagagtttattaggactcgcaactacctcggagttcactgctgtaaatatgggtaacaccctaccagtgcatgatatgtcggaatccacagcagccataggatctcccaacaaggaggatcttgcaacaatgacattgatcaagaattggatgttggaaattatgattgggagtgggaggaggatgaggagatgatttggtgctaccagggacaggccccatctcctagaaatggatcttcctcctttgcatgggcaacttgtgcatcgggctactcttcaccaacagtgttcggtatgggagccacaaatagcagcacgatgggaatgcagcagcagcagcagcaaggggtatacgggaacatgcaggcaggtgcacagaacgtgcaaagtatggtgggccttcagaaccagacccagaatcccaacttcactcagcagattcaacaaaaccaacaatgattcaacactaacggtcatggaggttgaaagatgagcaatatagccatcgttttgctatttgtctgttggtctttactcagcttatctgtgagactgatagtagccccaggttgatagccttcgtttttctgtaaatcaatgtagatgcatcgccattagcgagatgcaggtcaattatatacgttgtaactgtgttttggatatgtgaatagtgttacgtgtgttccttttatttataattaagcctcgcagcaaggccgacaatcgaattgcatacgactagacgagtgggtggttcatcaggatgaaaattggtcatcaggtggaccctagaattatttgaggaactcacagatgtactgtaatatgtattccctgttgtctttctggataaatagcccaagatgttggcc

SEQ ID NO: 71861 - DNA, 2938 bp, Zea Mays
cataggtcgcgtctgcgccatcgccgcacgccatcacgtccgcagcccacatgctccaccctcgcccccctccccgccattctcggcgcaccgctcgccatccccataggccatcattgctagcgcgcccatgccccctgcccctgtcatcggcaccagaaaccgctcccctcgcacgccggccctagctggctagctcccaaatccgcccctccgcctcagatccctacggtgggatgcgagggaacgacaaccacgcggcctcccgtccttagagcctcaaatccgatgccccctccctaagccattccctcggccgcgacatcaacgaaaacgagcatggcccccctctacctcctccaccttgccgtttatggcctccgcactgccccaacgtcgacaccttcgtcctccccctctactcccagtgcaccgccgccgcgtatgcgctatcccacccgatggacgtgttgccgcctctgcagcacgccctgtcgctgtcgaccccacccagccatgcatttggagtttacaatgtggagacatgatttatccaccggacgacgaggttggtgcgcggatggcgagggaggacctccactgggcctactccacacctcttcctgtctaccgaggtcgagcacatggaggacctgctccgctgtcgggcactcctgagccagcgactacaaaatccactctggctctctacttcaccctccatattacaatatgtactttgtatatgtgagatgagacacccaagcagtcaaactaaacactattgtccaatcccctcttccaaattcattacaatcctattagcatgcaaagatttaatttgatgcaatgttttgatttgtactacgtttttactagctttgcagatgcttcagaaggttatggtcagtgacttttttcttttcagatttgttagaatagacacagaaatttagatttctctcctgtaatgttgttagcattggtcttaattttatttgttgttgttaggagaggatttgattatcatgatcagtacaagatatcaatcattaaatagcgaattcactctaatttctagccaccatttttctaagtaccatgttgctgctctctttccgctggatgaacatttgaacagtggcaccgaatagtgatcttatagtgctggcccgcaacacatggggtgcttctgttcttttacccattgaaatgttatggatcttttttctaatctaagattagaagtatggtcgtgatactattttgctataatctatgaatgtttttctgtaaaaaccaatctgtttttgctttagattaccaaactaaattgtctctatgcttttttgtgggtgattttgttggacccctacagccgtgatggcatgggaggctggcaagtcgattctttgtatatagttagtagtacaaaactatatgctatgagggtccagagaaattgatgatgaggagcagctagaggtcgtggtggagaagggctagagaaagggatgacgagggacagttgcaagttgtggtggagaagggcgacgaccccatgacaacatggggtgaatttctatatcagttgccaatcataagaaacaaatcttattattgcactccagggccagatgctattattgttggctatatcagacagtttgtcatcaagcctttgtctggattcctttttggcactcttatggagtactaagccacactgaagaatttgggcttaagagtgaggttttgaaggtgactcttgcaactgacgtcgtgaactgagtgtgaatatctactggatgggcaagcaagtttccaaccccatgccctcccatcgattctgctgcctgatccggctagagtttattaggactcgcaactacctcggagttcactgctgtaaatatgggtaacaccctaccagtgcatgatatgtcggaatccacaggtgcagcagccataggatctcccaacaaggaggatcttgcaacaatgacattgatcaagaattggatgttggaaattatggtttggcattgttacttctcttactcctgtttcatgtcccaatctgaggtgactcgtgttggtaatcatggcatctcagattgggagtgggaggaggatgaggagatgatttggtgctaccagggacaggccccatctcctagaaatggatcttcctcctttgcatgggcaacttgtgcatcgggctactcttcaccaacagaaaaccatcactgagaaagagcagttagcaactggtgttgtcgtgttgcgactcaaaagggcttgcctatgggcatccacataggagccatccccaaatgctgactgaccaaatgttcggtatgggagccacaaatagcagcacgatgggaatgcagcagcagcagcagcaaggggtatacgggaacatgcaggcaggtgcacagaacgtgcaaagtatggtgggccttcagaaccagacccagaatcccaacttcactcagcagattcaacaaaaccaacaatgattcaacactaacggtcatggaggttgaaagatgagcaatatagccatcgttttgctatttgtctgttggtctttactcagcttatctgtgagactgatagtagccccaggttgatagccttcgtttttctgtaaatcaatgtagatgcatcgccattagcgagatgcaggtcaattatatacgttgtaactgtgttttggatatgtgaatagtgttacgtgtgttccttttatttataattaagcctcgcagcaaggccgacaatcgaattgcatacgactagacgagtgggtggttcatcaggatgaaaattggtcatcaggtggaccctagaattatttgaggaactcacagatgtactgtaatatgtattccctgttgtctttctggataaatagcccaagatgttggcc

SEQ ID NO: 71862 - DNA, 2819 bp, Zea Mays
cataggtcgcgtctgcgccatcgccgcacgccatcacgtccgcagcccacatgctccaccctcgcccccctccccgccattctcggcgcaccgctcgccatccccataggccatcattgctagcgcgcccatgccccctgcccctgtcatcggcaccagaaaccgctcccctcgcacgccggccctagctggctagctcccaaatccgcccctccgcctcagatccctacggtgggatgcgagggaacgacaaccacgcggcctcccgtccttagagcctcaaatccgatgccccctccctaagccattccctcggccgcgacatcaacgaaaacgagcatggcccccctctacctcctccaccttgccgtttatggcctccgcactgccccaacgtcgacaccttcgtcctccccctctactcccagtgcaccgccgccgcgtatgcgctatcccacccgatggacgtgttgccgcctctgcagcacgccctgtcgctgtcgaccccacccagccatgcatttggagtttacaatgtggagacatgatttatccaccggacgacgaggttggtgcgcggatggcgagggaggacctccactgggcctactccacacctcttcctgtctaccgaggtcgagcacatggaggacctgctccgctgtcgggcactcctgagccagcgactacaaaatccactctggctctctacttcaccctccatattacaatatgtactttgtatatgtgagatgagacacccaagcagtcaaactaaacactattgtccaatcccctcttccaaattcattacaatcctattagcatgcaaagatttaatttgatgcaatgttttgatttgtactacgtttttactagctttgcagatgcttcagaaggttatggtcagtgacttttttcttttcagatttgttagaatagacacagaaatttagatttctctcctgtaatgttgttagcattggtcttaattttatttgttgttgttaggagaggatttgattatcatgatcagtacaagatatcaatcattaaatagcgaattcactctaatttctagccaccatttttctaagtaccatgttgctgctctctttccgctggatgaacatttgaacagtggcaccgaatagtgatcttatagtgctggcccgcaacacatggggtgcttctgttcttttacccattgaaatgttatggatcttttttctaatctaagattagaagtatggtcgtgatactattttgctataatctatgaatgtttttctgtaaaaaccaatctgtttttgctttagattaccaaactaaattgtctctatgcttttttgtgggtgattttgttggacccctacagccgtgatggcatgggaggctggcaagtcgattctttgtatatagttagtagtacaaaactatatgctatgagggtccagagaaattgatgatgaggagcagctagaggtcgtggtggagaagggctagagaaagggatgacgagggacagttgcaagttgtggtggagaagggcgacgaccccatgacaacatggggtgaatttctatatcagttgccaatcataagaaacaaatcttattattgcactccagggccagatgctattattgttggctatatcagacagtttgtcatcaagcctttgtctggattcctttttggcactcttatggagtactaagccacactgaagaatttgggcttaagagtgaggttttgaaggtgactcttgcaactgacgtcgtgaactgagtgtgaatatctactggatgggcaagcaagtttccaaccccatgccctcccatcgattctgctgcctgatccggctagagtttattaggactcgcaactacctcggagttcactgctgtaaatatgggtaacaccctaccagtgcatgatatgtcggaatccacagcagccataggatctcccaacaaggaggatcttgcaacaatgacattgatcaagaattggatgttggaaattatggtttggcattgttacttctcttactcctgtttcatgtcccaatctgaggtgactcgtgttggtaatcatggcatctcagattgggagtgggaggaggatgaggagatgatttggtgctaccagggacaggccccatctcctagaaatggatcttcctcctttgcatgggcaacttgtgcatcgggctactcttcaccaacagtgttcggtatgggagccacaaatagcagcacgatgggaatgcagcagcagcagcagcaaggggtatacgggaacatgcaggcaggtgcacagaacgtgcaaagtatggtgggccttcagaaccagacccagaatcccaacttcactcagcagattcaacaaaaccaacaatgattcaacactaacggtcatggaggttgaaagatgagcaatatagccatcgttttgctatttgtctgttggtctttactcagcttatctgtgagactgatagtagccccaggttgatagccttcgtttttctgtaaatcaatgtagatgcatcgccattagcgagatgcaggtcaattatatacgttgtaactgtgttttggatatgtgaatagtgttacgtgtgttccttttatttataattaagcctcgcagcaaggccgacaatcgaattgcatacgactagacgagtgggtggttcatcaggatgaaaattggtcatcaggtggaccctagaattatttgaggaactcacagatgtactgtaatatgtattccctgttgtctttctggataaatagcccaagatgttggcc

SEQ ID NO: 71863 - DNA, 2613 bp, Zea Mays
aggtcgcgtctgcgccatcgccgcacgccatcacgtccgcagcccacatgctccaccctcgcccccctccccgccattctcggcgcaccgctcgccatccccataggccatcattgctagcgcgcccatgccccctgcccctgtcatcggcaccagaaaccgctcccctcgcacgccggccctagctggctagctcccaaatccgcccctccgcctcagatccctacggtgggatgcgagggaacgacaaccacgcggcctcccgtccttagagcctcaaatccgatgccccctccctaagccattccctcggccgcgacatcaacgaaaacgagcatggcccccctctacctcctccaccttgccgtttatggcctccgcactgccccaacgtcgacaccttcgtcctccccctctactcccagtgcaccgccgccgcgtatgcgctatcccacccgatggacgtgttgccgcctctgcagcacgccctgtcgctgtcgaccccacccagccatgcatttggagtttacaatgtggagacatgatttatccaccggacgacgaggttggtgcgcggatggcgagggaggacctccactgggcctactccacacctcttcctgtctaccgaggtcgagcacatggaggacctgctccgctgtcgggcactcctgagccagcgactacaaaatccactctggctctctacttcaccctccatattacaatatgtactttgtatatgtgagatgagacacccaagcagtcaaactaaacactattgtccaatcccctcttccaaattcattacaatcctattagcatgcaaagatttaatttgatgcaatgttttgatttgtactacgtttttactagctttgcagatgcttcagaaggttatgccgtgatggcatgggaggctggcaagtcgattctttgtatatagttagtagtacaaaactatatgctatgagggtccagagaaattgatgatgaggagcagctagaggtcgtggtggagaagggctagagaaagggatgacgagggacagttgcaagttgtggtggagaagggcgacgaccccatgacaacatggggtgaatttctatatcagttgccaatcataagaaacaaatcttattattgcactccagcaataaaagggccagatgctattattgttggctatatcagacagtttgtcatcaagcctttgtctggattcctttttggcactcttatggagtactaagccacactgaagaatttgggcttaagagtgaggttttgaaggtgactcttgcaactgacgtcgtgaactgagtgtgaatatctactggatgggcaagcaagtttccaaccccatgccctcccatcgattctgctgcctgatccggctagagtttattaggactcgcaactacctcggagttcactgctgtaaatatgggtaacaccctaccagtgcatgatatgtcggaatccacagcagccataggatctcccaacaaggaggatcttgcaacaatgacattgatcaagaattggatgttggaaattatggtttggcattgttacttctcttactcctgtttcatgtcccaatctgaggtgactcgtgttggtaatcatgtaatttttccttcgtgcttctattcttcctatacgctttaggcatggcatgttgtgcactaacattttgattaacaatacaacacatggtcatacatatggtattgttgcactatttttttgttgcaacgcacgggtattcaaccagggcatctcagattgggagtgggaggaggatgaggagatgatttggtgctaccagggacaggccccatctcctagaaatggatcttcctcctttgcatgggcaacttgtgcatcgggctactcttcaccaacagaaaaccatcactgagaaagagcagttagcaactggtgttgtcgtgttgcgactcaaaagggcttgcctatgggcatccacataggagccatccccaaatgctgactgaccaaatgttcggtatgggagccacaaatagcagcacgatgggaatgcagcagcagcagcagcaaggggtatacgggaacatgcaggcaggtgcacagaacgtgcaaagtatggtgggccttcagaaccagacccagaatcccaacttcactcagcagattcaacaaaaccaacaatgattcaacactaacggtcatggaggttgaaagatgagcaatatagccatcgttttgctatttgtctgttggtctttactcagcttatctgtgagactgatagtagccccaggttgatagccttcgtttttctgtaaatcaatgtagatgcatcgccattagcgagatgcaggtcaattatatacgttgtaactgtgttttggatatgtgaatagtgttacgtgtgttccttttatttataattaagcctcgcagcaaggccgacaatcgaattgcatacgactagacgagtgggtggttcatcaggatgaaaattggtcatcaggtggaccctagaattatttgaggaactcacagatgtactgtaatatgtattccctgttgtctttctggataaatagcccaagatgttggcc

SEQ ID NO: 71864 - DNA, 2993 bp, Zea Mays
aggtcgcgtctgcgccatcgccgcacgccatcacgtccgcagcccacatgctccaccctcgcccccctccccgccattctcggcgcaccgctcgccatccccataggccatcattgctagcgcgcccatgccccctgcccctgtcatcggcaccagaaaccgctcccctcgcacgccggccctagctggctagctcccaaatccgcccctccgcctcagatccctacggtgggatgcgagggaacgacaaccacgcggcctcccgtccttagagcctcaaatccgatgccccctccctaagccattccctcggccgcgacatcaacgaaaacgagcatggcccccctctacctcctccaccttgccgtttatggcctccgcactgccccaacgtcgacaccttcgtcctccccctctactcccagtgcaccgccgccgcgtatgcgctatcccacccgatggacgtgttgccgcctctgcagcacgccctgtcgctgtcgaccccacccagccatgcatttggagtttacaatgtggagacatgatttatccaccggacgacgaggttggtgcgcggatggcgagggaggacctccactgggcctactccacacctcttcctgtctaccgaggtcgagcacatggaggacctgctccgctgtcgggcactcctgagccagcgactacaaaatccactctggctctctacttcaccctccatattacaatatgtactttgtatatgtgagatgagacacccaagcagtcaaactaaacactattgtccaatcccctcttccaaattcattacaatcctattagcatgcaaagatttaatttgatgcaatgttttgatttgtactacgtttttactagctttgcagatgcttcagaaggttatggtcagtgacttttttcttttcagatttgttagaatagacacagaaatttagatttctctcctgtaatgttgttagcattggtcttaattttatttgttgttgttaggagaggatttgattatcatgatcagtacaagatatcaatcattaaatagcgaattcactctaatttctagccaccatttttctaagtaccatgttgctgctctctttccgctggatgaacatttgaacagtggcaccgaatagtgatcttatagtgctggcccgcaacacatggggtgcttctgttcttttacccattgaaatgttatggatcttttttctaatctaagattagaagtatggtcgtgatactattttgctataatctatgaatgtttttctgtaaaaaccaatctgtttttgctttagattaccaaactaaattgtctctatgcttttttgtgggtgattttgttggacccctacagccgtgatggcatgggaggctggcaagtcgattctttgtatatagttagtagtacaaaactatatgctatgagggtccagagaaattgatgatgaggagcagctagaggtcgtggtggagaagggctagagaaagggatgacgagggacagttgcaagttgtggtggagaagggcgacgaccccatgacaacatggggtgaatttctatatcagttgccaatcataagaaacaaatcttattattgcactccagcaataaaagggccagatgctattattgttggctatatcagacagtttgtcatcaagcctttgtctggattcctttttggcactcttatggagtactaagccacactgaagaatttgggcttaagagtgaggttttgaaggtgactcttgcaactgacgtcgtgaactgagtgtgaatatctactggatgggcaagcaagtttccaaccccatgccctcccatcgattctgctgcctgatccggctagagtttattaggactcgcaactacctcggagttcactgctgtaaatatgggtaacaccctaccagtgcatgatatgtcggaatccacaggtaaaatcgaatctatgttgcttcaaaagttactcccttttgtctgttcttggctagaacaaggtctggtcaaaataagaatgttttttgttccattttagttggagtttgggttttcaaatctgggccagattagttggatttaataatttggtttctaaggtgcagcagccataggatctcccaacaaggaggatcttgcaacaatgacattgatcaagaattggatgttggaaattatggtttggcattgttacttctcttactcctgtttcatgtcccaatctgaggtgactcgtgttggtaatcatggcatctcagattgggagtgggaggaggatgaggagatgatttggtgctaccagggacaggccccatctcctagaaatggatcttcctcctttgcatgggcaacttgtgcatcgggctactcttcaccaacagtgttcggtatgggagccacaaatagcagcacgatgggaatgcagcagcagcagcagcaaggggtatacgggaacatgcaggcaggtgcacagaacgtgcaaagtatggtgggccttcagaaccagacccagaatcccaacttcactcagcagattcaacaaaaccaacaatgattcaacactaacggtcatggaggttgaaagatgagcaatatagccatcgttttgctatttgtctgttggtctttactcagcttatctgtgagactgatagtagccccaggttgatagccttcgtttttctgtaaatcaatgtagatgcatcgccattagcgagatgcaggtcaattatatacgttgtaactgtgttttggatatgtgaatagtgttacgtgtgttccttttatttataattaagcctcgcagcaaggccgacaatcgaattgcatacgactagacgagtgggtggttcatcaggatgaaaattggtcatcaggtggaccctagaattatttgaggaactcacagatgtactgtaatatgtattccctgttgtctttctggataaatagcccaagatgttggcc

SEQ ID NO: 71865 - DNA, 2195 bp, Zea Mays
cccgtccttagagcctcaaatccgatgccccctccctaagccattccctcggccgcgacatcaacgaaaacgagcatggcccccctctacctcctccaccttgccgtttatggcctccgcactgccccaacgtcgacaccttcgtcctccccctctactcccagtgcaccgccgccgcgtatgcgctatcccacccgatggacgtgttgccgcctctgcagcacgccctgtcgctgtcgaccccacccagccatgcatttggagtttacaatgtggagacatgatttatccaccggacgacgaggttggtgcgcggatggcgagggaggacctccactgggcctactccacacctcttcctgtctaccgaggtcgagcacatggaggacctgctccgctgtcgggcactcctgagccagcgactacaaaatccactctggctctctacttcaccctccatattacaatatgtactttgtatatgtgagatgagacacccaagcagtcaaactaaacactattgtccaatcccctcttccaaattcattacaatcctattagcatgcaaagatttaatttgatgcaatgttttgatttgtactacgtttttactagctttgcagatgcttcagaaggttatgccgtgatggcatgggaggctggcaagtcgattctttgtatatagttagtagtacaaaactatatgctatgagggtccagagaaattgatgatgaggagcagctagaggtcgtggtggagaagggctagagaaagggatgacgagggacagttgcaagttgtggtggagaagggcgacgaccccatgacaacatggggtgaatttctatatcagttgccaatcataagaaacaaatcttattattgcactccagggccagatgctattattgttggctatatcagacagtttgtcatcaagcctttgtctggattcctttttggcactcttatggagtactaagccacactgaagaatttgggcttaagagtgaggttttgaaggtgactcttgcaactgacgtcgtgaactgagtgtgaatatctactggatgggcaagcaagtttccaaccccatgccctcccatcgattctgctgcctgatccggctagagtttattaggactcgcaactacctcggagttcactgctgtaaatatgggtaacaccctaccagtgcatgatatgtcggaatccacagcagccataggatctcccaacaaggaggatcttgcaacaatgacattgatcaagaattggatgttggaaattatggtttggcattgttacttctcttactcctgtttcatgtcccaatctgaggtgactcgtgttggtaatcatggcatctcagattgggagtgggaggaggatgaggagatgatttggtgctaccagggacaggccccatctcctagaaatggatcttcctcctttgcatgggcaacttgtgcatcgggctactcttcaccaacagaaaaccatcactgagaaagagcagttagcaactggtgttgtcgtgttgcgactcaaaagggcttgcctatgggcatccacataggagccatccccaaatgctgactgaccaaatgttcggtatgggagccacaaatagcagcacgatgggaatgcagcagcagcagcagcaaggggtatacgggaacatgcaggcaggtgcacagaacgtgcaaagtatggtgggccttcagaaccagacccagaatcccaacttcactcagcagattcaacaaaaccaacaatgattcaacactaacggtcatggaggttgaaagatgagcaatatagccatcgttttgctatttgtctgttggtctttactcagcttatctgtgagactgatagtagccccaggttgatagccttcgtttttctgtaaatcaatgtagatgcatcgccattagcgagatgcaggtcaattatatacgttgtaactgtgttttggatatgtgaatagtgttacgtgtgttccttttatttataattaagcctcgcagcaaggccgacaatcgaattgcatacgactagacgagtgggtggttcatcaggatgaaaattggtcatcaggtggaccctagaattatttgaggaactcacagatgtactgtaatatgtattccctgttgtctttctggataaatagcccaagatgttggcc

SEQ ID NO: 71866 - DNA, 1302 bp, Zea Mays
gcttgtgttccctccgcccagaactcccgaaaccagcccaacaccaaagctcattccacgaggcgacaaccttccttccataagaacagagcggccacgctgaggagtgaggaggaaggtaggaggagaaccgtgagcagagagacatggcgcgccaccaccagcagcgggcgctgctcctgttcccactcgtcttcctcctcctcctccttgccccgcccctcgccggcgcgtggggaaaggagggccacatcatggtctgcaagatcgccgaggtcgcgcccgattccgccctatgaaaaagtacctgtcggagaaggcggcggcggcggtgcaggcgctgctgccggagtcggcgggcggggagctgtcgacggtgtgcccgtgggcggaccaggtgcgctggcactaccactgggccagcccgctccactacgccaacaccccccaagtctgcaacttcaagtattctcgggactgccacaattctcgtggccagcaagggatgtgcgtcgtcggggctatcaacaactacacggaccagctctacagctacggccagaagacttcgtataacctgacggagagcctgatgttcctggcacacttcgtcggcgacgtccaccagccgctgcacgtaggcttccaagatgacgagggcggtaacaccatcaccgtccactggtaccggaggaaagcaaacctccatcacgtgtgggatgtcagcattattgatacggcgatcaaggacttctacaacaagagcatggataccatggtagaggctctcaagatgaatcttacagatggatggtctgacgacatcgtccactgggaaaattgcaagaacaaacacgcgacctgcgcgaacgactatgcgattgagagcatccattattcctgcaactacgcctacaaagatgtggagcaagacatcactctaggagatgattattttttcagtaggtacccgattgtggagaagaggttagcgcaggctggaatcagattggcgttggtacttaatcggatatttggtggaggtgaagcggatgatataccactacaagtacagtaacagctctaataaaaggaagcatagctattacaaggatttgtccattacgtcgtctatacatcaataaattggcatgaatttgtaactccattgctatacatcaataaattggcatgaatttgtaacaactgaaaggatcaagatgccacccttgaattgcacttctcaaaatttcttgaacaaaataaaatttataatcaagttcaactttatctcttctgact

SEQ ID NO: 71867 - DNA, 1096 bp, Zea Mays
accatccgatatataccccgtcctccacttctgttttccctcgatctccttcaaaataaaccgccattgcatcatagtgttcatctgtcactccaccatgaggcaagacgggagcccattggacctcaacaacttgccggaggagtacggcaagcaagcggcagagagctccacgaccaccgccacatcaagcgttcatgcagttattaggccaaagaagacgaagagcggtagagggaaggatgctgctgcgaaggtgtatgagtgccggttttgctccctcaagttcggcaagtctcaagcgcttggtggccatatgaaccgccatcgacaagagagggagactgaaacccttaaccgtgcccggcaactcgtcttcggcaacgagagcctcgccgtcgccgccgtcggcgcgcagatgagtttcagggatgtaaatatggcaggtgctgccccaccgaccgtactcggagtcggagggaacttccggggaggcgccgccggtggcggcagcatcggcgacctgtgcgtcccgttccggccggtgctgtcgccgcagccttcgtaccattacctctacacggcgccatcaacattgcacccgatgagctacccggcgacgtaccctggcccactgcgccagcctgctgtcgacgactacatcatcggccacgcagtctccgccggcggggacacactaatgcaatcgacacaccgcggcagcttctcctgcttcggagctccactcaccgctccgccggtggcggcaacgaacgtgcaggccgacaaagttatctgcaactgcagcttcacttgaatgcctccggccggctccacttgagcagatgcatgtagttaagttagtgtaaagagccaagaatttaaattagatgttgcgtgttttggacattaaatacagaatgaagtcttccgggttctacttcgaagtatatgatgtctgcactggatttctggatccaaactatatctttagctttgcatgaattgttagttatttcggtactcagtacaaaacgtatttcacagcggatgtttggaaaagtgtttagtcaatctcttatttcaggaaaaaaaa

SEQ ID NO: 71868 - DNA, 1027 bp, Zea Mays
ttcatctccatgtcttgtacatatcttcttgaggcaagacgggagcccattggacctcaacaacttgccggaggagtacggcaagcaagcggcagagagctccacgaccaccgccacatcaagcgttcatgcagttattaggccaaagaagacgaagagcggtagagggaaggatgctgctgcgaaggtgtatgagtgccggttttgctccctcaagttcggcaagtctcaagcgcttggtggccatatgaaccgccatcgacaagagagggagactgaaacccttaaccgtgcccggcaactcgtcttcggcaacgagagcctcgccgtcgccgccgtcggcgcgcagatgagtttcagggatgtaaatatggcaggtgctgccccaccgaccgtactcggagtcggagggaacttccggggaggcgccgccggtggcggcagcatcggcgacctgtgcgtcccgttccggccggtgctgtcgccgcagccttcgtaccattacctctacacggcgccatcaacattgcacccgatgagctacccggcgacgtaccctggcccactgcgccagcctgctgtcgacgactacatcatcggccacgcagtctccgccggcggggacacactaatgcaatcgacacaccgcggcagcttctcctgcttcggagctccactcaccgctccgccggtggcggcaacgaacgtgcaggccgacaaagttatctgcaactgcagcttcacttgaatgcctccggccggctccacttgagcagatgcatgtagttaagttagtgtaaagagccaagaatttaaattagatgttgcgtgttttggacattaaatacagaatgaagtcttccgggttctacttcgaagtatatgatgtctgcactggatttctggatccaaactatatctttagctttgcatgaattgttagttatttcggtactcagtacaaaacgtatttcacagcggatgtttggaaaagtgtttagtcaatctcttatttcaggaaaaaaaa

SEQ ID NO: 71869 - DNA, 1924 bp, Zea Mays
cgtgtccgtgtccgttcgtcgcggcgcgcgcagcccccaaccggcaaccaaataaagaaaaagctagcaaaagataagctaacaagcagtagtactactccctggctgcaccgccaccaccgcaccagaccagaccaaaccaaaccgcgcgagcgatttttgcggcaaaccccctgcgagaaacgtcgtccgcagagccacccaccacgggcagggctatataagccggcccccccaactcggcgtcgctgcgcaaaacacctcgccttttgtactcttgcgtctctgccctcgcgttatcgccttcgtcacgctcgctcgcctggctggcttgtgccttgccttgctcggcgtacgcgaacgcagcgagagggaggagcaaggaaatagagagagacagagagagagagagaaaaaatcaagtcatccccctttcctctgagctcgttccatggagaactcttctcacaagcgggcgcgggaggcgggcgacctcgtcgccggcggctgcggagaggagggctcgccgcaggccgacgccaagaggctgcggccgcaggacctgctcgacatgctggaggacgacaccgacgcggccgcggccggcgacctagcgtcggtcatgcggagcctggaggaggagatagccagcttcgacgaggccgcggaggcgccggcgccggcgccggagctgggcttcctgctcgaggcctcggacgacgagctggggctgccgcccgcctcctcttcggaggaggaggaggccgggcgcgcgggggcgccgttcccgcccgcgctcgacggccagatctggggcttcgaggacgagatcgtggacggaggcggcttcggcggctactcgccggaggccgcggccgcggccgctgcctccgccgccgccgccgcgtgggacgacgacggcttcggcgccggcctcttcgcgttcggcggcgacgacgcgtgtggcccgtcggatctcgcggccctgcgccacgagaccatgcccgccgtctgatggccatccccagggcccaggcagccgcagccagtcgattagccttccttttttttatttttacctttgttggctaaccttagcgagcgggcacccatttttttgacctggatgtaaagtttttagaagggtgaaaaaacagggggcgtggaaaaaacttgggaggaaggttcagagcaaggggagaagaagatcaaaaaaaaaatctggagatggattcttccttctttttttgtccctggaatttatttctcgcttcggtagaaaaagcaaataagcaagcaagtatataacgttattatattaattattaattatattaataaaatgataaacagtaaagccagaaagacagataataatgcaacgatggttgcgtggatggagatgggcgatgacagtgacacatgtggccgacggaaggacgctgacccagtgacgtgactgtgactgctcaaaaaaagaatatcttgatgaattatggaccgtgaaaaaaggatggaaatgcttggacggttccaccactccaaagttggaagaatccgacggtcgatagcacgcaagtacggttgaccaggaacaggaaactgtttactctctctctctctcctaaaataactgcttattctctatccttgacgccttcctctcaaaataattaacctatgtcctaaaatagcctgtcactctcttttctaaaataattagctcctttgtctcataataattaacctgtcctgaagctactgtttgttctctactatgctaaaatagatgacgctttcctatcaaacgttgaatgactcaaatttagtctcaaaatagttggcccctcaaaaataattatttattctctgtgtcccgaaccaattgatgtcttcatctgaaaaaaaaaataaaatatcgtag

SEQ ID NO: 71870 - DNA, 807 bp, Zea Mays
atggggagttccgccccggtttctggacgttttccatggggggagcaggatgtcgctgtctgcagcgccagtcgctctcaccccgcgcaaccagctgctgagcggagcagtgtgacgctgccgctgagcaccacctctgtcaatctgacacagagacaggaggcccgaggccagccagccagccagccaagttggactacgggaggacgggacgagtggagaggcctctttggaggggagtcggggagacaattaatatcactacatcaatttggcgaaagcgacggcgacgccctcccggtcccggatctaggccagcgagcgagggctggccggccggctgcctggctggtggctgctgctactcgagatgttgaggcccggctgccgtgggccgtcccgtatgctgaatcagatgccagcgtatagcctagcctagcctaggtagccccgagtgcgaatgtgcgatactgctactatcatatcatgctgctggtatctcgtcttcgaagctcaacctaaacttcatttctcttgcctgtgctacagagatatcttgttgttcccaaagacagaaaaaaaaagagggaactcatatgtagcaacggtgtttcagtcaccccaaggatcctctccagaataaagtgatttttttttttgcattttttttctagtcgaaatccttcttcctcatatatatagatacataggtttggctttaaggagatctgtccaaacaggtgacacatcatgcttctttgtaataattaatcttatggattggcctctagttcatttggcttttat

SEQ ID NO: 71871 - DNA, 1007 bp, Zea Mays
atggggagttccgccccggtttctggacgttttccatggggggagcaggatgtcgctgtctgcagcgccagtcgctctcaccccgcgcaaccagctgctgagcggagcagtgtgacgctgccgctgagcaccacctctgtcaatctgacacagagacaggaggcccgaggccagccagccagccagccaagttggactacgggaggacgggacgagtggagaggcctgtgggcggcgctgctgcctgcattattgctgttaattaattattgttttttttttacatggtgtgcgttgtggcgaggaatccaatcatattcaaggacaagggtgtggtgtggagtggagactggagagcatcgtgcgtgcctggctctggctccgtcatggatctccgcctccgtctttgacccgctgtgcttgtcagctttggaggggagtcggggagacaattaatatcactacatcaatttggcgaaagcgacggcgacgccctcccggtcccggatctaggccagcgagcgagggctggccggccggctgcctggctggtggctgctgctactcgagatgttgaggcccggctgccgtgggccgtcccgtatgctgaatcagatgccagcgtatagcctagcctagcctaggtagccccgagtgcgaatgtgcgatactgctactatcatatcatgctgctggtatctcgtcttcgaagctcaacctaaacttcatttctcttgcctgtgctacagagatatcttgttgttcccaaagacagaaaaaaaaagagggaactcatatgtagcaacggtgtttcagtcaccccaaggatcctctccagaataaagtgatttttttttttgcattttttttctagtcgaaatccttcttcctcatatatatagatacataggtttggctttaaggagatctgtccaaacaggtgacacatcatgcttctttgtaataattaatcttatggattggcctctagttcatttggcttttat

SEQ ID NO: 71872 - DNA, 1936 bp, Zea Mays
tccgcagtccgcaccgcagccactgggcagacgaggagaagcttcgcggacgccatgtcctcgccgtcgccgctgtgcgccgcctcctgctccaccgctctccgcgcgccgccgccgcctctccttcgcttccgccgctcttatgctccggtagccgcctccgtgccgcgcacggcgcctgccgtctccgatgacctcgtcctacgcatcgccgaacagctggaggactcggtgacctccacctccccgctcctggaccccctccgctccgcctctgcgctctccctcctctccacacgctggcccactcgccgttccagcgaggccttccgcttcactgacatctcctacctccgctccctccccatctccctcccgtccagggagcccgacctcaagctgccgtcctcccctttctcttcccacgtgctcttttcggatggaatcctcgtctcttcctctggtgcccatgtcagcgccctcgccgatcttccccctggccgcgcccgggaccgcgccgccgccgcgctcgcggccgccgctgaattcgcccacaaggacctcttctatgacttcaacgccgttggggcgagggacgttgttgtcgtgcacgtgcctgagggggtcaaggtggccgacgacccaatacacatcatgttcgcctataccaatagcttcgctgagagtatgctgatgtcaaatccaagggttctagttgtggccgagaagtcagcagaggtggctatagtggaggagcattttggggctggagaagaaggtggttgctattgggccaatccagtggcagagattataattgacgagggcgcaagagtggttcattcatacgtgcaacatcaatcatttgctgcagcacatactaaatggacagtcgtccagcaggatacaactagtaagtatgagtttgttgaggtcagcactggagcaaaattgaacagacacaatctccatatcgagcaattaggtcctgagacagagacagaactatcaacacttcacttaacgtctcagaataagcagatacatgatctgcatagcagactgatacttgatcaccctagaggtttctcgcgacagctccataaatgcattgcttgtggcacaggaaatagcatatttgatggcaatattaaagtcaacagtagcagttctatgtatcaccaatacaccagggagggtgccgcacccatatcggatacggtgatacatcccgatacgcatgtcgcgaagtattagggaaacgagataaaaaaactgaatggtttagctcacgatacggtgcaatacgctgtgccgatgcatgccagcccaatagtacctcattttacagcccaatgcaagcccaacatcattagcccatcaccatccattctcaagcctcacccaagaacaaacggtgcctcgtctccaactcccacctcttgcttcttggcgccaccatggacagggagtcagggagtgtcaccacctcacatggagcacatgccacccggatctagcgctgccaactactagtagcgcatgccgtaagaagctagtgccactgcctcgctgggaggcacgtcaccactgggtgtgctgatgtcctcaatcctcatgattgagtgctaccgcttggatctgaactctgggacttgggagatcatcttgcgcagctgctgaaggttctgagataggtgcactctagctatgctgaccggtcagttcctggctgcttggtcatttagatcgtcgctttccttatgttttgttgaaattgattcgatcattttggttctctctctaaggacatgtaaatgcaatcattttaactatacattttatatattggaagtatcagtgtatctttgttttttacaaacgatgtatcacataccgtacctgtatcagtgtgtcaccgtatcgcatatcggtg

SEQ ID NO: 71873 - DNA, 800 bp, Zea Mays
tccacgtacagcaacttggtttttgcactgccatcatcttgcgattggcccacgagtcgtccacatctccgcgcttcaacccacaacctagtggtgcgtctggtgtcagtcatccccgtacggccgcccgactctgtacaatggagaatggatgttagtcatctttgcgtggacaactgcagctgtttgcctggattgctcgactggacagcagtttgctgttataagaagtggtcacttgaatcaagcagagaattcagttgagcagcagtagcacatatttcagtccatttcaagcagctgcaacacagattttggtttcataatacaagcacacagactatttcaaggactaccaggtggacttgtccgactgcgggccgatggtgctggacgcgctgctcaagaagtttctgcaagcttctgaaaagaacttcatatgagtatttctgtgacttcgcttcagctatatgagggggcttgctatgttgcttggggagagcacaagtgagcaagctgacttcaaccttggcagcaacaaagatttgaatgtgtcgccaacaaagcttgcaacaattaagaatgcaaagcctgcaaaaaaaatgacaccaaggaagaagaagaacctgacagcaagtgaatgaacttgtttgaaatgtgtctgtttgaacttgtctgaaatcaatgtatgaactgtgtgactctttgtatgagtcgaatgtgtgtaaaatttaatattttgctgtctgaacatctatgaaactagtgagtccaaactgtgaacatctatgaggtcattt

SEQ ID NO: 71874 - DNA, 699 bp, Zea Mays
catcatcttgcgattggcccacgagtcgtccacatctccgcgcttcaacccacaacctagtggtgcgtctggtgtcagtcatccccgtacggccgcccgactctgtacaatggagaatggatgttagtcatctttgcgtggacaactgcagctgtttgcctggattgctcgactggacagcagtttgctgttataagaagtggtcacttgaatcaagcagagaattcagttgagcagcagtagcacatatttcagtccatttcaagcagctgcaacacagattttggtttcataatacaagcacacagactatttcaaggactaccaggtggacttgtccgactgcgggccgatggtgctggacgcgctgctcaagaagtttctgcaagcttctgaaaagaacttcatatgagtatttctgtgacttcgcttcagctatatgagaaagggaagaaaaagacggaggaaatcaagaactatccaaagttatccacgtacaacaacttggtttttgcactgccatcatcttgcgattggcccacgagtcgtccacatctccgcgcttcaacccacaacctaggtccaaaccaaaccctatactagccagattggtatagttttcattcaagatgttactaagcgtgcgtgctgtttaatttttacactggctgactcttctacccttaccttttctcttct

SEQ ID NO: 71875 - DNA, 1817 bp, Zea Mays
cgagctcaggcatcgccaccgccgccgaccgagcccatccaggcctccccgccgcccactacatccagtgcataggatcaaattgtccccatttgtaaacatggattccaattttagtgatactgtgtcaatgctcgatggagagcctgagcttactttagctgttgttgacccaattgttgctattgacgatattgattggaacacacttcaaatagtagaaagacaagatgaagagggaaggctggaagtaatagatgaggatcagttgtataatctcttaggcttgacggttgatgaagagactcctcctgcagatggtatgggtaatgatggtgatgctaggagggttgataatgaggcagggagggttgatggtgaagctcctcatcttttggatgatagttttggcgcatcgattccagttgatgatgatgtacctgaggagagagtgtttgtgcacgacccagataagcctagcatgagtattggcacagtgtatcctgacatgaaagagtttagattggctatgcgccaatttgctataaatgaggaatttgagctccacatcgcaaaaactgaccgaactaggtacattgggtattgcaaaggagatggatgtccttggcatattgttgaacaagaggagaattattggagaaaggcttagtggaaggatccttcctgcaataatacatcaattaaaagcaaggactagaggattaggacatctatctgttgtcaaggctaactgcttttctacagagattttggatagcagtagcacccataacaggaatgtggtgaagtcttatttgcatcactgcacttgtgaggaatggcagcacacaggtaaaccttgtcaacatgctcttgctctaatcacagcacaacaaacaatagatgtaaacatggaagactttgtgcatgaatattattctgttgagaggtttaggaaagcatactcaagattgattgagccacttcctgacagaacacaatggcctgaagtggacttgccatttgttgttggcgcaccactggacaaaaggtttgctggtagacaaagaaaacttaggatcaaaagttgtttggaaggtggaggtggtggaaaacccaaaaaagatgcaacggtggctgctgtaaaagctgaatgggggacaaagaaacaaatgatccggggaaaaagaaagtgcaaaagatgtggtgaactagggcacggagaaacaagctacaagtgttcgctaaatggaacaaaaaagaggaagaggaagcctcgaaagaataccactaagtatggagagaatgccaaactaccaacaaaaaggagaggccaaaatggggaagagacaaatgctgctgtagaccaaactgcgcaagagacaggtaatgcagacagagatgtgcaagagacaaatgctatcatatcaagtcctatcagaccaaatagagaaacaatattgcaggatagccctattagattgactagaagggggcttgctatgttgcttggggagagcacaagtgagcaagctgacttcaaccttggcagcaacaaagatttgaatgtgtcgccaacaaagcttgcaacaattaagaatgcaaagcctgcaaaaaaaatgacaccaaggaagaagaagaacctgacagcaagtgaatgaacttgtttgaaatgtgtctgtttgaacttgtctgaaatcaatgtatgaactgtgtgactctttgtatgagtcgaatgtgtgtaaaatttaatattttgctgtctgaacatctatgaaactagtgagtccaaactgtgaacatctatgaggtcattt

SEQ ID NO: 71876 - DNA, 1636 bp, Zea Mays
gatcaaattgtccccatttgtaaacatggattccaattttagtgatactgtgtcaatgctcgatggagagcctgagcttactttagctgttgttgacccaattgttgctattgacgatattgattggaacacacttcaaatagtagaaagacaagatgaagagggaaggctggaagtaatagatgaggatcagttgtataatctcttaggcttgacggttgatgaagagactcctcctgcagatggtatgggtaatgatggtgatgctaggagggttgataatgaggcagggagggttgatggtgaagctcctcatcttttggatgatagttttggcgcatcgattccagttgatgatgatgtacctgaggagagagtgtttgtgcacgacccagataagcctagcatgagtattggcacagtgtatcctgacatgaaagagtttagattggctatgcgccaatttgctataaatgaggaatttgagctccacatcgcaaaaactgaccgaactaggtacattgggtattgcaaaggagatggatgtccttggcatattgttgaacaagaggagaattattggagaaaggcttagtggaaggatccttcctgcaataatacatcaattaaaagcaaggactagaggattaggacatctatctgttgtcaaggctaactgcttttctacagagattttggatagcagtagcacccataacaggaatgtggtgaagtcttatttgcatcactgcacttgtgaggaatggcagcacacaggtaaaccttgtcaacatgctcttgctctaatcacagcacaacaaacaatagatgtaaacatggaagactttgtgcatgaatattattctgttgagaggtttaggaaagcatactcaagattgattgagccacttcctgacagaacacaatggcctgaagtggacttgccatttgttgttggcgcaccactggacaaaaggtttgctggtagacaaagaaaacttaggatcaaaagttgtttggaaggtggaggtggtggaaaacccaaaaaagatgcaacggtggctgctgtaaaagctgaatgggggacaaagaaacaaatgatccggggaaaaagaaagtgcaaaagatgtggtgaactagggcacggagaaacaagctacaagtgttcgctaaatggaacaaaaaagaggaagaggaagcctcgaaagaataccactaagtatggagagaatgccaaactaccaacaaaaaggagaggccaaaatggggaagagacaaatgctgctgtagaccaaactgcgcaagagacagggggcttgctatgttgcttggggagagcacaagtgagcaagctgacttcaaccttggcagcaacaaagatttgaatgtgtcgccaacaaagcttgcaacaattaagaatgcaaagcctgcaaaaaaaatgacaccaaggaagaagaagaacctgacagcaagtgaatgaacttgtttgaaatgtgtctgtttgaacttgtctgaaatcaatgtatgaactgtgtgactctttgtatgagtcgaatgtgtgtaaaatttaatattttgctgtctgaacatctatgaaactagtgagtccaaactgtgaacatctatgaggtcattt

SEQ ID NO: 71877 - DNA, 632 bp, Zea Mays
cccctggccactggcccctgcgtttcctatcgtttcggttcggcgcaggcgccgctaccgcctcctctcgaccgctcgccttcccgttcgccatgtcgttgctcgccgcggccattcccagcacttcctcccacttctccgcacccttcctcccctcattccacatgccccgcaagaacctcaccgccccactccaccggatccgccgtccgcggccgttcaccgtcgtctcctccgtcccagaccccgcggcggggccggtggaatacacgccctggctcatcgccggcctcggcaacccaggcaacaagtactacggcacgcggcacaatgtggggtttgagatggtggatcgcatcgcggcggaggaggggattacgatgaacacaatccagtccaagtcgcttctgggaattggttcaattggcgaggtgccagtcttggtggtaaaaccgcaatcatacatgaactacagtggagaggcaattggacctcttgcagcctattatcaagtaccattacggcacatcctcttgatttatgatgatacaagtctgcccaatggtgtactgcggcttcaaaagaaaggtggtcatggtcgccacaacgggacacctaatatttggtcagcc

SEQ ID NO: 71878 - DNA, 1835 bp, Zea Mays
cccctggccactggcccctgcgtttcctatcgtttcggttcggcgcaggcgccgctaccgcctcctctcgaccgctcgccttcccgttcgccatgtcgttgctcgccgcggccattcccagcacttcctcccacttctccgcacccttcctcccctcattccacatgccccgcaagaacctcaccgccccactccaccggatccgccgtccgcggccgttcaccgtcgtctcctccgtcccagaccccgcggcggggccggtggaatacacgccctggctcatcgccggcctcggcaacccaggcaacaagtactacggcacgcggcacaatgtggggtttgagatggtggatcgcatcgcggcggaggaggggattacgatgaacacaatccagtccaagtcgcttctgggaattggttcaattggcgaggtgccagtcttggtggtaaaaccgcaatcatacatgaactacagtggagaggcagtgagttattcttagtccttctatgtggcattattagcttgtgaaatgtaagggacagtgatgttctttttttgataagggggcaatgatattttagttacttaaataaatgtttctatgagagcttggttacttgtggggatagttgcattccttacttaaacttgcaatatatttacatgcatttcattcttgtttggtatttgtaacctttgagaaagtagtggatacaacatgagcacaattttgaacttgtttatttttttggtttaaggagtggacatttgatgcctgttgatgcaaaatactgcctgttaggagtattaatatgaagtgcacaacaggcgaattggctatttatatcttcgatcaaagttgaggtttagtttattccattgtacggatatattattcattaatgagaaaccatttgtaacaaatgagtatagttagtttggttgaatgtgcagtacagcaaaagcatgtcaattatgttggtaatcttatgctttcattctgacttgcctacacttacaatttctcgtttccctcattcttgcaatattattgctaaagtgtcacacatcatgtcttgcaatgtgctactaagaaatgtcaagactaattgagatctgttatcatttataatgagttcactatcctaacctcacccgttgtcatgtgaagattggacctcttgcagcctattatcaagtaccattacggcacatcctcttgatttatgatgatacaagtctgcccaatggtgtactgcggcttcaaaagaaaggtggtcatggtcgccacaacgggctacagaatgtgattgagcatttggatggtcgcagagaatttcctcgtttatctataggcattggtagcccacctggaaaaatggaccctcgggctttccttctgcagaagttcagttcagaggaacgagtccaggtttaatattaccttgcgggtatggattagtaaaccctctacccgcgggtttcatacccattgccattccaaggagatttttgaatcccagcttgaaaatcgctcgcaccaggagttgaagctagagacctgttcacaacaataccaaatcaaactgttgttaatatgtgtgtgtgtgtggagcagtgtttaacatctcatttttactgtttcaaaatctcgttttgaccaaaaaagttcacttttgtgttgttaaatttgaagagcatattgggcttctcaaactttactttatcaccctaggataactgttgtttacttaacatcgagctactgattctgtagtagtccacccttttctagtacgaactatatgatataactgctcttggattgttgatt

SEQ ID NO: 71879 - DNA, 1153 bp, Zea Mays
cccctggccactggcccctgcgtttcctatcgtttcggttcggcgcaggcgccgctaccgcctcctctcgaccgctcgccttcccgttcgccatgtcgttgctcgccgcggccattcccagcacttcctcccacttctccgcacccttcctcccctcattccacatgccccgcaagaacctcaccgccccactccaccggatccgccgtccgcggccgttcaccgtcgtctcctccgtcccagaccccgcggcggggccggtggaatacacgccctggctcatcgccggcctcggcaacccaggcaacaagtactacggcacgcggcacaatgtggggtttgagatggtggatcgcatcgcggcggaggaggggattacgatgaacacaatccagtccaagtcgcttctgggaattgtgtaggttcaattggcgaggtgccagtcttggtggtaaaaccgcaatcatacatgaactacagtggagaggcaattggacctcttgcagcctattatcaagtaccattacggcacatcctcttgatttatgatgatacaagtctgcccaatggtgtactgcggcttcaaaagaaaggtggtcatggtcgccacaacgggctacagaatgtgattgagcatttggatggtcgcagagaatttcctcgtttatctataggcattggtagcccacctggaaaaatggaccctcgggctttccttctgcagaagttcagttcagaggaacgagtccaggtttaatattaccttgcgggtatggattagtaaaccctctacccgcgggtttcatacccattgccattccaaggagatttttgaatcccagcttgaaaatcgctcgcaccaggagttgaagctagagacctgttcacaacaataccaaatcaaactgttgttaatatgtgtgtgtgtgtggagcagtgtttaacatctcatttttactgtttcaaaatctcgttttgaccaaaaaagttcacttttgtgttgttaaatttgaagagcatattgggcttctcaaactttactttatcaccctaggataactgttgtttacttaacatcgagctactgattctgtagtagtccacccttttctagtacgaactatatgatataactgctcttggattgttgatt

SEQ ID NO: 71880 - DNA, 3628 bp, Zea Mays
cccctggccactggcccctgcgtttcctatcgtttcggttcggcgcaggcgccgctaccgcctcctctcgaccgctcgccttcccgttcgccatgtcgttgctcgccgcggccattcccagcacttcctcccacttctccgcacccttcctcccctcattccacatgccccgcaagaacctcaccgccccactccaccggatccgccgtccgcggccgttcaccgtcgtctcctccgtcccagaccccgcggcggggccggtggaatacacgccctggctcatcgccggcctcggcaacccaggcaacaagtactacggcacgcggcacaatgtggggtttgagatggtggatcgcatcgcggcggaggaggggattacgatgaacacaatccagtccaagtcgcttctgggaattggttcaattggcgaggtgccagtcttggtggtaaaaccgcaatcatacatgaactacagtggagaggcaattggacctcttgcagcctattatcaagtaccattacggcacatcctcttgatttatgatgatacaagtctgcccaatggtgtactgcggcttcaaaagaaaggtggtcatggtcgccacaacgggctacagaatgtgattgagcatttggatggtcgcagagaatttcctcgtttatctataggcattggtagcccacctggaaaaatggaccctcgggctttccttctgcagaagttcagttcagaggaacgagtccagatcgacactgctctggagcaaggggtggacgctgtgagaacccttgtgcttaagggttttagtgggagtactgaaagattcaaccttgtgcagaagtacaagttccacagggtttgaatgtttgaggatctgtgaaatacttgggcttacttctgcaaacaacctgatacacatcaatatcatttgaagtgttggatgtggtgatttgctgttctgaactatgcatgtaagtgtactgagttccttccaaaaggctcctgcagttttaaggatattaagggggtgtttgaatgcactagagctaatagttggttggctaaaaattgccagtggaattagctagctaactattagctaatttgctaaaagtagctaaaatgtttggatgccttcaattaattttagcagctaactattagctctagtgcattcaagcacctcttagagcatctccaacaacgtgacctataaaaatgccctataatttgaaaataagtatattttatagaatttagggcaccaacaaaacacctcgctccaacagtaaagccccaaatctagattatagggcagcccactacggtgtagtatatttgagtcacttgagagggtgtcctatagttttttgacaaaaatttatgaaataaggcactgttggagtagtttttcctgtgtagagccccatatttcaatttgaggcactagtttgaggcattgttggagatgctcttaagtactcattagtgtgtacatacggtagtattctctatatttttcccaataaaatatattattgactgaaggtggaatatagagtagtttaattgtgaccaaggctctgtaaaaatattcattttttatgtaagttgatgataaggcatttgattttgatgtaaaacatggaatatagaccattttgactcttccatttgcctaactctggttttatctttggaaatacataccatctgtccttggtgtggatagtttccctgcaaagagatcacgcacgcatgtgcgtgtgtgtaattgtgtatatcagtccgtacaacaagtccttttcatcaacttgacgtggtaaagttgttaaaagagtgtgccatgttatggttaagatgttgaaacctctacgttttctcgtcctttagaaaattattttaggagatccccagaacttctttgataaggacatgaaagtgaaatataattatcattttcttattctggtatgccaatctaaacttttctggcaaaggattgaaaacgtgttttgttactatttaaaaggtggtataacttcttgcatctgttaacctgtactaccatctagaagaaccagagtgaagtgcagcggtgattagcttgaacaggttttgtcatggttaaacgccacatacaacaatcttgcaaccaatgtatagattaactttttagactaggttttgaattgtttgctacatgataatccaaggtggcgaaatctgttaagacttttatgtcctctgtcagaattgttggacttcctagctgatagatcgaatggtggatgtaataattggatcacctttacatctcatccctggtttacctatacctaaacctatgtatatggctatgcgctgatcttctattaaatgctaacagattgtactggaaattagttgagtagctcttgacctgggagcacatatttttactgtcatgagtcatgaataggaacatgcttaggtgtgaattagcacatgataagtagcgtggagcatacataatactaggttgtttttgtagagcatctgttaattaggtttgtatgttagaatgcgggatctgattttcctagtggtatgttacccatttgaatatctttatgcgctcttgtaattgtcactttatttcttattgttatttgaagttatatattgttgccatattatgttaatgcatcttttttgaaccttgtgaaatgaaatacatgatttgtcatttctgtgcaggagcttacaagttcgatgaatctgtttgttaatcagtatagctgacaattggcaaccttctattgttccttcggtttttgcataacactctaggatctggagaaacggcaaccagtacttagctccacttgactataatctgtagaagccagagataacttgtgatgtgatatatccaaataacaataagggggcttgtctaatacatcgaacaagatgtgatgttcgtcaaaggagtagttctgacttcagtttcaagacataaaaacatctaataatcgcacttccactgccttttgctgttaaagaacatgtgcctagttcttttcaaattgagaagtgggctctaaagttttacatgttacatttataaagccctttcttccaccatcatgttatctaagcactttgctaatccctttcttaaaggcataacacagctagggcgttaagtaattatatatctccatctgttgatcactcgcatgcagattgtaatagttttttttttccaagtgtcgcaatcgtagctgtattagcttattcaatgctttatactggatccctgtgctctaaattattctctgtgctatttagctttatatacattctaagacttgatgttggtctaggtgtttctttattgtgtaattaagtatatatactggggaatcacttcacatgactttaagtgaaatccacccaatctcaagtgttcgtttttatgcagtaggtaatgtcacggagaatataatatagtttatggtccttgctcacattgcttggatctgttaactagctttcaaacttgttcccctcaattattatggtaagctattctttattatcctgtggtggcccaaaagcacttaaggagaacataaagag

SEQ ID NO: 71881 - DNA, 2196 bp, Zea Mays
ctaaaagaggatcgacatgagcgggtgttagaatataatataagtgaatgtttgccgcttcctatcagcttaagcttttgggttgaacttggttggtatataaaacttaatatccacaattgatattgagcgctccttccccaaatattgacaacctgctagtgctcccatcccaagcctgctctcgagctacgccgccaccggagctgcccgccgaaggctcagcggatggcgaggagggcggaggcgaggcctatttcagccctctccatgtcttctctccattcctccctctcatttctctatctcctccgcactgcgacatgcttcgggcttgaagctccatagctggtgtgccccctccccccgctgccaaattcgaccttctttgtgccggatccggtcctcttgcttccagatcttcatcctgacaggctttgtgcgtagcagcactcatgccgcggcgtcggtggctctcacggcacgcggtggcactcttgcctcttggtgatgcgccatcatcctgacagttgtctgtaatttgtggtctgccacaacattatgtaaaggttttgtctcgtttcccctaaaaacgaggtcgttgaggcgtggcttagccatgtcagaatcaatgaaattcaggttcaattggcgaggtgccagtcttggtggtaaaaccgcaatcatacatgaactacagtggagaggcatgtcacacatcatgtcttgcaatgtgctactaagaaatgtcaagactaattgagatctgttatcatttataatgagttcactatcctaacctcacccgttgtcatgtgaagattggacctcttgcagcctattatcaagtaccattacggcacatcctcttgatttatgatgatacaagtctgcccaatggtgtactgcggcttcaaaagaaaggtggtcatggtcgccacaacgggctacagaatgtgattgagcatttggatggtcgcagagaatttcctcgtttatctataggcattggtagcccacctggaaaaatggaccctcgggctttccttctgcagaagttcagttcagaggaacgagtccagatcgacactgctctggagcaaggggtggacgctgtgagaacccttgtgcttaagggttttagtgggagtactgaaagattcaaccttgtgcagaagtacaagttccacagggtttgaatgtttgaggatctgtgaaatacttgggcttacttctgcaaacaacctgatacacatcaatatcatttgaagtgttggatgtggtgatttgctgttctgaactatgcatgagcttacaagttcgatgaatctgtttgttaatcagtatagctgacaattggcaaccttctattgttccttcggtttttgcataacactctaggatctggagaaacggcaaccagtacttagctccacttgactataatctgtagaagccagagataacttgtgatgtgatatatccaaataacaataagggggcttgtctaatacatcgaacaagatgtgatgttcgtcaaaggagtagttctgacttcagtttcaagacataaaaacatctaataatcgcacttccactgccttttgctgttaaagaacatgtgcctagttcttttcaaattgagaagtgggctctaaagttttacatgttacatttataaagccctttcttccaccatcatgttatctaagcactttgctaatccctttcttaaaggcataacacagctagggcgttaagtaattatatatctccatctgttgatcactcgcatgcagattgtaatagttttttttttccaagtgtcgcaatcgtagctgtattagcttattcaatgctttatactggatccctgtgctctaaattattctctgtgctatttagctttatatacattctaagacttgatgttggtctaggtgtttctttattgtgtaattaagtatatatactggggaatcacttcacatgactttaagtgaaatccacccaatctcaagtgttcgtttttatgcagtaggtaatgtcacggagaatataatatagtttatggtccttgctcacattgcttggatctgttaactagctttcaaacttgttcccctcaattattatggtaagctattctttattatcctgtggtggcccaaaagcacttaaggagaacataaagag

SEQ ID NO: 71882 - DNA, 1499 bp, Zea Mays
ctaaaaacgaggtcgttgaggcgtggcttagccatgtcagaatcaatgaaattcaggttcaattggcgaggtgccagtcttggtggtaaaaccgcaatcatacatgaactacagtggagaggcaattggacctcttgcagcctattatcaagtaccattacggcacatcctcttgatttatgatgatacaagtctgcccaatggtgtactgcggcttcaaaagaaaggtggtcatggtcgccacaacgggctacagaatgtgattgagcatttggatggtcgcagagaatttcctcgtttatctataggcattggtagcccacctggaaaaatggaccctcgggctttccttctgcagaagttcagttcagaggaacgagtccagatcgacactgctctggagcaaggggtggacgctgtgagaacccttgtgcttaagggttttagtgggagtactgaaagattcaaccttgtgcagaagtacaagttccacagggtttgaatgtttgaggatctgtgaaatacttgggcttacttctgcaaacaacctgatacacatcaatatcatttgaagtgttggatgtggtgatttgctgttctgaactatgcatgagcttacaagttcgatgaatctgtttgttaatcagtatagctgacaattggcaaccttctattgttccttcggtttttgcataacactctaggatctggagaaacggcaaccagtacttagctccacttgactataatctgtagaagccagagataacttgtgatgtgatatatccaaataacaataagggggcttgtctaatacatcgaacaagatgtgatgttcgtcaaaggagtagttctgacttcagtttcaagacataaaaacatctaataatcgcacttccactgccttttgctgttaaagaacatgtgcctagttcttttcaaattgagaagtgggctctaaagttttacatgttacatttataaagccctttcttccaccatcatgttatctaagcactttgctaatccctttcttaaaggcataacacagctagggcgttaagtaattatatatctccatctgttgatcactcgcatgcagattgtaatagttttttttttccaagtgtcgcaatcgtagctgtattagcttattcaatgctttatactggatccctgtgctctaaattattctctgtgctatttagctttatatacattctaagacttgatgttggtctaggtgtttctttattgtgtaattaagtatatatactggggaatcacttcacatgactttaagtgaaatccacccaatctcaagtgttcgtttttatgcagtaggtaatgtcacggagaatataatatagtttatggtccttgctcacattgcttggatctgttaactagctttcaaacttgttcccctcaattattatggtaagctattctttattatcctgtggtggcccaaaagcacttaaggagaacataaagag

SEQ ID NO: 71883 - DNA, 1081 bp, Zea Mays
atggacgatcaggataggccagcccaccagcagccagccagcaacaggggccagagcccagctgccaatgggcagcggcggcccaaggggactaggttcagcggcggcccaagccgatggcgtgggggtgcggcccaggcgacgcaggctcccagcagcggcgactctttggcacggatgctggatgctgccaatgcccaatgccatgctggttggcgactctttggcgcagcggcagccaggtcgaagcggcacccacccgcaatgagcaaagcaggcggcggccccggctcggccccgggcccgacggccgcggccgcggcggccgcggtgcagaagcagaagtcgctgctgcagaaggcggacgccgacgtctccagcctcgtcgacaatttctcctccctcatcaacatcgcccgagtcaacgatccgccagtgcgcaactcgcaggaggccttccagatggagatgcgcgccgcccgcatggaggatcgaagtgctgggtcagcaagctgagggaactgagagaatgctggagaggattgggcaggaggcagcagcaagcctcaaggagctagaggcacactactactcatctgttgtgcggtcaccatcctatgattgagggttatcccaggttatctgttaggcggtttgctcttcagggttatctcagggttttttatttcaccttgaatattgcctactgacattaccattacctttttgttgggactaaagtttagtagattcgtcttattgtttagtccttatctgtataattagtttataattagattatatgtaatacttctaaatatcattcaaatatttgatgttctaaatatcattcaaatatttgatgtgaaggaatcttcggaaatatggattaggcacaccgtcctgccatctggcaattcattagggtgccaattgatgtagctgtttggttcacatattgtaacgttgtaacgtgatgggtatattgtaacgttgtaacgtgatgggtgacaaataacattaaaccatatttatttaagtttaaccgtaatcagatactacattagagaatgatatcagc

SEQ ID NO: 71884 - DNA, 1130 bp, Zea Mays
atggacgatcaggataggccagcccaccagcagccagccagcaacaggggccagagcccagctgccaatgggcagcggcggcccaaggggactaggttcagcggcggcccaagccgatggcgtgggggtgcggcccaggcgacgcaggctcccagcagcggcgactctttggcacggatgctggatgctgccaatgcccaatgccatgctggttggcgactctttggcgcagcggcagccaggtcgaagcggcacccacccgcaatgagcaaagcaggcggcggccccggctcggccccgggcccgacggccgcggccgcggcggccgcggtgcagaagcagaagtcgctgctgcagaaggcggacgccgacgtctccagcctcgtcgacaatttctcctccctcatcaacatcgcccgagtcaacgatccgccagtgcgcaactcgcaggaggccttccagatggagatgcgcgccgcccgcatggtacattcagcagactctctgttgaaattagtgtcggaacttaagaggacagccatcttttctgggcttgcttcattgaatgagaatgtggataggaggatcgaagtgctgggtcagcaagctgagggaactgagagaatgctggagaggattgggcaggaggcagcagcaagcctcaaggagctagagggttatcccaggttatctgttaggcggtttgctcttcagggttatctcagggttttttatttcaccttgaatattgcctactgacattaccattacctttttgttgggactaaagtttagtagattcgtcttattgtttagtccttatctgtataattagtttataattagattatatgtaatacttctaaatatcattcaaatatttgatgttctaaatatcattcaaatatttgatgtgaaggaatcttcggaaatatggattaggcacaccgtcctgccatctggcaattcattagggtgccaattgatgtagctgtttggttcacatattgtaacgttgtaacgtgatgggtatattgtaacgttgtaacgtgatgggtgacaaataacattaaaccatatttatttaagtttaaccgtaatcagatactacattagagaatgatatcagc

SEQ ID NO: 71885 - DNA, 1110 bp, Zea Mays
atggacgatcaggataggccagcccaccagcagccagccagcaacaggggccagagcccagctgccaatgggcagcggcggcccaaggggactaggttcagcggcggcccaagccgatggcgtgggggtgcggcccaggcgacgcaggctcccagcagcggcgactctttggcacggatgctggatgctgccaatgcccaatgccatgctggttggcgactctttggcgcagcggcagccaggtcgaagcggcacccacccgcaatgagcaaagcaggcggcggccccggctcggccccgggcccgacggccgcggccgcggcggccgcggtgcagaagcagaagtcgctgctgcagaaggcggacgccgacgtctccagcctcgtcgacaatttctcctccctcatcaacatcgcccgagtacattcagcagactctctgttgaaattagtgtcggaacttaagaggacagccatcttttctgggcttgcttcattgaatgagaatgtggataggaggatcgaagtgctgggtcagcaagctgagggaactgagagaatgctggagaggattgggcaggaggcagcagcaagcctcaaggagctagaggcacactactactcatctgttgtgcggtcaccatcctatgattgagggttatcccaggttatctgttaggcggtttgctcttcagggttatctcagggttttttatttcaccttgaatattgcctactgacattaccattacctttttgttgggactaaagtttagtagattcgtcttattgtttagtccttatctgtataattagtttataattagattatatgtaatacttctaaatatcattcaaatatttgatgttctaaatatcattcaaatatttgatgtgaaggaatcttcggaaatatggattaggcacaccgtcctgccatctggcaattcattagggtgccaattgatgtagctgtttggttcacatattgtaacgttgtaacgtgatgggtatattgtaacgttgtaacgtgatgggtgacaaataacattaaaccatatttatttaagtttaaccgtaatcagatactacattagagaatgatatcagc

SEQ ID NO: 71886 - DNA, 932 bp, Zea Mays
atggacgatcaggataggccagcccaccagcagccagccagcaacaggggccagagcccagctgccaatgggcagcggcggcccaaggggactaggttcagcggcggcccaagccgatggcgtgggggtgcggcccaggcgacgcaggctcccagcagcggcgactctttggcacggatgctggatgctgccaatgcccaatgccatgctggttggcgactctttggcgcagcggcagccaggtcgaagcggcacccacccgcaatgagcaaagcaggcggcggccccggctcggccccgggcccgacggccgcggccgcggcggccgcggtgcagaagcagaagtcgctgctgcagaaggcggacgccgacgtctccagcctcgtcgacaatttctcctccctcatcaacatcgcccgagtcaacgatccgccagtgcgcaactcgcaggaggccttccagatggagatgcgcgccgcccgcatggtacattcagcagactctctgttgaaattagtgtcggaacttaagaggacagccatcttttctgggcttgcttcattgaatgagaatgtggataggaggatcgaagtgctgggtcagcaagctgagggaactgagagaatgctggagaggattgggcaggaggcagcagcaagcctcaaggagctagaggcacactactactcatctgttgtgcggtcaccatcctatgattgaggaatcttcggaaatatggattaggcacaccgtcctgccatctggcaattcattagggtgccaattgatgtagctgtttggttcacatattgtaacgttgtaacgtgatgggtatattgtaacgttgtaacgtgatgggtgacaaataacattaaaccatatttatttaagtttaaccgtaatcagatactacattagagaatgatatcagc

SEQ ID NO: 71887 - DNA, 2142 bp, Zea Mays
caggtcttccactccatcctttcattgttgaaacgctagaaaatactatggatatgtttagtggaggagagtactcagattttactgaagataagaagtatcaacataccaacttcctgtttgactgcattatagagtcactggattcaaaattctgcaatcttggcaaatgtggatacaaggcttggctgaagttgcctcacagtttgagcaaagatctgttgaagcgccagctattggaaaacatcagcaactggagggagtcaagtgggactgctcttagacaagtttctgacaaagaagtggaccaagtgactgacaggtgggatgcaaaccttgaagcatttgatataagcattgcaatcgagaacgacattcttgaggcgcttgtcgcttatcctatagacacgtctagtgtcatcggtgttttgcaccgggcaaggtgcacgcgtcgatgtcgttgccagcacggaacaatcaccaccgttattaagaagatgatgcgctgcgctgcaacgggcggcgggtgcgtcgcttcgtggagcggcgatcggagattgccggcggtcaacccctgcagcgtgcggatgccgacgggcaacactaggttcttttactgggggttctttggcagataaatttgggcggacaagaacattcatcctggatgcagtcccacttgctctaggtgcattcttgagtgcaacagctcaagatatccgcacaatgattattggccgattgcttgctggaattggtatcggggtctcatctgctcttgtacccctttacatatctgagatctcaccaactgaaattcgtggaacacttggtaccgttaatcaactttttatttgcattggaattcttgcagctttgttagctggattgcctctggcaggaaatcctgcctggtggaggacaatgtttggaattgctgtagttccatccattctgctggctgtaggaatggccttttcgcctgaaagccctcgttggctattccagcaaggaaaggttactcaagcagaattagctgtaaaaagactgtatggaaaagaaatggttaccgaaattatgtttgatctgagagctagtggccaaagttcttcggagtccgaagccggctggtttgatcttttcagcaagcgttactggaaagttgtgagtgtgggggcagcactgtttttgttccagcagcttgctggtataaacgctgttgtatattactctacatcggtgttccgtagtgcaggcattgcatctgatgttgctgctagtgctcttgttggagcagccaatgtttttggtactatggttgcatcttctctaatggacaaacaaggaaggaaaagccttctgataacaagcttttctggaatgggtgcttcaatgctactcctagcattgtccttcacctggaaagctctggcaccttattctggtactcttgctgttgttggcactgttctgtacgtgctgtcatttgctctaggagcgggccctgttccagcgctacttcttcctgaaatatttgcctcgagaataagggccaaggctgtcgcattatctctaggcatgcactgggtatctaactttttcattggcctgtacttcctgagtgtcgtgagcaagtttgggatcagcaacgtgtatctgggatttgcatcagtatgtgcccttgcagttctgtacatagctgggaatgtggtcgagaccaaggggagatcacttgaagagattgaaagggagctaagtgtagcagaatgatgtacttttgctagtcatgctgtggcgccgttttggttatcgagaatgcaaccaagcgctcaaccgagcatccttggacctggagactctttctagtttcatgtagttttagaaataagcgaacggcaagagtaccaatcttaggtgacttggtgtgggttgtgtctgaaataagtgaattggattgtagaatttcagaaataagtgaattggattgtagaatttcagaaaaagtaacaaaaaaaaatacaaaaggatgatccttttgcatgtactggttcttctatttcttatcatattcagcctgcagatctcgtcgattcctttccaaaaaggttattagttgttacacttacacatcatcatcatgac

SEQ ID NO: 71888 - DNA, 2629 bp, Zea Mays
caggtcttccactccatcctttcattgttgaaacgctagaaaatactatggatatgtttagtggaggagagtactcagattttactgaagataagaagtatcaacataccaacttcctgtttgactgcattatagagtcactggattcaaaattctgcaatcttggcaaatgtggatacaaggcttggctgaagttgcctcacagtttgagcaaagatctgttgaagcgccagctattggaaaacatcagcaactggagggagtcaagtgggactgctcttagacaagtttctgacaaagaagtggaccaagtgactgacaggtgggatgcaaaccttgaagcatttgatataagcattgcaatcgagaacgacattcttgaggcgcttgtcgcttatcctatagacacgtctagtgtcatcggtgttttgcaccgggcaaggtgcacgcgtcgatgtcgttgccagcacggaacaatcaccaccgttattaagaagatgatgcgctgcgctgcaacgggcggcgggtgcgtcgcttcgtggagcggcgatcggagattgccggcggtcaacccctgcagcgtgcggatgccgacgggcaacgatgggtggtgcgccggcctgaggtcgcgggcggcggatctcgccggcctcgagatggccaacctgcgcggcggcgtcggggggctcttccgcgcgagcccgcgctacgggcgcttgcaagccacggcggcagttgaccctgaagatattccattggagaaggttcaagttaaatcctcaggacatgttctgccatatgttggcgttgcttgtttgggggctattctgtttggttaccatcttggtgtggtcaatggcgcacttgaatatctcgcgaaggatcttgggattgctgaaaatgctgtcttgcagggtatgggtgggtggttagcacatccttggctggtgcaacactaggttcttttactgggggttctttggcagataaatttgggcggacaagaacattcatcctggatgcagtcccacttgctctaggtgcattcttgagtgcaacagctcaagatatccgcacaatgattattggccgattgcttgctggaattggtatcggggtctcatctgctcttgtacccctttacatatctgagatctcaccaactgaaattcgtggaacacttggtaccgttaatcaactttttatttgcattggaattcttgcagctttgttagctggattgcctctggcaggaaatcctgcctggtggaggacaatgtttggaattgctgtagttccatccattctgctggctgtaggaatggccttttcgcctgaaagccctcgttggctattccagcaaggaaaggttactcaagcagaattagctgtaaaaagactgtatggaaaagaaatggttaccgaaattatgtttgatctgagagctagtggccaaagttcttcggagtccgaagccggctggtttgatcttttcagcaagcgttactggaaagttgtgagtgtgggggcagcactgtttttgttccagcagcttgctggtataaacgctgttgtatattactctacatcggtgttccgtagtgcaggcattgcatctgatgttgctgctagtgctcttgttggagcagccaatgtttttggtactatggttgcatcttctctaatggacaaacaaggaaggaaaagccttctgataacaagcttttctggaatgggtgcttcaatgctactcctagcattgtccttcacctggaaagctctggcaccttattctggtacgtgctgtcatttgctctaggagcgggccctgttccagcgctacttcttcctgaaatatttgcctcgagaataagggccaaggctgtcgcattatctctaggcatgcactgggtatctaactttttcattggcctgtacttcctgagtgtcgtgagcaagtttgggatcagcaacgtgtatctgggatttgcatcagtatgtgcccttgcagttctgtacatagctgggaatgtggtcgagaccaaggggagatcacttgaagagattgaaagggagctaagtgtagcagaatgatgtacttttgctagtcatgctgtggcgccgttttggttatcgagaatgcaaccaagcgctcaaccgagcatccttggacctggagactctttctagtttcatgtagttttagaaataagcgaacggcaagagtaccaatcttaggtgacttggtgtgggttgtgtctgaaataagtgaattggattgtagaatttcagaaataagtgaattggattgtagaatttcagaaagtgtgttccccttattttttcgctgcagttccttccatgctagacctatattactgacagttttcttcatgcgcccttatttccttttggcctcaagatttgcccgcagctttatgaggaaaggattagtgcgtcattatttctgtatatcacagcacagtagaagtaacaaaaaaaaatacaaaaggatgatccttttgcatgtactggttcttctatttcttatcatattcagcctgcagatctcgtcgattcctttccaaaaaggttattagttgttacacttacacatcatcatcatgac

SEQ ID NO: 71889 - DNA, 1723 bp, Zea Mays
gtaagtcctccgagtcatgtagccatcagcaggaagcctttagaaaaaaaaagaacaatcaccaccgttattaagaagatgatgcgctgcgctgcaacgggcggcgggtgcgtcgcttcgtggagcggcgatcggagattgccggcggtcaacccctgcagcgtgcggatgccgacgggcaacactaggttcttttactgggggttctttggcagataaatttgggcggacaagaacattcatcctggatgcagtcccacttgctctaggtgcattcttgagtgcaacagctcaagatatccgcacaatgattattggccgattgcttgctggaattggtatcggggtctcatctgctcttgtacccctttacatatctgagatctcaccaactgaaattcgtggaacacttggtaccgttaatcaactttttatttgcattggaattcttgcagctttgttagctggattgcctctggcaggaaatcctgcctggtggaggacaatgtttggaattgctgtagttccatccattctgctggctgtaggaatggccttttcgcctgaaagccctcgttggctattccagcaaggaaaggttactcaagcagaattagctgtaaaaagactgtatggaaaagaaatggttaccgaaattatgtttgatctgagagctagtggccaaagttcttcggagtccgaagccggctggtttgatcttttcagcaagcgttactggaaagttgtgagtgtgggggcagcactgtttttgttccagcagcttgctggtataaacgctgttgtatattactctacatcggtgttccgtagtgcaggcattgcatctgatgttgctgctagtgctcttgttggagcagccaatgtttttggtactatggttgcatcttctctaatggacaaacaaggaaggaaaagccttctgataacaagcttttctggaatgggtgcttcaatgctactcctagcattgtccttcacctggaaagctctggcaccttattctggtactcttgctgttgttggcactgttctgtacgtgctgtcatttgctctaggagcgggccctgttccagcgctacttcttcctgaaatatttgcctcgagaataagggccaaggctgtcgcattatctctaggcatgcactgggtatctaactttttcattggcctgtacttcctgagtgtcgtgagcaagtttgggatcagcaacgtgtatctgggatttgcatcagtatgtgcccttgcagttctgtacatagctgggaatgtggtcgagaccaaggggagatcacttgaagagattgaaagggagctaagtgtagcagaatgatgtacttttgctagtcatgctgtggcgccgttttggttatcgagaatgcaaccaagcgctcaaccgagcatccttggacctggagactctttctagtttcatgtagttttagaaataagcgaacggcaagagtaccaatcttaggtgacttggtgtgggttgtgtctgaaataagtgaattggattgtagaatttcagaaataagtgaattggattgtagaatttcagaaaaagtaacaaaaaaaaatacaaaaggatgatccttttgcatgtactggttcttctatttcttatcatattcagcctgcagatctcgtcgattcctttccaaaaaggttattagttgttacacttacacatcatcatcatgac

SEQ ID NO: 71890 - DNA, 1874 bp, Zea Mays
gtaagtcctccgagtcatgtagccatcagcaggaagcctttagaaaaaaaaacgaaattcctgcgttgaaagaagtccggccccatccgctgcttaactatcggatcttgcgaaggcatcgtcctcttcgtctccttcgtcgtcctatcttataatcgcatttcgaaatccccaaacggaagcatcgccactcttccgaacctgaacaatcaccaccgttattaagaagatgatgcgctgcgctgcaacgggcggcgggtgcgtcgcttcgtggagcggcgatcggagattgccggcggtcaacccctgcagcgtgcggatgccgacgggcaacactaggttcttttactgggggttctttggcagataaatttgggcggacaagaacattcatcctggatgcagtcccacttgctctaggtgcattcttgagtgcaacagctcaagatatccgcacaatgattattggccgattgcttgctggaattggtatcggggtctcatctgctcttgtacccctttacatatctgagatctcaccaactgaaattcgtggaacacttggtaccgttaatcaactttttatttgcattggaattcttgcagctttgttagctggattgcctctggcaggaaatcctgcctggtggaggacaatgtttggaattgctgtagttccatccattctgctggctgtaggaatggccttttcgcctgaaagccctcgttggctattccagcaaggaaaggttactcaagcagaattagctgtaaaaagactgtatggaaaagaaatggttaccgaaattatgtttgatctgagagctagtggccaaagttcttcggagtccgaagccggctggtttgatcttttcagcaagcgttactggaaagttgtgagtgtgggggcagcactgtttttgttccagcagcttgctggtataaacgctgttgtatattactctacatcggtgttccgtagtgcaggcattgcatctgatgttgctgctagtgctcttgttggagcagccaatgtttttggtactatggttgcatcttctctaatggacaaacaaggaaggaaaagccttctgataacaagcttttctggaatgggtgcttcaatgctactcctagcattgtccttcacctggaaagctctggcaccttattctggtactcttgctgttgttggcactgttctgtacgtgctgtcatttgctctaggagcgggccctgttccagcgctacttcttcctgaaatatttgcctcgagaataagggccaaggctgtcgcattatctctaggcatgcactgggtatctaactttttcattggcctgtacttcctgagtgtcgtgagcaagtttgggatcagcaacgtgtatctgggatttgcatcagtatgtgcccttgcagttctgtacatagctgggaatgtggtcgagaccaaggggagatcacttgaagagattgaaagggagctaagtgtagcagaatgatgtacttttgctagtcatgctgtggcgccgttttggttatcgagaatgcaaccaagcgctcaaccgagcatccttggacctggagactctttctagtttcatgtagttttagaaataagcgaacggcaagagtaccaatcttaggtgacttggtgtgggttgtgtctgaaataagtgaattggattgtagaatttcagaaataagtgaattggattgtagaatttcagaaaaagtaacaaaaaaaaatacaaaaggatgatccttttgcatgtactggttcttctatttcttatcatattcagcctgcagatctcgtcgattcctttccaaaaaggttattagttgttacacttacacatcatcatcatgac

SEQ ID NO: 71891 - DNA, 1875 bp, Zea Mays
gtaagtcctccgagtcatgtagccatcagcaggaagcctttagaaaaaaaaacgaaattcctgcgttgaaagaagtccggccccatccgctgcttaactatcggatcttgcgaaggcatcgtcctcttcgtctccttcgtcgtcctatcttataatcgcatttcgaaatccccaaacggaagcatcgccactcttccgaacctgaacaatcaccaccgttattaagaagatgatgcgctgcgctgcaacgggcggcgggtgcgtcgcttcgtggagcggcgatcggagattgccggcggtcaacccctgcagcgtgcggatgccgacgggcaacactaggttcttttactgggggttctttggcagataaatttgggcggacaagaacattcatcctggatgcagtcccacttgctctaggtgcattcttgagtgcaacagctcaagatatccgcacaatgattattggccgattgcttgctggaattggtatcggggtctcatctgctcttgtacccctttacatatctgagatctcaccaactgaaattcgtggaacacttggtaccgttaatcaactttttatttgcattggaattcttgcagctttgttagctggattgcctctggcaggaaatcctgcctggtggaggacaatgtttggaattgctgtagttccatccattctgctggctgtaggaatggccttttcgcctgaaagccctcgttggctattccagcaaggaaaggttactcaagcagaattagctgtaaaaagactgtatggaaaagaaatggttaccgaaattatgtttgatctgagagctagtggccaaagttcttcggagtccgaagccggctggtttgatcttttcagcaagcgttactggaaagttgtgagtgtgggggcagcactgtttttgttccagcagcttgctggtataaacgctgttgtatattactctacatcggtgttccgtagtgcaggcattgcatctgatgttgctgctagtgctcttgttggagcagccaatgtttttggtactatggttgcatcttctctaatggacaaacaaggaaggaaaagccttctgataacaagcttttctggaatgggtgcttcaatgctactcctagcattgtccttcacctggaaagctctggcaccttattctggtactcttgctgttgttggcactgttctgtacgtgctgtcatttgctctaggagcgggccctgttccagcgctacttcttcctgaaatatttgcctcgagaataagggccaaggctgtcgcattatctctaggcatgcactgggtatctaactttttcattggcctgtacttcctgagtgtcgtgagcaagtttgggatcagcaacgtgtatctgggatttgcatcagtatgtgcccttgcagttctgtacatagctgggaatgtggtcgagaccaaggggagatcacttgaagagattgaaagggagctaagtgtagcagaatgatgtacttttgctagtcatgctgtggcgccgttttggttatcgagaatgcaaccaagcgctcaaccgagcatccttggacctggagactctttctagtttcatgtagttttagaaataagcgaacggcaagagtaccaatcttaggtgacttggtgtgggttgtgtctgaaataagtgaattggattgtagaatttcagaaataagtgaattggattgtagaatttcagaaagaagtaacaaaaaaaaatacaaaaggatgatccttttgcatgtactggttcttctatttcttatcatattcagcctgcagatctcgtcgattcctttccaaaaaggttattagttgttacacttacacatcatcatcatgac

SEQ ID NO: 71892 - DNA, 2220 bp, Zea Mays
gtcatgtagccatcagcaggaagcctttagaaaaaaaaagaacaatcaccaccgttattaagaagatgatgcgctgcgctgcaacgggcggcgggtgcgtcgcttcgtggagcggcgatcggagattgccggcggtcaacccctgcagcgtgcggatgccgacgggcaacgatgggtggtgcgccggcctgaggtcgcgggcggcggatctcgccggcctcgagatggccaacctgcgcggcggcgtcggggggctcttccgcgcgagcccgcgctacgggcgcttgcaagccacggcggcagttgaccctgaagatattccattggagaaggttcaagttaaatcctcaggacatgttctgccatatgttggcgttgcttgtttgggggctattctgtttggttaccatcttggtgtggtcaatggcgcacttgaatatctcgcgaaggatcttgggattgctgaaaatgctgtcttgcaggggtgggtggttagcacatccttggctggtgcaacactaggttcttttactgggggttctttggcagataaatttgggcggacaagaacattcatcctggatgcagtcccacttgctctaggtgcattcttgagtgcaacagctcaagatatccgcacaatgattattggccgattgcttgctggaattggtatcggggtctcatctgctcttgtacccctttacatatctgagatctcaccaactgaaattcgtggaacacttggtaccgttaatcaactttttatttgcattggaattcttgcagctttgttagctggattgcctctggcaggaaatcctgcctggtggaggacaatgtttggaattgctgtagttccatccattctgctggctgtaggaatggccttttcgcctgaaagccctcgttggctattccagcaaggaaaggttactcaagcagaattagctgtaaaaagactgtatggaaaagaaatggttaccgaaattatgtttgatctgagagctagtggccaaagttcttcggagtccgaagccggctggtttgatcttttcagcaagcgttactggaaagttgtgagtgtgggggcagcactgtttttgttccagcagcttgctggtataaacgctgttgtatattactctacatcggtgttccgtagtgcaggcattgcatctgatgttgctgctagtgctcttgttggagcagccaatgtttttggtactatggttgcatcttctctaatggacaaacaaggaaggaaaagccttctgataacaagcttttctggaatgggtgcttcaatgctactcctagcattgtccttcacctggaaagctctggcaccttattctggtactcttgctgttgttggcactgttctgtacgtgctgtcatttgctctaggagcgggccctgttccagcgctacttcttcctgaaatatttgcctcgagaataagggccaaggctgtcgcattatctctaggcatgcactgggtatctaactttttcattggcctgtacttcctgagtgtcgtgagcaagtttgggatcagcaacgtgtatctgggatttgcatcagtatgtgcccttgcagttctgtacatagctgggaatgtggtcgagaccaaggggagatcacttgaagagattgaaagggagctaagtgtagcagaatgatgtacttttgctagtcatgctgtggcgccgttttggttatcgagaatgcaaccaagcgctcaaccgagcatccttggacctggagactctttctagtttcatgtagttttagaaataagcgaacggcaagagtaccaatcttaggtgacttggtgtgggttgtgtctgaaataagtgaattggattgtagaatttcagaaataagtgaattggattgtagaatttcagaaagtgtgttccccttattttttcgctgcagttccttccatgctagacctatattactgacagttttcttcatgcgcccttatttccttttggcctcaagatttgcccgcagctttatgaggaaaggattagtgcgtcattatttctgtatatcacagcacagtagaagtaacaaaaaaaaatacaaaaggatgatccttttgcatgtactggttcttctatttcttatcatattcagcctgcagatctcgtcgattcctttccaaaaaggttattagttgttacacttacacatcatcatcatgac

SEQ ID NO: 71893 - DNA, 2112 bp, Zea Mays
gccatcagcaggaagcctttagaaaaaaaaacgaaattcctgcgttgaaagaagtccggccccatccgctgcttaactatcggatcttgcgaaggaacaatcaccaccgttattaagaagatgatgcgctgcgctgcaacgggcggcgggtgcgtcgcttcgtggagcggcgatcggagattgccggcggtcaacccctgcagcgtgcggatgccgacgggcaacgatgggtggtgcgccggcctgaggtcgcgggcggcggatctcgccggcctcgagatggccaacctgcgcggcggcgtcggggggctcttccgcgcgagcccgcgctacgggcgcttgcaagccacggcggcagttgaccctgaagatattccattggagaaggttcaagttaaatcctcaggacatgttctgccatatgttggcgttgcttgtttgggggctattctgtttggttaccatcttggtgtggtcaatggcgcacttgaatatctcgcgaaggatcttgggattgctgaaaatgctgtcttgcaggggtgggtggttagcacatccttggctggtgcaacactaggttcttttactgggggttctttggcagataaatttgggcggacaagaacattcatcctggatgcagtcccacttgctctaggtgcattcttgagtgcaacagctcaagatatccgcacaatgattattggccgattgcttgctggaattggtatcggggtctcatctgctcttgtacccctttacatatctgagatctcaccaactgaaattcgtggaacacttggtaccgttaatcaactttttatttgcattggaattcttgcagctttgttagctggattgcctctggcaggaaatcctgcctggtggaggacaatgtttggaattgctgtagttccatccattctgctggctgtaggaatggccttttcgcctgaaagccctcgttggctattccagcaaggaaaggttactcaagcagaattagctgtaaaaagactgtatggaaaagaaatggttaccgaaattatgtttgatctgagagctagtggccaaagttcttcggagtccgaagccggctggtttgatcttttcagcaagcgttactggaaagttgtgagtgtgggggcagcactgtttttgttccagcagcttgctggtataaacgctgttgtatattactctacatcggtgttccgtagtgcaggcattgcatctgatgttgctgctagtgctcttgttggagcagccaatgtttttggtactatggttgcatcttctctaatggacaaacaaggaaggaaaagccttctgataacaagcttttctggaatgggtgcttcaatgctactcctagcattgtccttcacctggaaagctctggcaccttattctggtactcttgctgttgttggcactgttctgtacgtgctgtcatttgctctaggagcgggccctgttccagcgctacttcttcctgaaatatttgcctcgagaataagggccaaggctgtcgcattatctctaggcatgcactgggtatctaactttttcattggcctgtacttcctgagtgtcgtgagcaagtttgggatcagcaacgtgtatctgggatttgcatcagtatgtgcccttgcagttctgtacatagctgggaatgtggtcgagaccaaggggagatcacttgaagagattgaaagggagctaagtgtagcagaatgatgtacttttgctagtcatgctgtggcgccgttttggttatcgagaatgcaaccaagcgctcaaccgagcatccttggacctggagactctttctagtttcatgtagttttagaaataagcgaacggcaagagtaccaatcttaggtgacttggtgtgggttgtgtctgaaataagtgaattggattgtagaatttcagaaataagtgaattggattgtagaatttcagaaaaagtaacaaaaaaaaatacaaaaggatgatccttttgcatgtactggttcttctatttcttatcatattcagcctgcagatctcgtcgattcctttccaaaaaggttattagttgttacacttacacatcatcatcatgac

SEQ ID NO: 71894 - DNA, 1753 bp, Zea Mays
aagcctttagaaaaaaaaacgaaattcctgcgttgaaagaagtccggccccatccgctgcttaactatcggatcttgcgaaggaacaatcaccaccgttattaagaagatgatgcgctgcgctgcaacgggcggcgggtgcgtcgcttcgtggagcggcgatcggagattgccggcggtcaacccctgcagcgtgcggatgccgacgggcaacactaggttcttttactgggggttctttggcagataaatttgggcggacaagaacattcatcctggatgcagtcccacttgctctaggtgcattcttgagtgcaacagctcaagatatccgcacaatgattattggccgattgcttgctggaattggtatcggggtctcatctgctcttgtacccctttacatatctgagatctcaccaactgaaattcgtggaacacttggtaccgttaatcaactttttatttgcattggaattcttgcagctttgttagctggattgcctctggcaggaaatcctgcctggtggaggacaatgtttggaattgctgtagttccatccattctgctggctgtaggaatggccttttcgcctgaaagccctcgttggctattccagcaaggaaaggttactcaagcagaattagctgtaaaaagactgtatggaaaagaaatggttaccgaaattatgtttgatctgagagctagtggccaaagttcttcggagtccgaagccggctggtttgatcttttcagcaagcgttactggaaagttgtgagtgtgggggcagcactgtttttgttccagcagcttgctggtataaacgctgttgtatattactctacatcggtgttccgtagtgcaggcattgcatctgatgttgctgctagtgctcttgttggagcagccaatgtttttggtactatggttgcatcttctctaatggacaaacaaggaaggaaaagccttctgataacaagcttttctggaatgggtgcttcaatgctactcctagcattgtccttcacctggaaagctctggcaccttattctggtactcttgctgttgttggcactgttctgtacgtgctgtcatttgctctaggagcgggccctgttccagcgctacttcttcctgaaatatttgcctcgagaataagggccaaggctgtcgcattatctctaggcatgcactgggtatctaactttttcattggcctgtacttcctgagtgtcgtgagcaagtttgggatcagcaacgtgtatctgggatttgcatcagtatgtgcccttgcagttctgtacatagctgggaatgtggtcgagaccaaggggagatcacttgaagagattgaaagggagctaagtgtagcagaatgatgtacttttgctagtcatgctgtggcgccgttttggttatcgagaatgcaaccaagcgctcaaccgagcatccttggacctggagactctttctagtttcatgtagttttagaaataagcgaacggcaagagtaccaatcttaggtgacttggtgtgggttgtgtctgaaataagtgaattggattgtagaatttcagaaataagtgaattggattgtagaatttcagaaaaagtaacaaaaaaaaatacaaaaggatgatccttttgcatgtactggttcttctatttcttatcatattcagcctgcagatctcgtcgattcctttccaaaaaggttattagttgttacacttacacatcatcatcatgac

SEQ ID NO: 71895 - DNA, 1894 bp, Zea Mays
gtgtgaaattcgtacacacattccagcgaaattcctgcgttgaaagaagtccggccccatccgctgcttaactatcggatcttgcgaaggaacaatcaccaccgttattaagaagatgatgcgctgcgctgcaacgggcggcgggtgcgtcgcttcgtggagcggcgatcggagattgccggcggtcaacccctgcagcgtgcggatgccgacgggcaacactaggttcttttactgggggttctttggcagataaatttgggcggacaagaacattcatcctggatgcagtcccacttgctctaggtgcattcttgagtgcaacagctcaagatatccgcacaatgattattggccgattgcttgctggaattggtatcggggtctcatctgctcttgtacccctttacatatctgagatctcaccaactgaaattcgtggaacacttggtaccgttaatcaactttttatttgcattggaattcttgcagctttgttagctggattgcctctggcaggaaatcctgcctgttccatccattctgctggctgtaggaatggccttttcgcctgaaagccctcgttggctattccagcaaggaaaggttactcaagcagaattagctgtaaaaagactgtatggaaaagaaatggttaccgaaattatgtttgatctgagagctagtggccaaagttcttcggagtccgaagccggctggtttgatcttttcagcaagcgttactggaaagttgtgagtgtgggggcagcactgtttttgttccagcagcttgctggtataaacgctgttgtatattactctacatcggtgttccgtagtgcaggcattgcatctgatgttgctgctagtgctcttgttggagcagccaatgtttttggtactatggttgcatcttctctaatggacaaacaaggaaggaaaagccttctgataacaagcttttctggaatgggtgcttcaatgctactcctagcattgtccttcacctggaaagctctggcaccttattctggtactcttgctgttgttggcactgttctgtacgtgctgtcatttgctctaggagcgggccctgttccagcgctacttcttcctgaaatatttgcctcgagaataagggccaaggctgtcgcattatctctaggcatgcactgggtatctaactttttcattggcctgtacttcctgagtgtcgtgagcaagtttgggatcagcaacgtgtatctgggatttgcatcagtatgtgcccttgcagttctgtacatagctgggaatgtggtcgagaccaaggggagatcacttgaagagattgaaagggagctaagtgtagcagaatgatgtacttttgctagtcatgctgtggcgccgttttggttatcgagaatgcaaccaagcgctcaaccgagcatccttggacctggagactctttctagtttcatgtagttttagaaataagcgaacggcaagagtaccaatcttaggtgacttggtgtgggttgtgtctgaaataagtgaattggattgtagaatttcagaaataagtgaattggattgtagaatttcagaaagtgtgttccccttattttttcgctgcagttccttccatgctagacctatattactgacagttttcttcatgcgcccttatttccttttggcctcaagatttgcccgcagctttatgaggaaaggattagtgcgtcattatttctgtatatcacagcacagtagaagtaacaaaaaaaaatacaaaaggatgatccttttgcatgtactggttcttctatttcttatcatattcagcctgcagatctcgtcgattcctttccaaaaaggttattagttgttacacttacacatcatcatcatgac

SEQ ID NO: 71896 - DNA, 2079 bp, Zea Mays
gtgtgaaattcgtacacacattccagcgaaattcctgcgttgaaagaagtccggccccatccgctgcttaactatcggatcttgcgaaggaacaatcaccaccgttattaagaagatgatgcgctgcgctgcaacgggcggcgggtgcgtcgcttcgtggagcggcgatcggagattgccggcggtcaacccctgcagcgtgcggatgccgacgggcaacgatgggtggtgcgccggcctgaggtcgcgggcggcggatctcgccggcctcgagatggccaacctgcgcggcggcgtcggggggctcttccgcgcgagcccgcgctacgggcgcttgcaagccacggcggcagttgaccctgaagatattccattggagaaggttcaagttaaatcctcaggacatgttctgccatatgttggcgttgcttgtttgggggctattctgtttggttaccatcttggtgtggtcaatggcgcacttgaatatctcgcgaaggatcttgggattgctgaaaatgctgtcttgcaggggtgggtggttagcacatccttggctggtgcaacactaggttcttttactgggggttctttggcagataaatttgggcggacaagaacattcatcctggatgcagtcccacttgctctaggtgcattcttgagtgcaacagctcaagatatccgcacaatgattattggccgattgcttgctggaattggtatcggggtctcatctgctcttgtacccctttacatatctgagatctcaccaactgaaattcgtggaacacttggtaccgttaatcaactttttatttgcattggaattcttgcagctttgttagctggattgcctctggcaggaaatcctgcctggtggaggacaatgtttggaattgctgtagttccatccattctgctggctgtaggaatggccttttcgcctgaaagccctcgttggctattccagcaaggaaaggttactcaagcagaattagctgtaaaaagactgtatggaaaagaaatggttaccgaaattatgtttgatctgagagctagtggccaaagttcttcggagtccgaagccggctggtttgatcttttcagcaagcgttactggaaagttgtgagtgtgggggcagcactgtttttgttccagcagcttgctggtataaacgctgttgtatattactctacatcggtgttccgtagtgcaggcattgcatctgatgttgctgctagtgctcttgttggagcagccaatgtttttggtactatggttgcatcttctctaatggacaaacaaggaaggaaaagccttctgataacaagcttttctggaatgggtgcttcaatgctactcctagcattgtccttcacctggaaagctctggcaccttattctggtacgtgctgtcatttgctctaggagcgggccctgttccagcgctacttcttcctgaaatatttgcctcgagaataagggccaaggctgtcgcattatctctaggcatgcactgggtatctaactttttcattggcctgtacttcctgagtgtcgtgagcaagtttgggatcagcaacgtgtatctgggatttgcatcagtatgtgcccttgcagttctgtacatagctgggaatgtggtcgagaccaaggggagatcacttgaagagattgaaagggagctaagtgtagcagaatgatgtacttttgctagtcatgctgtggcgccgttttggttatcgagaatgcaaccaagcgctcaaccgagcatccttggacctggagactctttctagtttcatgtagttttagaaataagcgaacggcaagagtaccaatcttaggtgacttggtgtgggttgtgtctgaaataagtgaattggattgtagaatttcagaaataagtgaattggattgtagaatttcagaaaaagtaacaaaaaaaaatacaaaaggatgatccttttgcatgtactggttcttctatttcttatcatattcagcctgcagatctcgtcgattcctttccaaaaaggttattagttgttacacttacacatcatcatcatgac

SEQ ID NO: 71897 - DNA, 2039 bp, Zea Mays
gtgtgaaattcgtacacacattccagcgaaattcctgcgttgaaagaagtccggccccatccgctgcttaactatcggatcttgcgaaggaacaatcaccaccgttattaagaagatgatgcgctgcgctgcaacgggcggcgggtgcgtcgcttcgtggagcggcgatcggagattgccggcggtcaacccctgcagcgtgcggatgccgacgggcaacgatgggtggtgcgccggcctgaggtcgcgggcggcggatctcgccggcctcgagatggccaacctgcgcggcggcgtcggggggctcttccgcgcgagcccgcgctacgggcgcttgcaagccacggcggcagttgaccctgaagatattccattggagaaggttcaagttaaatcctcaggacatgttctgccatatgttggcgttgcttgtttgggggctattctgtttggttaccatcttggggtgggtggttagcacatccttggctggtgcaacactaggttcttttactgggggttctttggcagataaatttgggcggacaagaacattcatcctggatgcagtcccacttgctctaggtgcattcttgagtgcaacagctcaagatatccgcacaatgattattggccgattgcttgctggaattggtatcggggtctcatctgctcttgtacccctttacatatctgagatctcaccaactgaaattcgtggaacacttggtaccgttaatcaactttttatttgcattggaattcttgcagctttgttagctggattgcctctggcaggaaatcctgcctggtggaggacaatgtttggaattgctgtagttccatccattctgctggctgtaggaatggccttttcgcctgaaagccctcgttggctattccagcaaggaaaggttactcaagcagaattagctgtaaaaagactgtatggaaaagaaatggttaccgaaattatgtttgatctgagagctagtggccaaagttcttcggagtccgaagccggctggtttgatcttttcagcaagcgttactggaaagttgtgagtgtgggggcagcactgtttttgttccagcagcttgctggtataaacgctgttgtatattactctacatcggtgttccgtagtgcaggcattgcatctgatgttgctgctagtgctcttgttggagcagccaatgtttttggtactatggttgcatcttctctaatggacaaacaaggaaggaaaagccttctgataacaagcttttctggaatgggtgcttcaatgctactcctagcattgtccttcacctggaaagctctggcaccttattctggtactcttgctgttgttggcactgttctgtacgtgctgtcatttgctctaggagcgggccctgttccagcgctacttcttcctgaaatatttgcctcgagaataagggccaaggctgtcgcattatctctaggcatgcactgggtatctaactttttcattggcctgtacttcctgagtgtcgtgagcaagtttgggatcagcaacgtgtatctgggatttgcatcagtatgtgcccttgcagttctgtacatagctgggaatgtggtcgagaccaaggggagatcacttgaagagattgaaagggagctaagtgtagcagaatgatgtacttttgctagtcatgctgtggcgccgttttggttatcgagaatgcaaccaagcgctcaaccgagcatccttggacctggagactctttctagtttcatgtagttttagaaataagcgaacggcaagagtaccaatcttaggtgacttggtgtgggttgtgtctgaaataagtgaattggattgtagaatttcagaaataagtgaattggattgtagaatttcagaaaaagtaacaaaaaaaaatacaaaaggatgatccttttgcatgtactggttcttctatttcttatcatattcagcctgcagatctcgtcgattcctttccaaaaaggttattagttgttacacttacacatcatcatcatgac

SEQ ID NO: 71898 - DNA, 1983 bp, Zea Mays
gtgtgaaattcgtacacacattccagcgaaattcctgcgttgaaagaagtccggccccatccgctgcttaactatcggatcttgcgaaggcatcgtcctcttcgtctccttcgtcgtcctatcttataatcgcatttcgaaatccccaaacggaagcatcgccactcttccgaacctgaacaatcaccaccgttattaagaagatgatgcgctgcgctgcaacgggcggcgggtgcgtcgcttcgtggagcggcgatcggagattgccggcggtcaacccctgcagcgtgcggatgccgacgggcaacactaggttcttttactgggggttctttggcagataaatttgggcggacaagaacattcatcctggatgcagtcccacttgctctaggtgcattcttgagtgcaacagctcaagatatccgcacaatgattattggccgattgcttgctggaattggtatcggggtctcatctgctcttgtacccctttacatatctgagatctcaccaactgaaattcgtggaacacttggtaccgttaatcaactttttatttgcattggaattcttgcagctttgttagctggattgcctctggcaggaaatcctgcctggtggaggacaatgtttggaattgctgtagttccatccattctgctggctgtaggaatggccttttcgcctgaaagccctcgttggctattccagcaaggaaaggttactcaagcagaattagctgtaaaaagactgtatggaaaagaaatggttaccgaaattatgtttgatctgagagctagtggccaaagttcttcggagtccgaagccggctggtttgatcttttcagcaagcgttactggaaagttgtgagtgtgggggcagcactgtttttgttccagcagcttgctggtataaacgctgttgtatattactctacatcggtgttccgtagtgcaggcattgcatctgatgttgctgctagtgctcttgttggagcagccaatgtttttggtactatggttgcatcttctctaatggacaaacaaggaaggaaaagccttctgataacaagcttttctggaatgggtgcttcaatgctactcctagcattgtccttcacctggaaagctctggcaccttattctggtacgtgctgtcatttgctctaggagcgggccctgttccagcgctacttcttcctgaaatatttgcctcgagaataagggccaaggctgtcgcattatctctaggcatgcactgggtatctaactttttcattggcctgtacttcctgagtgtcgtgagcaagtttgggatcagcaacgtgtatctgggatttgcatcagtatgtgcccttgcagttctgtacatagctgggaatgtggtcgagaccaaggggagatcacttgaagagattgaaagggagctaagtgtagcagaatgatgtacttttgctagtcatgctgtggcgccgttttggttatcgagaatgcaaccaagcgctcaaccgagcatccttggacctggagactctttctagtttcatgtagttttagaaataagcgaacggcaagagtaccaatcttaggtgacttggtgtgggttgtgtctgaaataagtgaattggattgtagaatttcagaaataagtgaattggattgtagaatttcagaaagtgtgttccccttattttttcgctgcagttccttccatgctagacctatattactgacagttttcttcatgcgcccttatttccttttggcctcaagatttgcccgcagctttatgaggaaaggattagtgcgtcattatttctgtatatcacagcacagtagaagtaacaaaaaaaaatacaaaaggatgatccttttgcatgtactggttcttctatttcttatcatattcagcctgcagatctcgtcgattcctttccaaaaaggttattagttgttacacttacacatcatcatcatgac

SEQ ID NO: 71899 - DNA, 1122 bp, Zea Mays
ctcgatcttttcctcttagaaatccaaggctgttaagaagtgactgtggaagatttgctggtgaattatgaccccactttgtagggaacgtaggctgtgctcacgcagcctccgtgctcgtatgagtacgggcaattcaacgatgccgatgccatccccacaaatgaagctatgaagaagcaaatagctgtagcatccaaggctatgcctttttactgtgctcttccaactttatctgagtatatgatcgagagtggatggacccggtgttactttaatatcagcgaaatgggtttttctgcatacctttgttatatggctatgtatctcatttttgtggagtttggaatttactggatgcacagagagttgcatgacataaagccactatacaaacatctgcatgcgacccaccatatttacaacaaggagaacaccttgtctccgtttgctggactcgcgtttcacccactggatggtattctgcaagcgataccgcatgtgcttgcgctcttcctcctcccaacgcacttcaggacgcacatcgctctcgtgttcttggagggcgtgtggacgacaaacatccacgactgcattcacggcaaggtatggccagtcatgggcgctgggtatcacaccatccaccatacgacttaccgccacaactatggccactacaccgtctggatggactggatgtttggtacgctccgtgagccagatgatatcctcaagaaggcctgagttcgtcgtagctgtggttttcctacggtgctggatgtgcttggtctgttctgtccccagtgcctctaatccgctgagcctgttcagcgctctgtttctgtaggctttggtgtgctatttagtttgctaggttttatatgttgtgcttattctgtaatttagtgatgtttgtctcatgacgcaacggagttcaggacgaataaaaagaaagatttgctagacacattctggattccagctgcctgtacaatgttgcacctcagctgtcagtgtaggatgtaaaatggattggcttctaccttgtgagttcacgcgttgttcagtctatgaatgttgcttatatattgtgtaaaacagaggtggccttgcttcctttcc

SEQ ID NO: 71900 - DNA, 1015 bp, Zea Mays
ggatacactacatttgaagtgctcctgtgaacacatgcttcatgccatccccacaaatgaagctatgaagaagcaaatagctgtagcatccaaggctatgcctttttactgtgctcttccaactttatctgagtatatgatcgagagtggatggacccggtgttactttaatatcagcgaaatgggtttttctgcatacctttgttatatggctatgtatctcatttttgtggagtttggaatttactggatgcacagagagttgcatgacataaagccactatacaaacatctgcatgcgacccaccatatttacaacaaggagaacaccttgtctccgtttgctggactcgcgtttcacccactggatggtattctgcaagcgataccgcatgtgcttgcgctcttcctcctcccaacgcacttcaggacgcacatcgctctcgtgttcttggagggcgtgtggacgacaaacatccacgactgcattcacggcaaggtatggccagtcatgggcgctgggtatcacaccatccaccatacgacttaccgccacaactatggccactacaccgtctggatggactggatgtttggtacgctccgtgagccagatgatatcctcaagaaggcctgagttcgtcgtagctgtggttttcctacggtgctggatgtgcttggtctgttctgtccccagtgcctctaatccgctgagcctgttcagcgctctgtttctgtaggctttggtgtgctatttagtttgctaggttttatatgttgtgcttattctgtaatttagtgatgtttgtctcatgacgcaacggagttcaggacgaataaaaagaaagatttgctagacacattctggattccagctgcctgtacaatgttgcacctcagctgtcagtgtaggatgtaaaatggattggcttctaccttgtgagttcacgcgttgttcagtctatgaatgttgcttatatattgtgtaaaacagaggtggccttgcttcctttcc

SEQ ID NO: 71901 - DNA, 1021 bp, Zea Mays
cactggttttaccatccttcgtgttctttgcaaaaccgctcatcatgatgccatccccacaaatgaagctatgaagaagcaaatagctgtagcatccaaggctatgcctttttactgtgctcttccaactttatctgagtatatgatcgagagtggatggacccggtgttactttaatatcagcgaaatgggtttttctgcatacctttgttatatggctatgtatctcatttttgtggagtttggaatttactggatgcacagagagttgcatgacataaagccactatacaaacatctgcatgcgacccaccatatttacaacaaggagaacaccttgtctccgtttgctggactcgcgtttcacccactggatggtattctgcaagcgataccgcatgtgcttgcgctcttcctcctcccaacgcacttcaggacgcacatcgctctcgtgttcttggagggcgtgtggacgacaaacatccacgactgcattcacggcaaggtatggccagtcatgggcgctgggtatcacaccatccaccatacgacttaccgccacaactatggccactacaccgtctggatggactggatgtttggtacgctccgtgagccagatgatatcctcaagaaggcctgagttcgtcgtagctgtggttttcctacggtgctggatgtgcttggtctgttctgtccccagtgcctctaatccgctgagcctgttcagcgctctgtttctgtaggctttggtgtgctatttagtttgctaggttttatatgttgtgcttattctgtaatttagtgatgtttgtctcatgacgcaacggagttcaggacgaataaaaagaaagatttgctagacacattctggattccagctgcctgtacaatgttgcacctcagctgtcagtgtaggatgtaaaatggattggcttctaccttgtgagttcacgcgttgttcagtctatgaatgttgcttatatattgtgtaaaacagaggtggccttgcttcctttcc

SEQ ID NO: 71902 - DNA, 1016 bp, Zea Mays
ctttgctcttgtgcactggctgccctccatgcatctataacaatgccatccccacaaatgaagctatgaagaagcaaatagctgtagcatccaaggctatgcctttttactgtgctcttccaactttatctgagtatatgatcgagagtggatggacccggtgttactttaatatcagcgaaatgggtttttctgcatacctttgttatatggctatgtatctcatttttgtggagtttggaatttactggatgcacagagagttgcatgacataaagccactatacaaacatctgcatgcgacccaccatatttacaacaaggagaacaccttgtctccgtttgctggactcgcgtttcacccactggatggtattctgcaagcgataccgcatgtgcttgcgctcttcctcctcccaacgcacttcaggacgcacatcgctctcgtgttcttggagggcgtgtggacgacaaacatccacgactgcattcacggcaaggtatggccagtcatgggcgctgggtatcacaccatccaccatacgacttaccgccacaactatggccactacaccgtctggatggactggatgtttggtacgctccgtgagccagatgatatcctcaagaaggcctgagttcgtcgtagctgtggttttcctacggtgctggatgtgcttggtctgttctgtccccagtgcctctaatccgctgagcctgttcagcgctctgtttctgtaggctttggtgtgctatttagtttgctaggttttatatgttgtgcttattctgtaatttagtgatgtttgtctcatgacgcaacggagttcaggacgaataaaaagaaagatttgctagacacattctggattccagctgcctgtacaatgttgcacctcagctgtcagtgtaggatgtaaaatggattggcttctaccttgtgagttcacgcgttgttcagtctatgaatgttgcttatatattgtgtaaaacagaggtggccttgcttcctttcc

SEQ ID NO: 71903 - DNA, 1017 bp, Zea Mays
gaatagtgccctttgttgagaggcatatagcatgtgtaaagtgatgccatccccacaaatgaagctatgaagaagcaaatagctgtagcatccaaggctatgcctttttactgtgctcttccaactttatctgagtatatgatcgagagtggatggacccggtgttactttaatatcagcgaaatgggtttttctgcatacctttgttatatggctatgtatctcatttttgtggagtttggaatttactggatgcacagagagttgcatgacataaagccactatacaaacatctgcatgcgacccaccatatttacaacaaggagaacaccttgtctccgtttgctggactcgcgtttcacccactggatggtattctgcaagcgataccgcatgtgcttgcgctcttcctcctcccaacgcacttcaggacgcacatcgctctcgtgttcttggagggcgtgtggacgacaaacatccacgactgcattcacggcaaggtatggccagtcatgggcgctgggtatcacaccatccaccatacgacttaccgccacaactatggccactacaccgtctggatggactggatgtttggtacgctccgtgagccagatgatatcctcaagaaggcctgagttcgtcgtagctgtggttttcctacggtgctggatgtgcttggtctgttctgtccccagtgcctctaatccgctgagcctgttcagcgctctgtttctgtaggctttggtgtgctatttagtttgctaggttttatatgttgtgcttattctgtaatttagtgatgtttgtctcatgacgcaacggagttcaggacgaataaaaagaaagatttgctagacacattctggattccagctgcctgtacaatgttgcacctcagctgtcagtgtaggatgtaaaatggattggcttctaccttgtgagttcacgcgttgttcagtctatgaatgttgcttatatattgtgtaaaacagaggtggccttgcttcctttcc

SEQ ID NO: 71904 - DNA, 2080 bp, Zea Mays
gcccaaaccgcaccaacggccaacgcacaaaaaaccattctcagcctcctctcctactcgagcagctagcccagtcaatcattctgcttggattggatccaccttgtctctgaaaatagcttcgagaccttagcgcccaagaaacggtgaccgaccgtccctgcgctagtagcaacagcaacaatggcggcgaagcacctccacgacgggtacgagcaggacggcgaccagcccggcgacaaccgcatgcgccgcctgccgtccttgtcgacggtgattcgggaggcgatgatgcagaaggagatgcagaacctgctcaggtgtctggagcctctcatccgccgagtggtgcaagaggaggtcgaggcagggctcaggctcatgcagagcctgcgctacatcgagagggcgccggcggagacgccggcggcggaacgggcggcgtggaagctggcgttccggacgccgccgcagctgccgatcttcacgggcagcaagatcgagggcgaggccgggaggccgctggaggtggtcctcgtggacgcgtgcaccggctcgcccgccgcgcccccggtcccgcgggcgctgcgcgtggagctggtcccggtgttgggcgacttcccgccggacgggcgcgaggactgggccgcggacgagttggagaggagcgtcgtgagggagcgcgagggcaggcgcccgctcctgaccggcgacgtcggtctcaccctgagggacgggcgcgccacggtgggcgagctccggttcacggacaactcgtcctgggtccgcagccgcaggttccgcatcgccgcccgcgcggcctgcggcggcggcggcggcggcggcgcgcgggtccaggaggccgtgacggaggccttcgtggtcaaggaccacaggggcgagcggtgccgcaagcactacccgcccgccctcacggacgacgtgtggaggctggagaagatccgcatgggaggcgcgttccacacgaggctgatgtgccgcaacgtcggcaccgtgcaggagttcgtccggatgctcatggtgaaccccgacgagcttcgcgcgattctgggcgacggcatgagagaccgcatgtgggaggcggcgacgaggcacgccaggacctgcgcccccgacggcaaggtgtacgcgcacgccacgccgcacggcaccatcttcgtggactccatcttcaacgtcgtgagggtcgacgtcggcggcgtcgagtggccgctgcagcagctgaacaggggccagacgatgatggtgcagcagatgctgcaggacgcgtacgagcaccgccacagcctccaggacgcggccgaggaggccttcatgctcgacggccacaccgacaccaacgctccgctgctgcagaacgcagcgcacgtcgcggcgccggcgccggtggacacaccgctctggttccagaacgccgcggagatggacttccccgacgacgacgacgacgacgacgtggttcccgttccccaggtcaacagcttcggctaccagtggactggccaagcgttccacatgtgcgctggatgggtaagccccgaagaagacatgaacgaggaactcgagtgaagatcgctagcaaggttccagcaacaggatgaacattaaaaaaaaactacaacgtggttgtatgtccacgaccaggatcatgtgtgtgagtgtgtctgtgtgtgttcatgtaacagcagggtctaagggtaggtgagttcgagctgcccttcactgcatcgccggacgcgccgccgagcgtccgcgagcagcgagaagcggcgagcgagctagtgcaggattctttgcctggtcgtggagcgtcctgctctgctcctgctcctgctcccaaagatgagttgagttgcatgtaaatgtaacgtcggagcagcgacgcgtggggctggctggtatatgcctacaactacaagggctagcagcagaactagttgagtaaacatatactagttctgatttcttctttgatattttttcaaaacttttttttttgtgtcctgtaaacaccaaggtcgcaataaagaaatgaaaccgccttttttttacataaaca

SEQ ID NO: 71905 - DNA, 1188 bp, Zea Mays
caggaggacacgaggggtaccttcaggagcctcatcaccattttcagtcagccgcctgcccctcaattcaccgcccctgccccctgtttgtctcgtcgctgctacccacccatgctccccccaccaccatggcctcgacctcgtccgtctggtcggtgtggatcgccctgtcgctgacgctaacgcttgcctcggcatcaccagctgacgggcaagggggcggaggagcacactgcccgcccgtgctatgcggcggcgtggagatcgccttcccgttcgggatcgtccaggagcaggcgacggccaccaactgcggcgggatcgggttccaggtccgctgcgtcaacggcacgccgtacctcggatacagccggtacgaccactggctccagatcctcagcgtctcctacaccaacgcctccttgctcgtcgccgacacccacaagctcgagaagctgggagcctcggacggcggcggcgactccgccgtctgccgcatccccgggaacaacagctccaccaaggtcgccctcccgttctccatcagccctctcaaccaggacctcatcctgtacaactgcaccaaggcgccggcgccggcgccggacgaggaggggcttgtggagatgacgagatgcggcaaccgcactttcgcccgcatcggagggcgttacggcgagccggacgacgacggcggatactccttggacggctgcggtgccactgtcgtgcccgtgcttgtaaaggacgatggcaaggcgaacgcgagcgactacgagcaactcataagtggcggcttcctcttgacatggcagtggcagacaagcaaatgactagaagggctccaaccaagctagcgcttaaatctgcctaaagcttcctagtcctaggcatgcaattcaacgcgttgtacctttttttgaatagtcatagtatttttttctcgtgttaaaattcgatgcttcgatacatacgtgtgttatactattatatgaccatacataatcatccaccatctccatttgttccattttcatgcatgggtcaaaacaaatcctaaaacaatgttgtttcgtctatcgccgcctaagcatcgctgaccactttttaaagctaaggttataggtgcaactattttttcccctcaccgatagtctggtctggtatttatttattacctaatttagg

SEQ ID NO: 71906 - DNA, 1764 bp, Zea Mays
accttcaccacttgcgatgccatgctcccatggttgcgggcttgcggctctgtccttgtcgcggctctccctcgtgtcctgggtctggatggctgcatgggcgcgggctcgtggacacggcgtgcggcgaccggacgctggtcgccgtcgtcaggcgccccaacgtgcctggcagctactacttcttggagggatgcaacgccaccgtcgtgcccatgctcgcgaggcccggcgacgtggacggtggacccagcgaactacagggagttcgtccgtgagggattcctcttgacatggcaactgccgccgccgccgtcaccagccggtaccaaagggaatggcaggaagattccactaatagtttcgatttcagtggctgcaagcttgctcctaccatgtatatatgtgttggtatggcataggcaaaaactggagttttttctatgcaagaagaccagcagtgccatagaagagaacattgaggccctaatattagcacatggatcactagctccaaaaaggtacaggtactcagaagtaacaaagataacatcttctcttaatattaagcttggggaaggtggttatggcatggttttcaagggaaggctagatgatggtcgtctagttgcagtgaaattcctgcatgactccaaaggtgacggtgaggagtttgtgaacgaggttatgagtattggcaggacatcacacattaatatcgttagcttatttgggttttgtttggaaggctcaaagcgggccctaatatatgagtatatgtcaaatggttctttggataagtatatatacacagagaatccgaaggcagttttaggatgggataagctctataccatagcaattgggattgctagagggttggaatacttgcaccacagttgtaatacacgcatagtccatttcgacatcaagcctcaaaatatccttctggatcagaactttcacccaaagattgctgattttggtttggccaagttgtgtcatatgaaagagagcaagctttctatgactggtgccagaggtacgcctgggttcatagctcctgaagtgcactctcggacattcggggttgtttcaacaaaagcagacgtttatagttatggaatgatgctgctagagatggttggaggcagaaaaaatgttaactcagcggctcaagagtcaagtgaaaagtattttccacattggatttacgaccactttggccaagaggatggactgcaggcgtgtgaggtcacacgtgaaaatgaagggatcgcaaaaaaactgagtgtgattggcctatcgtgcatccaaatattaccaatgcatcgccctaccatcggaaaggtcatggaaatgttcgagagaggatcggatgaactggacatgccaccaaggcaaaacttcagccaaatattatccagtacacagtttgaatgcggaaaccatgagcatgattagtggcaccaaagcaaaagcttatagtgaagtgctaaagatgaaggagataagcgtcgtgaactcaaaaaccatacaacggttgccaactctgtaaaacagttagttatctactacattggaaatgaacattaaatcgggagccaccaccaaaatacggtgtctccaaacaggagttggacttaaataatataaaatatataatggttgtgtcatgatattcggtgaactatggtattataaattgtagtttaaaaaaaacaatgttccgaagcagtcccttgtatgcattcgtcttgtttc

SEQ ID NO: 71907 - DNA, 2874 bp, Zea Mays
acacgcttagcatgttggactgtacttatcgtttcggtccgatggcccaaatgacacgcacgggcaattgggtcgtgcccgtgtcagcccggcacaaaaatgggcacggacgcaccgtcgcaccgcacgcaccgtcgcacgcgacgcgtattttaccgcgactgcgacgcctcgtttctgtcggctccctcgtccctctcctaaaccctaacgcctccggttccagtctccagggcgctgccgtcgctgccctgtcaccgtctcttccatgctcgcctttggcgaccaccggtcgcatctgatgcggcgtttcattgccggatccctaatgtgcttcgttctatccaatgctcaaggctcaagcgctcaacgaacttcgctaagaggcagcagtaagtgacttttcccattcgtgcctgttcggccggtttgcattcgggccttttcacattcgtgcctttccccaagaggcagcagtaagtgctttctccttaaattctcacctagttgaatcatgctgactaatgggctcgagctcacttgctttatttatacagcagtttctcacctagttgaatcatgccttttcccagagtaccccagtttgcttgctactcacttgctagatctatattcatttgctctacaatggggaggaagagggtagctggtagaaaagctttttgtagtagtaggatagatgattccagcaatcctatttctagtgaattctcccctaccatggaagtccctgggcctcgacctgtttatagtccctccttacgagtaccaggagatggtggtggcactgagcctgtatctggttctagttccttttccttaccactaccagtagatgctagtaaagggttgagtctggttctagtcccttaacagcagatggtgatattagtgttgatgtgtcagtaaagggtgctaaaccatctatttctagggcagagtgctggaagcatatggataagcgggagattatcgagaatggtgtatgcaaactcaactaaactttgctgcggacggcactgtaagtacttgggtttacaatccacaattagctagtgaagaaattattaaatacattgtttctaaagacttgcctattatgatgggagaaagccctaattttaagaatctgattcagtgtgctttctgcccacaataccaacctgttagtagaactactataaaatcaggtctcagtatcacaaacaacttgctgttcttaaagaaaatttaaaaaaaatcagttttcgtttgctttaacttcatatatttggacttcatcacatcaaaagactagttacatttctgttgttgcacactatttggataatttatattgtcttcataagcgtgttataggttttagagtgatgtatgattcacatactggtactgcaattgctaatcatattcttgaggtggttaatgattttaacataaggaataagattttgtctattactcttaataatgcttcctcaaatataaatgcgatagaatctcttacccctcatctgcagtcatacatagatggttatgttgtccaacaaaggtgtgtgtgccacattatcaatctagttgttcaggatggcataacagttgttagtaagtatttggataatgttcgtgctgctgttcgtttcataactagtactcctcaaatgattaaaaaatttggtgagtattgcaaggcaaataatttgaaatcaaggaaatttggcctcgatatgaagataagatggaattcaacctaccttatgcttaagaaactggaaggttataaaaagattataactgtctttgtgaatgttaatgctcttgatattgatttggtgctaactgaagctgattggtatatggtgaaacattttagagagttcttgatgcccttttatgtagccacaaatgttttatcaggtgtttactatcttacatcctgcttagtcattgattacatttggttaattgttgagtcatttgctaagcacagatctgattcccttctttgcactgttgttgctccaatggaattaaaatttctaaaatattttgataacatatcccatatatattgctttgcaactattttggatcctagaaaaaaacttgatgggtacaatctactttagaaggaattggtgacttgctatatatggactattcagatggttttaatcatgtgaaagataaactatttcgtgtttttgcttttactataacaaatatggtgaaaatgatgttacagaaacaatggatgaaactgatatagaacaatcagatagttctttgacagcccacttatggaagagatcgaagggaaaagaatttgctaactcaacagtaaatcaaaggtggaatcctaatgttgaattgaattattatatgtctactaactttgcagccactgatcgcaccttgaaaggtgataaggtgaaattacttgaatggtggagggaacacaaaattattgaagaaagtagatcctatcttggacctgagacagtggaggccatcacatgccttaaggattggaaaagagcagaagatagaaagcagcatcaacttgaagattctaagattgaacaagcttttgctgatttcagccatgattagtgttacttcttttatctagttcattctgttattatggactgttaatgtaatatggactgtggactgtggacattaaaacttttaccgatctgtactcttttccttacagagggagtcccacactggggtgtaaggtttttaacgaggcagatcgaggaataaaatgaattttccctcaaaacttgtttgtgttcattgctgttcattttaacaagccccacattgtttatgttgtttgag

SEQ ID NO: 71908 - DNA, 1612 bp, Zea Mays
cacgcaccgtcgcacgcgacgcgtattttaccgcgactgcgacgcctcgtttctgtcggctccctcgtccctctcctaaaccctaacgcctccggttccagtctccagggcgctgccgtcgctgccctgtcaccgtctcttccatgctcgcctttggcgaccaccggtcgcatctgatgcggcgtttcattgccggatccctaatgtgcttcgttctatccaatggttcgttctatctcaaaaccctaatcccgattcacaagtatgtttcctatgaatcgaagcgccgtcgccgacgccagctcaaggctcaagcgctcaacgaacttcgctaagaggcagcagtaagtgacttttcccattcgtgcctgttcggccggtttgcattcgggccttttcacattcgtgcctttccccaagaggcagcagtaagtgctttctccttaaattctcacctagttgaatcatgctgactaatgggctcgagctcacttgctttatttatacagcagtttctcacctagttgaatcatgccttttcccagagtaccccagtttgcttgctactcacttgctagatctatattcatttgctctacaatggggaggaagagggtagctggtagaaaagctttttgtagtagtaggatagatgattccagcaatcctatttctagtgaattctcccctaccatggaagtccctgggcctcgacctgtttatagtccctccttacgagtaccaggagatggtggtggcactgagcctgtatctggttctagttccttttccttaccactaccagtagatgctagtaaagggttgagtctggttctagtcccttaacagcagatggtgatattagtgttgatgtgtcagtaaagggtgctaaaccatctatttctagggcagagtgctggaagcatatggataagcgggagattatcgagaatggtataaaaagttatattgttatatgtcactattgtaaaactgagttgagtgcagattctgctggtggcactaggcatttgaatcgacacttcaaagcttgtttaaaaaagccactgatcgcaccttgaaaggtgataaggtgaaattacttgaatggtggagggaacacaagtatagtttcccagtattatcttattttgctagagatattcttcttgttcctgtttcgactgtttcttctgatgccacattcaacatattgggtagaattattgaagaaagtagatcctatcttggacctgagacagtggaggccatcacatgccttaaggattggaaaagagcagaagatagaaagcagcatcaacttgaagattctaagattgaacaagcttttgctgatttcagccatgattagtgttacttcttttatctagttcattctgttattatggactgttaatgtaatatggactgtggactgtggacattaaaacttttaccgatctgtactcttttccttacagagggagtcccacactggggtgtaaggtttttaacgaggcagatcgaggaataaaatgaattttccctcaaaacttgtttgtgttcattgctgttcattttaacaagccccacattgtttatgttgtttgag

SEQ ID NO: 71909 - DNA, 2433 bp, Zea Mays
cctcgtttctgtcggctccctcgtccctctcctaaaccctaacgcctccggttccagtctccagggcgctgccgtcgctgccctgtcaccgtctcttccatgctcgcctttggcgaccaccggtcgcatctgatgcggcgtttcattgccggatccctaatgtgcttcgttctatccaatggttcgttctatctcaaaaccctaatcccgattcacaagtatgtttcctatgaatcgaagcgccgtcgccgacgccagctcaaggctcaagcgctcaacgaacttcgctaagaggcagcagtaagtgacttttcccattcgtgcctgttcggccggtttgcattcgggccttttcacattcgtgcctttccccaagaggcagcaggcagagtgctggaagcatatggataagcgggagattatcgagaatggtataaaaagttatattgttatatgtcactattgtaaaactgagttgagtgcagattctgctggtggcactaggcatttgaatcgacacttcaaagcttgtttaaaaaaggtagggaaaacttttggtgcaggtatgcaaactcaactaaactttgctgcggacggcactgtaagtacttgggtttacaatccacaattagctagtgaagaaattattaaatacattgtttctaaagacttgcctattatgatgggagaaagccctaattttaagaatctgattcagtgtgctttctgcccacaataccaacctgttagtagaactactataaaatcaggtctcagtatcacaaacaacttgctgttcttaaagaaaatttaaaaaaaatcagttttcgtttgctttaacttcatatatttggacttcatcacatcaaaagactagttacatttctgttgttgcacactatttggataatttatattgtcttcataagcgtgttataggttttagagtgatgtatgattcacatactggtactgcaattgctaatcatattcttgaggtggttaatgattttaacataaggaataagattttgtctattactcttaataatgcttcctcaaatataaatgcgatagaatctcttacccctcatctgcagtcatacatagatggttatgttgtccaacaaaggtgtgtgtgccacattatcaatctagttgttcaggatggcataacagttgttagtaagtatttggataatgttcgtgctgctgttcgtttcataactagtactcctcaaatgattaaaaaatttggtgagtattgcaaggcaaataatttgaaatcaaggaaatttggcctcgatatgaagataagatggaattcaacctaccttatgcttaagaaactggaaggttataaaaagattataactgtctttgtgaatgttaatgctcttgatattgatttggtgctaactgaagctgattggtatatggtgaaacattttagagagttcttgatgcccttttatgtagccacaaatgttttatcaggtgtttactatcttacatcctgcttagtcattgattacatttggttaattgttgagtcatttgctaagcacagatctgattcccttctttgcactgttgttgctccaatggaattaaaatttctaaaatattttgataacatatcccatatatattgctttgcaactattttggatcctagaaaaaaacttgatgggtacaatctactttagaaggaattggtgacttgctatatatggactattcagatggttttaatcatgtgaaagataaactatttcgtgtttttgcttttactataacaaatatggtgaaaatgatgttacagaaacaatggatgaaactgatatagaacaatcagatagttctttgacagcccacttatggaagagatcgaagggaaaagaatttgctaactcaacagtaaatcaaaggtggaatcctaatgttgaattgaattattatatgtctactaactttgcagccactgatcgcaccttgaaaggtgataaggtgaaattacttgaatggtggagggaacacaaaattattgaagaaagtagatcctatcttggacctgagacagtggaggccatcacatgccttaaggattggaaaagagcagaagatagaaagcagcatcaacttgaagattctaagattgaacaagcttttgctgatttcagccatgattagtgttacttcttttatctagttcattctgttattatggactgttaatgtaatatggactgtggactgtggacattaaaacttttaccgatctgtactcttttccttacagagggagtcccacactggggtgtaaggtttttaacgaggcagatcgaggaataaaatgaattttccctcaaaacttgtttgtgttcattgctgttcattttaacaagccccacattgtttatgttgtttgag

SEQ ID NO: 71910 - DNA, 1651 bp, Zea Mays
gaagatacccgttgcaacgcgtcgagcggcaacgctggcacggagctcaagtctccacacaacctccgccgccgggaggaccaacacgtcagtgacggcagctgactgcagaggatctcatcgcccgccgaccgccgcaaccgcgaccgcgagcctcgattttgaactgaactgaaaaacctagaattcttttagggtttccgaggtttctctttctcgcgtttccactgtctggtcttccccgatcgccgcgaaagcagtaaagagtccgcaatctttgccgcccccaccctcatcctctgctctcgtatcgtctcctctccacttcctctttctctcctctacaagggtatccactatccagaatcacctctatcatcaggatgcgggaggcacagttgggctcccacacgattcagacgcacggagtgagactggccagaaagcacacacacgactgggttgttctgattcttctggctgcactggtggttgccgtgcattacgctcccccgttcagtcgatttgtcgggaaggatatgatgactgatattaggtacccggtgaaaccaagcacagtaccagcatgggctgtccctatgatctctatactctgtccctggctcgtcttcatatccatatatgttgccaggagagacgtttatgatctgcatcacgctgcactaggtgttcttttcgctgtgctgataactgcagtttttaccgatgtgataaagactgcagtagggagaccgaggccagacttcttctggcgatgctttcctgatggaaagcagttatacgatcaggtgattggcgatgtgatttgccatggtgataaaaacttcttaaaagatgggcgcaagagctttcctagtggccacacttcgtggtcttttgctggtcttggatttttgtcactctacctgtcaggcaaaattaaggccttcaatcgccaaggtcacgtggccaaactttgcatagtgatccttccgcttcttcttgcttcactcgttggggtttcaagagtagatgattatcgacaccactgggaggatgtgtttgttggcggtcttattggttgtagaccgtatgcatacttccatatgctggaagaacttcaagcggcaaattcaaacaacgcacaaaaccaacagtccacaggtgatcatcgcattggcatgtccgagcagcagcataacaggacatcaagaaacgatttggaatctggaaccgtgtaacatgcctcctgcacttttactgaagtagcagcagcgatgtacattggacagtaagtgcaacctaacctagtatgcgtgtactcgacatgtgttacaatctatataattagaggtatatagtttctccttacccagtgttagcctgcttcatcttgtgtgaaatcagaaggcagtaaggcctaaccctagatgttctaggtctacctgtggccaaattagttgtaagagttgctagtggaggcactgataaggaacttattccagtaatagaaaaaccagcagaaagtagagtagaaagaaaatgacaggcacatctcctaaacatcgtggtgcatgttgcaccgtccaatgggttccaagactcgttctgttcgtatatcgaagggaaaaatacacatctgttttgtctc

SEQ ID NO: 71911 - DNA, 2238 bp, Zea Mays
gaagatacccgttgcaacgcgtcgagcggcaacgctggcacggagctcaagtctccacacaacctccgccgccgggaggaccaacacgtcagtgacggcagctgactgcagaggatctcatcgcccgccgaccgccgcaaccgcgaccgcgagcctcgattttgaactgaactgaaaaacctagaattcttttagggtttccgaggtttctctttctcgcgtttccactgtctggtcttccccgatcgccgcgaaagcagtaaagagtccgcaatctttgccgcccccaccctcatcctctgctctcgtatcgtctcctctccacttcctctttctctcctctacaagggtatccactatccagaatcacctctatcatcaggtgaactgtttctcctctctctctttttcatttcatttttattccagaaagtattgttggtttgcggctttacttcctctgtgcagtaggcagtgccagttgaagtgtagttcttttgtctccgatcatggtcgcctgtgatttctgttcttgcgagggtttggtgcttgccgcggtggggattggtgcgggttttcgtcaaacggcgcctcatgtgttttacttcttacagtaactattttagttgcggacttgcggtttttctttgcatcgtgtgacaagttctctcgaagaacagaactgaaataaacccagcattactcaggtttggtgatacgatcgaagcagactactcttagcaacccattcagatgaatctgctctgggctgcactatgctagtttataatttgaaattaagctgatgaaactcatttatatggccgcaatgccgtcttcagtatattgagtattttggtactggtaattggttctattcatttcatccatttgttgtcaacaaaacaggatgcgggaggcacagttgggctcccacacgattcagacgcacggagtgagactggccagaaagcacacacacgactgggttgttctgattcttctggctgcactggtggttgccgtgcattacgctcccccgttcagtcgatttgtcgggaaggatatgatgactgatattaggtacccggtgaaaccaagcacagtaccagcatgggctgtccctatgatctctatactctgtccctggctcgtcttcatatccatatatgttgccaggagagacgtttatgatctgcatcacgctgcactaggtgttcttttcgctgtgctgataactgcagtttttaccgatgtgataaagactgcagtagggagaccgaggccagacttcttctggcgatgctttcctgatggaaagcagttatacgatcaggtgattggcgatgtgatttgccatggtgataaaaacttcttaaaagatgggcgcaagagctttcctagtggccacacttcgtggtcttttgctggtcttggatttttgtcactctacctgtcaggcaaaattaaggccttcaatcgccaaggtcacgtggccaaactttgcatagtgatccttccgcttcttcttgcttcactcgttggggtttcaagagtagatgattatcgacaccactgggaggatgtgtttgttggcggtcttattggatttatcatggcagtgctatgttacctgcatttctttcctcctccataccatgatcaaggttgtagaccgtatgcatacttccatatgctggaagaacttcaagcggcaaattcaaacaacgcacaaaaccaacagtccacaggtgatcatcgcattggcatgtccgagcagcagcataacaggacatcaagaaacgatttggaatctggaaccgtgtaacatgcctcctgcacttttactgaagtagcagcagcgatgtacattggacagtaagtgcaacctaacctagtatgcgtgtactcgacatgtgttacaatctatataattagaggtatatagtttctccttacccagtgttagcctgcttcatcttgtgtgaaatcagaaggcagtaaggcctaaccctagatgttctaggtctacctgtggccaaattagttgtaagagttgctagtggaggcactgataaggaacttattccagtaatagaaaaaccagcagaaagtagagtagaaagaaaatgacaggcacatctcctaaacatcgtggtgcatgttgcaccgtccaatgggttccaagactcgttctgttcgtatatcgaagggaaaaatacacatctgttttgtctc

SEQ ID NO: 71912 - DNA, 2485 bp, Zea Mays
gaagatacccgttgcaacgcgtcgagcggcaacgctggcacggagctcaagtctccacacaacctccgccgccgggaggaccaacacgtcagtgacggcagctgactgcagaggatctcatcgcccgccgaccgccgcaaccgcgaccgcgagcctcgattttgaactgaactgaaaaacctagaattcttttagggtttccgaggtttctctttctcgcgtttccactgtctggtcttccccgatcgccgcgaaagcagtaaagagtccgcaatctttgccgcccccaccctcatcctctgctctcgtatcgtctcctctccacttcctctttctctcctctacaagggtatccactatccagaatcacctctatcatcaggtgaactgtttctcctctctctctttttcatttcatttttattccagaaagtattgttggtttgcggctttacttcctctgtgcagtaggcagtgccagttgaagtgtagttcttttgtctccgatcatggtcgcctgtgatttctgttcttgcgagggtttggtgcttgccgcggtggggattggtgcgggttttcgtcaaacggcgcctcatgtgttttacttcttacagtaactattttagttgcggacttgcggtttttctttgcatcgtgtgacaagttctctcgaagaacagaactgaaataaacccagcattactcaggtttggtgatacgatcgaagcagactactcttagcaacccattcagatgaatctgctctgggctgcactatgctagtttataatttgaaattaagctgatgaaactcatttatatggccgcaatgccgtcttcagtatattgagtattttggtactggtaattggttctattcatttcatccatttgttgtcaacaaaacaggatgcgggaggcacagttgggctcccacacgattcagacgcacggagtgagactggccagaaagcacacacacgactgggttgttctgattcttctggctgcactggtggttgccgtgcattacgctcccccgttcagtcgatttgtcgggaaggatatgatgactgatattaggtacccggtgaaaccaagcacagtaccagcatgggctgtccctatgatctctatactctgtccctggctcgtcttcatatccatatatgttgccaggagagacgtttatgatctgcatcacgctgcactaggtgttcttttcgctgtgctgataactgcagtttttaccgatgtgataaagactgcagtagggagaccgaggccagacttcttctggcgatgctttcctgatggaaagcagttatacgatcaggtgattggcgatgtgatttgccatggtgataaaaacttcttaaaagatgggcgcaagagctttcctagtggccacacttcgtgtaagtttgcactagtaagtgctcatagactctagcatttagatggataagcttgttgtccaagtgtagagctaataactgaggtataaaataccggttctagactgtcaacaatttctgcgttcagtagaagtagtgacatggatctaaatgtttttacagctatgtttttttacccatgacttttgctggtataaaataccggttctagactgtcaacaatttctcacagtatttccattgccagggtcttttgctggtcttggatttttgtcactctacctgtcaggcaaaattaaggccttcaatcgccaaggtcacgtggccaaactttgcatagtgatccttccgcttcttcttgcttcactcgttggggtttcaagagtagatgattatcgacaccactgggaggatgtgtttgttggcggtcttattggatttatcatggcagtgctatgttacctgcatttctttcctcctccataccatgatcaaggttgtagaccgtatgcatacttccatatgctggaagaacttcaagcggcaaattcaaacaacgcacaaaaccaacagtccacaggtgatcatcgcattggcatgtccgagcagcagcataacaggacatcaagaaacgatttggaatctggaaccgtgtaacatgcctcctgcacttttactgaagtagcagcagcgatgtacattggacagtaagtgcaacctaacctagtatgcgtgtactcgacatgtgttacaatctatataattagaggtatatagtttctccttacccagtgttagcctgcttcatcttgtgtgaaatcagaaggcagtaaggcctaaccctagatgttctaggtctacctgtggccaaattagttgtaagagttgctagtggaggcactgataaggaacttattccagtaatagaaaaaccagcagaaagtagagtagaaagaaaatgacaggcacatctcctaaacatcgtggtgcatgttgcaccgtccaatgggttccaagactcgttctgttcgtatatcgaagggaaaaatacacatctgttttgtctc

SEQ ID NO: 71913 - DNA, 3144 bp, Zea Mays
gaagatacccgttgcaacgcgtcgagcggcaacgctggcacggagctcaagtctccacacaacctccgccgccgggaggaccaacacgtcagtgacggcagctgactgcagaggatctcatcgcccgccgaccgccgcaaccgcgaccgcgagcctcgattttgaactgaactgaaaaacctagaattcttttagggtttccgaggtttctctttctcgcgtttccactgtctggtcttccccgatcgccgcgaaagcagtaaagagtccgcaatctttgccgcccccaccctcatcctctgctctcgtatcgtctcctctccacttcctctttctctcctctacaagggtatccactatccagaatcacctctatcatcaggatgcgggaggcacagttgggctcccacacgattcagacgcacggagtgagactggccagaaagcacacacacgactgggttgttctgattcttctggctgcactggtggttgccgtgcattacgctcccccgttcagtcgatttgtcgggaaggatatgatgactgatattaggtacccggtgaaaccaagcacagtaccagcatgggctgtccctatgatctctatactctgtccctggctcgtcttcatatccatatatgttgccaggagagacgtttatgatctgcatcacgctgcactaggtgttcttttcgctgtgctgataactgcagtttttaccgatgtgataaagactgcagtagggagaccgaggccagacttcttctggcgatgctttcctgatggaaagcagttatacgatcaggtgattggcgatgtgatttgccatggtgataaaaacttcttaaaagatgggcgcaagagctttcctagtggccacacttcgtggtcttttgctggtcttggatttttgtcactctacctgtcaggcaaaattaaggccttcaatcgccaaggtcacgtggccaaactttgcatagtgatccttccgcttcttcttgcttcactcgttggggtttcaagagtagatgattatcgacaccactgggaggatgtgtttgttggcggtcttattggatttatcatggcagtgctatgttacctgcatttctttcctcctccataccatgatcaaggttgttcgatctttctcactaagcaaatttgcttccaatagtactgctttaagtgttcgccctgctatcattgatcctctttcttaaacattttctgttgttcattttgtttcgatagtttaaattttccttttcggatatgacggtcttttccttttcgccttcaggttgtagaccgtatgcatacttccatatgctggaagaacttcaagcggcaaattcaaacaacgcacaaaaccaacagtccacaggtgatcatcgcattggcatgtccgagcagcagcataacaggacatcaagaaacgatttggaatctggaaccgtgtaacatgcctcctgcacttttactgaagtagcagcagcgatgtacattggacacaggtaaaggattcctaaacaggagccgcttgctcaattcacgttccccgcaaaagcgtgctgcaaagcgatgagtacctgcaagatgagattaatctaccagtggctaaacatgaagaagcataagcataacggccgcatgactttggatgatcatcttcaacaagctgacgtggcgggccagcgtaagcatatgcatctggcaaatacgcggcgaaaatcgtctaggctccgtggataaaatttgtggttgttgacaaggtaaaagagagagactgaaaaatagcaaagggaaaagagagcgcgcatcagcatccatttgtttctgagagagcaccaagtacttggacccgcggcaatggcatcctcgtgaagcggtgaaggcgtgtcacgtgaaccactttcattatacagtacaacttcagagttcagatggaatttgcaatcatgatccatgcttggcttgcccaagcaaagcaaccctgctatgcaatctctgtgaacaacctggagtggtgtttgtgcttcactatcgtgaacaatctgtgaacctttcattatttatgtgacagcttgacagtgcagtacgaaaaggagaaaccaaggccagttaggccaggacaaactacacaagcaaacagcctctgcaaaataaagtcccccacccttcttcaagggactttgcagcaacatggaggccctgatccactctgcaatcctcctactcccctccaagtgcctctgaaggacgacgactgcccccccccaaaaaaaaagcaacgaagctaaaaacactcacttctctgcttgttaggatagctaattgtggtccgactccagacctcctgcgcgcgctctagcatgggccatggattgatgatggtcggacgacactaaaccctttcgtgatcggcagtagcggcggcaggcgggtagtagtaggagtccgcggcgtcccctctgtctctgtgggcaggcggcggctgtgcacgttcgtagtggccgtagctgtgcggcgcggcaccgcgcgctccatggccttcggcggcggcggcgggctgctgctgctgctgcttcagcgtcccgtcggctccggcgtacgggtacgacgccgccttctcctgcgcgccggcgtgcacggggccgctcctcacgtcgttggtcgccttgcggcccgcctcggcgccggcagccgccgtgcgcgcggggtagccgtcgccgtggccgttgctgttgtagtggccaccgttgcgctgcgtcgtcctgctcgcgccgtgcttgttcggcggggcatgaaagtgggcctcatcggcggggggcgcgccgaagcaggagttgatccggagacacattcttggacgcgcggcggcgggtggtggttggtcttggtcccccctcgacctctacccgactgccttgttgctgatatgcgttgtgtgctagtaactgctaagtgtactgctatgctatagtaggagagagggagacgggtgttcgatgagagttgcttgcagttgcagcctttcaggccactaagcactaggcgtttttttttgttcttggtggcctgtgctggtgtgctgaactgctggtgtgggggcagcatatatacggtccggagctcgt

SEQ ID NO: 71914 - DNA, 759 bp, Zea Mays
gagcgtccccacgccgcgcgcaccagcgcgtacacaaaaccctagcggcacaccgactatataatccttccccgcatttctgcccaccgcctccgccggctcccccactcagaaaacccagccgccgccgcatcggcctcccaggtaagcagtagcgtccaccccagccgccgccatgaagcgcaacccccgcgtcacgagctcccgccggaagtgccgcaaggcgcacttcacggccccgtcctccgtccgccgcgtgctcatgtccgcggcgctatcgacggagctccgccacaagtacaatgtgcgttccatcccgatccgcaaggacgacgaggtgcaggtcgtgcgcggcacctacaagggccgtgagggcaaagtggtgcaggtgtaccgccgtcgctgggtcatccacgttgagcggatcacccgcgagaaggtgaacggctccaccgtgaacgtgggcatccacccttccaaggtcatggttacaaagctgaagcttgacaaggaccgcaaggcgctcctcgaccgcaaggcccggggccgcgccgccgacaaggctaagggcaagtttactgccgacgacgtcgccgccgctgctggtggcgccgccgccactggcgcgtctctccaggagatcgactaggcgcttcgcggggatctgatgttcttctgaagattgtgcgttcacagtagattcttttgtgcgccctttgtagactgaagtaccagacgtcacgttctcgattcttcatt

SEQ ID NO: 71915 - DNA, 2710 bp, Zea Mays
cgcaattgagcccccttctccctccgtattgctcgcatccatcgtaacaacctcacgaagtgcttaatccaatcctccacccacgtcgtggataaaagcaaggccatgacccccctgcgcatatctgcctacccatgcggtcctcccccaaacgtcttcatcatggacgaagccaagaagctgccagcgttgatccacacatatcgttcggtcctcctctggcgctaagagatttgctgccgatgccgcgattcacgcgctgaaccagcgttccgttgccgttttcctggaccgatggctagtatttagggctcgtttggtagagctccactctatgattctctagctccgagagctgattctctaatggagtgattctgggcgattctctggtaggagtgaatttgttgatgaattgcgtttggctgctagttgtacccaagcttgtttaagtgagaacctgatctgttctttgctcttacttcctcagcaaatatttcacaagctatcttaacattttcatcgcaccagtctgcattatcctccttcatggtgctgttattgccacaaccatgaataataaaaaaaagataaatcaaagtgctagctcttctaacatggaaaacaacaggtataaagcagcaagcatagattgatgatgagcttctcgacttgtgattttatttattttttcgtgcagaacatttctagaaatggtgctgctggactggacgtgtgaactttggattttcacagcttctatactcgtgtgcaaagattttcttaaaaatgattttcaaatcaagaaaccaatagacaccgcaggagctagagcagaaggaaaaaacactcgcgtcctcacctcaatcggctacagattagagggagagaggaatgcaacttcaccttgcacactgaaagacgcgagacgaagagatggcgtagtagtggacggaaggggcttgggagtgttctggacggaaggggcggcagcctggatctccagcgtcctaggctagtagcggctggtagcttggcgccgccgcgccgcctccaaccctaatggccacggtctggacaaaagccaggctgggcttgtggctggatgcccgagcgggtgagggagccggtagagcaggtttttttcgctcccatgtgccagtacaattattggacgcgattcgctccgctccttcggtgaagcgtctggttttttgaccgtttggcatatgagaattgattctgcttcggagcggagctgaaaaagcgctaccaaacgcagcctaaatacctccgccaaggagctaggagtgtggcgtgaactaaccagcacgggcgctgagggctgaggccgcgacgacgacgaccatgatgaggctgaagcagcacatgggcctggtctcctcccctacccctgccatcgtcgtgaggctcggcaacaacacaccccaccgccgccgactcggtctcggatcgtgtcgtcctccgcctccgacgccgcgccgttcgagaagcccagggccgtggtcaagaaggtcctcgcgcagtcgcagcccgagggtcagggtgccaccgtccgtaggagcatcggcaggcacgagctccgcaacctggacccgttcctccagctcgacgagttcacagtctccaagcccgccgggtttcccgaccacccgcacagaggattcgagaccgtcacccacatgtttgagggggccatcacccaccaggacttcgctggtcacaagggcaccatcaggacaggggacgtgcagtggatgacggcggggcgaggcatcgtgcactcggagatgccggctggggacggcgtgagcgagggcctgcagctctggatcaacctctcctccaaggacaagatgatcgagccgcgataccaggagctggagcgcaaggacatcagccgcgcggagaccgaggacggcgtggaggcccgcgtcatcgccggggaggccttcggcgtggcgtcccccgtgtacacgcgcactcccatcatgtacgtggacttcaccatgcgacctgggtcccgcctgcaccagcctgtcccggagggctggaacgccttcgtctacgtcgtcgacggcgagggcgtattcggacgggagacggccacggcacaccactgcctcgtcctcggctccggcgacggcgtcagcgtgtggaacaggtccgccaggccgttaaggttcgtcctcgccgccgggcagccgctcggtgagcccgtggtgcagcacggacccttcgtcatgaactcgcacgccgagatacagcaggccatggaagactactcctacggcaagaacggcttcgagagggccggccagtggagctcctccgcctgatcggcgaggctatcgcgttaaattaaataaatgtgtgtaatacacacagctcaacgcttcccttaagttatgtagcaacgccatttgttggtgattaacgagtgatcgagcaagcttaaaaaagttccactccttttaaacttatatatttatcggtattttagctaatacaatagtttattgagactattgtattcgtgtatcgaaagttatgtagcaatgccatttgtgggtgattaccgtgttttccggtcgaagtatcagctagttcaatcatttataactggagacatttgaccttgtttggaacttcacaatcatttaacttgttcgtgctatgaaattattat

SEQ ID NO: 71916 - DNA, 2315 bp, Zea Mays
gggacgtaggttttcaagaatttgccgagaaaaaggcactcctgtatttagcaaggtggtcagaacaaaaccatgctcaaactgcacacttacacatcaccgaatattgtatgggaagagttcaagatcgctggtccccactactccccaattatttgcaaaaaaaccgcaatttggccgccggaaaccattcgctcatcaaggcgaggagatgagatcttgcagcggagagcatatgcctacaaagttctcaccccagctggttccctccaatattcccctccgacgatggaatatccccgcagttccaacccaggcccgccttcttcatcgtcttcagtccttctcccgcttatatacgcaacggcgacctcgccctcttccttgctcgtacaaatcatcacacgcagccacgcaggtagaacacaagcgccgtgcacgcttgcgcaagcccaaggattgccgctctgctctgtctcctccggtggccgcaggggcaatggcgattggcgggaaggaggtcaaggatgacctggaggaggcgccgccgccggtcctggacgaggccatgcggccgcgccgcgtcgcgctcttcgtcgagccgtctccgttcgcatacatctctgggtataagaaccggttccagaacttcatcaaacatttgcgagaaatgggggacgaggtcattgttgtgaccaatcatgagggagttccccaagagttccatggcgccaaggttataggttcatggagcttcccatgccccatgtatggaaaagtacctctttcgctggcactcagtcctaggatcatttcggaggttgcgaagttcaaacctgacattattcatgcgtcttctcctggaattatggtttttggagctctagctattgccaagctactcggtgtgcccctagtcatgtcctatcacacccatgttccagtatacatacctagatatacatttagctggcttgtggagccaatgtggcaagtcataagattccttcatagagctgctgatttaactttagtaccatctgctgctatcagcaaagattttgaaactgcccaggtcatatcagctaatagaatacgcctttggaacaaaggtgttgattctgcaagcttccatcctagattccgcagtcatgagatgcgagtcaggctaagtgacggtgagcctgaaaaaccactggtaattcatgtcggacgttttgggcgtgagaaaagtttggattttttgaagatggtaatggaaaggttgcctggagtaagaattgcatttattggagatggaccatataggggtgaactagagaagatgtttgaaggaatgccagcagtgttcacaggaatgatgcagggtgaagagctctcgcaggcgtacgccagcggcgatgttttcatcatgccatcggagtcagaaacgctcggccaagtggtcctagagtccatgtcgtcgggggtgcccgtcgtcgcggcccgtgcaggcgggatccccgacataatcccggaggaccaggagggcaggacgagcttcctgttcacccctggtgacctggacgactgcctcggcaaggtccagcagctgctgacgaacagggagtttagagaaaacatggggcggacggccagatccgagatggagaagtgcgactggcgggcagcgtccaagacgatccgcaacgagttctacaatgctgctatctggtactggcgaaagaagcatgcggagctggtgaagccgctgcagtggctggcacagatgttcctgccggcgcctgaggtccgcagcatcatgcaatgctgagtgaggatgctgttgcttgcagacatgatccagacaattgatggacggatgggcagatgcatatgcactccttgtaaattgaaattgtatgatgtatagtgctgtgtcgataggtgagatagttccccgtttttgtatggaaactggtattggactgtgattggtgtggcaattccatcgattacatgtgtcttgtgtagcaaaacaaaattggaattgtgctatatcttgctggacattgtaacctgtaaattatgatcatgccattttatttaaccgaagcggcaggagctttggcataattgtaaataggaaaaatatatttatatagtgtaaataggaaagatatatttataaggctgtgtctagcagatcgtgtatgtagtcatgtaaaatacggttttgaactgtagactacacattgcactgtttatatagtgaagtttgaaatagaggatgtgatgagatacataatgaagtttgaaataagagataagattag

SEQ ID NO: 71917 - DNA, 2174 bp, Zea Mays
ctactccccaattatttgcaaaaaaaccgcaatttggccgccggaaaccattcgctcatcaaggcgaggagatgagatcttgcagcggagagcatatgcctacaaagttctcaccccagctggttccctccaatattcccctccgacgatggaatatccccgcagttccaacccaggcccgccttcttcatcgtcttcagtccttctcccgcttatatacgcaacggcgacctcgccctcttccttgctcgtacaaatcatcacacgcagccacgcaggtagaacacaagcgccgtgcacgcttgcgcaagcccaaggattgccgctctgctctgtctcctccggtggccgcaggggcaatggcgattggcgggaaggaggtcaaggatgacctggaggaggcgccgccgccggtcctggacgaggccatgcggccgcgccgcgtcgcgctcttcgtcgagccgtctccgttcgcatacatctctgggtataagaaccggttccagaacttcatcaaacatttgcgagaaatgggggacgaggtcattgttgtgaccaatcatgagggagttccccaagagttccatggcgccaaggttataggttcatggagcttcccatgccccatgtatggaaaagtacctctttcgctggcactcagtcctaggatcatttcggaggttgcgaagttcaaacctgacattattcatgcgtcttctcctggaattatggtttttggagctctagctattgccaagctactcggtgtgcccctagtcatgtcctatcacacccatgttccagtatacatacctagatatacatttagctggcttgtggagccaatgtggcaagtcataagattccttcatagagctgctgatttaactttagtaccatctgctgctatcagcaaagattttgaaactgcccaggtcatatcagctaatagaatacgcctttggaacaaaggtgttgattctgcaagcttccatcctagattccgcagtcatgagatgcgagtcaggctaagtgacggtgagcctgaaaaaccactggtaattcatgtcggacgttttgggcgtgagaaaagtttggattttttgaagatgtaatggaaaggttgcctggagtaagaattgcatttattggagatggaccatataggggtgaactagagaagatgtttgaaggaatgccagcagtgttcacaggaatgatgcagggtgaagagctctcgcaggcgtacgccagcggcgatgttttcatcatgccatcggagtcagaaacgctcggccaagtggtcctagagtccatgtcgtcgggggtgcccgtcgtcgcggcccgtgcaggcgggatccccgacataatcccggaggaccaggagggcaggacgagcttcctgttcacccctggtgacctggacgactgcctcggcaaggtccagcagctgctgacgaacagggagtttagagaaaacatggggcggacggccagatccgagatggagaagtgcgactggcgggcagcgtccaagacgatccgcaacgagttctacaatgctgctatctggtactggcgaaagaagcatgcggagctggtgaagccgctgcagtggctggcacagatgttcctgccggcgcctgaggtccgcagcatcatgcaatgctgagtgaggatgctgttgcttgcagacatgatccagacaattgatggacggatgggcagatgcatatgcactccttgtaaattgaaattgtatgatgtatagtgctgtgtcgataggtgagatagttccccgtttttgtatggaaactggtattggactgtgattggtgtggcaattccatcgattacatgtgtcttgtgtagcaaaacaaaattggaattgtgctatatcttgctggacattgtaacctgtaaattatgatcatgccattttatttaaccgaagcggcaggagctttggcataattgtaaataggaaaaatatatttatatagtgtaaataggaaagatatatttataaggctgtgtctagcagatcgtgtatgtagtcatgtaaaatacggttttgaactgtagactacacattgcactgtttatatagtgaagtttgaaatagaggatgtgatgagatacataatgaagtttgaaataagagataagattag

SEQ ID NO: 71918 - DNA, 1833 bp, Zea Mays
gtaagcctcctcgtcggaccctgctatgttgtttccatttttttttcttggtgcgggttttgtcagggttggttcttgtgcgcactcttggctggatccatgaggttatccccagaccccgggaacggcgaagatacatctctgggtataagaaccggttccagaacttcatcaaacatttgcgagaaatgggggacgaggtcattgttgtgaccaatcatgagggagttccccaagagttccatggcgccaaggttataggttcatggagcttcccatgccccatgtatggaaaagtacctctttcgctggcactcagtcctaggatcatttcggaggttgcgaagttcaaacctgacattattcatgcgtcttctcctggaattatggtttttggagctctagctattgccaagctactcggtgtgcccctagtcatgtcctatcacacccatgttccagtatacatacctagatatacatttagctggcttgtggagccaatgtggcaagtcataagattccttcatagagctgctgatttaactttagtaccatctgctgctatcagcaaagattttgaaactgcccaggtcatatcagctaatagaatacgcctttggaacaaaggtgttgattctgcaagcttccatcctagattccgcagtcatgagatgcgagtcaggctaagtgacggtgagcctgaaaaaccactggtaattcatgtcggacgttttgggcgtgagaaaagtttggattttttgaagatggtaatggaaaggttgcctggagtaagaattgcatttattggagatggaccatataggggtgaactagagaagatgtttgaaggaatgccagcagtgttcacaggaatgatgcagggtgaagagctctcgcaggcgtacgccagcggcgatgttttcatcatgccatcggagtcagaaacgctcggccaagtggtcctagagtccatgtcgtcgggggtgcccgtcgtcgcggcccgtgcaggcgggatccccgacataatcccggaggaccaggagggcaggacgagcttcctgttcacccctggtgacctggacgactgcctcggcaaggtccagcagctgctgacgaacagggagtttagagaaaacatggggcggacggccagatccgagatggagaagtgcgactggcgggcagcgtccaagacgatccgcaacgagttctacaatgctgctatctggtactggcgaaagaagcatgcggagctggtgaagccgctgcagtggctggcacagatgttcctgccggcgcctgaggtccgcagcatcatgcaatgctgagtgaggatgctgttgcttgcagacatgatccagacaattgatggacggatgggcagatgcatatgcactccttgtaaattgaaattgtatgatgtatagtgctgtgtcgataggtgagatagttccccgtttttgtatggaaactggtattggactgtgattggtgtggcaattccatcgattacatgtgtcttgtgtagcaaaacaaaattggaattgtgctatatcttgctggacattgtaacctgtaaattatgatcatgccattttatttaaccgaagcggcaggagctttggcataattgtaaataggaaaaatatatttatatagtgtaaataggaaagatatatttataaggctgtgtctagcagatcgtgtatgtagtcatgtaaaatacggttttgaactgtagactacacattgcactgtttatatagtgaagtttgaaatagaggatgtgatgagatacataatgaagtttgaaataagagataagattag

SEQ ID NO: 71919 - DNA, 1579 bp, Zea Mays
gttggccactactatagcttcccatgccccatgtatggaaaagtacctctttcgctggcactcagtcctaggatcatttcggaggttgcgaagttcaaacctgacattattcatgcgtcttctcctggaattatggtttttggagctctagctattgccaagctactcggtgtgcccctagtcatgtcctatcacacccatgttccagtatacatacctagatatacatttagctggcttgtggagccaatgtggcaagtcataagattccttcatagagctgctgatttaactttagtaccatctgctgctatcagcaaagattttgaaactgcccaggtcatatcagctaatagaatacgcctttggaacaaaggtgttgattctgcaagcttccatcctagattccgcagtcatgagatgcgagtcaggctaagtgacggtgagcctgaaaaaccactggtaattcatgtcggacgttttgggcgtgagaaaagtttggattttttgaagatggtaatggaaaggttgcctggagtaagaattgcatttattggagatggaccatataggggtgaactagagaagatgtttgaaggaatgccagcagtgttcacaggaatgatgcagggtgaagagctctcgcaggcgtacgccagcggcgatgttttcatcatgccatcggagtcagaaacgctcggccaagtggtcctagagtccatgtcgtcgggggtgcccgtcgtcgcggcccgtgcaggcgggatccccgacataatcccggaggaccaggagggcaggacgagcttcctgttcacccctggtgacctggacgactgcctcggcaaggtccagcagctgctgacgaacagggagtttagagaaaacatggggcggacggccagatccgagatggagaagtgcgactggcgggcagcgtccaagacgatccgcaacgagttctacaatgctgctatctggtactggcgaaagaagcatgcggagctggtgaagccgctgcagtggctggcacagatgttcctgccggcgcctgaggtccgcagcatcatgcaatgctgagtgaggatgctgttgcttgcagacatgatccagacaattgatggacggatgggcagatgcatatgcactccttgtaaattgaaattgtatgatgtatagtgctgtgtcgataggtgagatagttccccgtttttgtatggaaactggtattggactgtgattggtgtggcaattccatcgattacatgtgtcttgtgtagcaaaacaaaattggaattgtgctatatcttgctggacattgtaacctgtaaattatgatcatgccattttatttaaccgaagcggcaggagctttggcataattgtaaataggaaaaatatatttatatagtgtaaataggaaagatatatttataaggctgtgtctagcagatcgtgtatgtagtcatgtaaaatacggttttgaactgtagactacacattgcactgtttatatagtgaagtttgaaatagaggatgtgatgagatacataatgaagtttgaaataagagataagattag

SEQ ID NO: 71920 - DNA, 1859 bp, Zea Mays
ctggacactacataatggtttgaactctgaaggcctcaatataaggcaccatcttcagagacagcagcagaatcagatggtcacaaccaaggttaactgacacttcataggatcatccatgattgaatgcaagtccacttcataggatgcatgatacatttccagccgtaccactcgagcaacagtctgaaaataccatggcatcgaattctcggcgttctttttgttacattctccaacaaattatggaccaccatgaaatgaagatctcctttctgttatgctcccgaaaggctaatcccttcaatacaggcgctgaagctacagcgataccacaagtattatacaataggcacctggtcgatccatggcgcagggtgggctgccaccgcgcctagaacaggacgctctggctggcgagcaactgatcatgcagagggccacactgcaggccttgttggtcatgaaactccatcctgtaggccggtaccgcagaggtccggttcggtgagctgaagggcagagttccggcaccgtgtcgcttgacgtcggccgccaatgggacctggcatatccccgcggctggagccggagctggagatggagctggtgcgttcgactggctggtgatcagggaggactgggacggcgagggcggctggtcgtccgtcaggttgaccgtggtgatgtcgtggatgctggacctcctcttgtccttgccgccggagttgagcctgatgaagtacttctgcgcgtggctggccacctgagtaggcgttctggtctggacaaagttgcgcgatatgttcctccagtcccccttgccgtatttcttcaggcctaggaggaacaacctggccgaagaacagaaacatgatgatcctgttcagtaactgactgtttaagagagccagatctctactcaataaagaaaatcgaaaattcccccggattaaatgcaattaaatgttgatagttgattaactgcaagttgcaaatctactcaggtgatgtaagccctatggatggaatgatggtgagattcaactatccgccgagatggaagctctcgccagtcatccgcatgacgcagagcaatcgctttctcagaacagaacggaacgcggaagtcgtatcgtatggcgtatatactcactcacctgtgctcctcctccgtccatggcacgcccttcttccgctcctgctccggcgtgcggccgtggtgccgcctcccgcagcctccggcgaagcggtacccgtgcctgaagtcccccggaccggggccgtagccgtcccactgcagggtgaacgagctggccccgccgccgtaggccggcaagggaacctgcccgctctcgatctgctggacgtcgacctcgaggtgcttgaagtggctgacgacctcgcgcaccgtccggccggggatggcccgcgccacctcctcccagtccgggcggcagaggtcgagcccggcgagcgcccgctcgaactgcttgttctccgccgccgtccacagacgcgccgccgccgggaaccagttgctccgtgcggctatgtggtccaccggcggcagcacgtccatgtacgtctcccgcatcatctctgctctgccccggggcgttgttccacctctttcttcccccctgtaggaatcacgggactgaaagaaaggaactcctatcgtcgctgcagatcaaatacgatgaacataggattggagaaaggtggaatctttgtgcgtgaaaactggaatcagttgcagcacctgcctgaaaaagggatcgacttttacgaaagaattagactggactcaagaacacctctgaactgaacctgaacacggaacacagccggaatcg

SEQ ID NO: 71921 - DNA, 1738 bp, Zea Mays
tgaatgcaagtccacttcataggatgcatgatacatttccagccgtaccactcgagcaacagtctgaaaataccatggcatcgaattctcggcgttctttttgttacattctccaacaaattatggaccaccatgaaatgaagatctcctttctgttatgctcccgaaaggctaatcccttcaatacaggcgctgaagctacagcgataccacaagtattatacaataggcacctggtcgatccatggcgcagggtgggctgccaccgcgcctagaacaggacgctctggctggcgagcaactgatcatgcagagggccacactgcaggccttgttggtcatgaaactccatcctgtaggccggtaccgcagaggtccggttcggtgagctgaagggcagagttccggcaccgtgtcgcttgacgtcggccgccaatgggacctggcatatccccgcggctggagccggagctggagatggagctggtgcgttcgactggctggtgatcagggaggactgggacggcgagggcggctggtcgtccgtcaggttgaccgtggtgatgtcgtggatgctggacctcctcttgtccttgccgccggagttgagcctgatgaagtacttctgcgcgtggctggccacctgagtaggcgttctggtctggacaaagttgcgcgatatgttcctccagtcccccttgccgtatttcttcaggcctaggaggaacaacctggccgaagaacagaaacatgatgatcctgttcagtaactgactgtttaagagagccagatctctactcaataaagaaaatcgaaaattcccccggattaaatgcaattaaatgttgatagttgattaactgcaagttgcaaatctactcaggtgatgtaagccctatggatggaatgatggtgagattcaactatccgccgagatggaagctctcgccagtcatccgcatgacgcagagcaatcgctttctcagaacagaacggaacgcggaagtcgtatcgtatggcgtatatactcactcacctgtgctcctcctccgtccatggcacgcccttcttccgctcctgctccggcgtgcggccgtggtgccgcctcccgcagcctccggcgaagcggtacccgtgcctgaagtcccccggaccggggccgtagccgtcccactgcagggtgaacgagctggccccgccgccgtaggccggcaagggaacctgcccgctctcgatctgctggacgtcgacctcgaggtgcttgaagtggctgacgacctcgcgcaccgtccggccggggatggcccgcgccacctcctcccagtccgggcggcagaggtcgagcccggcgagcgcccgctcgaactgcttgttctccgccgccgtccacagacgcgccgccgccgggaaccagttgctccgtgcggctatgtggtccaccggcggcagcacgtccatgtacgtctcccgcatcatctctgctctgccccggggcgttgttccacctctttcttcccccctgtaggaatcacgggactgaaagaaaggtgaactcctatcgtcgctgcagatcaaatacgatgaacataggattggagaaaggtggaatctttgtgcgtgaaaactggaatcagttgcagcacctgcctgaaaaagggatcgacttttacgaaagaattagactggactcaagaacacctctgaactgaacctgaacacggaacacagccggaatcg

SEQ ID NO: 71922 - DNA, 4438 bp, Zea Mays
cttccaggtgcttcttccccctcccaaaattcttctcctcgcggtctccctcgccgccacgcctgcatccgccactctccgcgctcgcacacgccgcctcctcctccccgtcaccccttcgccgtggtggctcccgtcgtcccacgcctccctcgtctgcaagcgctgacgcctcctcctctccaaccctaccttcgtccgccgcttccatgtcctccacagggcgcctcacctcctcagcttcttcgccgaccacaacaccggcgctccccctccctccctccggtcgtcgtcacgctgcgtcttggcccaaccgttcaggtgctcggtgcttaactctcctattgcacacccatgtttaacttttcttgaattttcttaggaattgaggctgtagggtatatatgaggggttaattcagccgaactgttcagtaacgtggtaactgttcttcagggtgcgagtttgttgtactataaaggtttggtaacctgaataaaacaaatgaacttctgttctagtttcactatcaccaggttgcgggtttgaaggccaaaaccttcagcactggtcctccaaaaccttcagcgctggtcctgcctatgctagtttcatttgcatggataagttatgaatgaagaaaacatacattttaatatctaggcgaccatttcagaagacgtgtagttagaaatcagtaactaagaacagatcttaaccttatacattcttggtctttctttttgtcctgtatttttttattgtttgggtgtaacaccattattacatagcttggttgatgcatacactactacatggtatttatatcgtcctgacgattgttacatcaaccacattacacattatatatagcagtatagaataaatgttgtacatgtctaataatgcacactaataattgtaaatttgcaacccacttatccagctgattgatattgtgatcagttcacgttgcaagagtttctataaggtggtctgttatccacactacaatctacaaacttcatcagtacatcctcatacaagtgcagatcaaattgcatggtgaaatgtgtacttacaaattcgtttgtaagtgaacttagctaattatatggatactcacatagttttttggataccgatcataccaataatttacgaggaggtgcacccattcagcttcccagtatctaattgtactatacactccttccataggtaagtttataaataaagcttcgttttccatacaatatgattatgctcctttttatgtgaactgcaatattggtcactctatatcagtaaagattgagtgttgcacatgtctaacaatgtgcagtgactgtaaatttgcatcccgcttatccagctgatcaacattgtgattggtttacattgcaggaatttctgtaaggtggactgttatccagagcacgtacttcatttgtacagccttatacaagtacagattcgaattgcatgatgaaatgtgtattttcaaattcatctttaagtgaactcagctaattatatgtgcactcatatacttatttgttttggattataccaataatttatgaggagttgcacccatttatttcctagtttttaatagtgctgcacacttcttctttaggtaagtttataaataaagcttcattttcatgcaatttatgattttatgagattttcccatacacttgcacgttcccatgaaagattcctctcacaaaaaaaacttaaatttcatttaatgtgtaactctctaactcctttcttacatccattgagttatattgcaggttgctagatctattacattttcagacgacgacgacactagtagaaaaaacaattcaaagacgaatgttgaagcgtcacatgaggtataatttataaccttaacagaacaagcttatattcagttatacttaactgttaaaataaacctcatcgtatggtacaaatgttttaccacccaacactcccgaaagttcaagaacattagaatcactagcgaaaaggttcttcaaacttttcttttttcttttaactttgaacatctgttttatcatgacaaatattgtgtgtttaatacattcctcatcaaacaaatttggtgtcatatgctcaaaccaaacccttcagcagtccacaaccctagttctgcaaatccacctacaagacacgaataaggtatttcctttagcactttctacaatttatcaatacgaaattgacatacaaaatataatttagcatgcctgctccattttctttcttggtatctaaaatagaaattttatgaacaatttgacctttatgagttctactaaaacttgaaatttatataaactaattgtactccagttatctcgttgccgtcttttcgtaataggtttcttaaacgtatatgttcacctatttcaagagtaatttttttaccaaacatgtatacatacataggagtatatgtgaatagtgtggtatacaatacatcgacactcccactattttaattatggcccattaattcatgcatgcattcatttattcccttgctgcattttttctatatatttgccttcatctaattttgactgttcatttgatcaaacaacaatgtgtgttgaactaaaatagaggcattagtagaccaggatgaaaaaatagcgttaatacatgttaactaaaagtttaagactccatcctggtccgattctatagtggtacacttttttcttgactaattgcttcgtgctttcagtctttttagtttaaactttcagggatgtgtccactgagattgttgctgctcaagtccagcagactctgcgactattatagcttgccgatatccgaagggatcagaccggacagacctgagatctggttgtgtgcgagattcagcacgttgagggacaccaggctgtcgagtttaggcggcattgttccaggtttactttgttcagttcaatttgtctagattttacatattcatgaatagccctttattattggtgcaactaatattcagtcgctaaaatatcaatggcctaccaaatttcgcaaaaaaggatgagcactacacgaaccattcctgtactttgtaagccttccctcctaaaagcttcagaatcttaacatgttacagttagttcttagaagattttatgtgcatcataattctaaaactttagccagtttacacctgttatttagtctactccttgaaaaaagtttttccctttgatctaaacatgaatgcttccttttactccaacatcacagcaaaaaaaaatcaaaagcattgcacttcttactactgatacccctatgtcactactaccatacaggttagtgcacgatccttacctttatgttctacatgtctttgggtttctctttttttcaagtgcgttctattattgtttatatgtccaccttcacactgattagctgttccttgttcctacacagttattatctgttatgtacatttttatacctttccaaattagcttattatctttaaaaaattgtattttcttggctactttacatttgaatgaccaatggcaacatcttcaaacaaacatagctaacttagaggaaagaaaacataatctttaaattgctcataagagagaatgtcatttttcagaaaaaaagaaaaacagtattgatgctttagaaaatcttaaactgatgcatgttaatattatcatatcaatgccaacaacatatgtttaagctggtttcatccttcctagcagctctacttgcttcatctcgctcttcactgctattttttaaattggaaggaaaataagagtacgatagaagaacttgaagcgcattcactggtctcttatttaaagtccataaagcaaagttccaaaaaaacaaaaagaaacattgagttgccttcacccggcttctcttgagaaaatacaaggcgttaagaaattctttagaaaggcatattattactacatatagagctaggagtagatcttcatccgaacccctccaacgacgactaggtcggcgttttctctccctgctgtttcagcttaaaaactagatgtaccaaacatgctatctgagcaccgcactgatacaacctttgatagtctgcgttttctctccctgctgtttcagttccggtatgcaaactacacgaatgatgcctacaacaagagtgggaacgaatccttgtggctgcagctgataaaccagagagcatagacttaacctttgtgctcttctcgacaggcttctttgctgttagactttaaccaattcatctcatgtcccaagttcaattttatgtaatgaggattgcatggtattttttggcaatttatctttaatgaactataatgtatagctgaagttggttgcagtttgaaacaatgcgacatttaaa

SEQ ID NO: 71923 - DNA, 4313 bp, Zea Mays
ggtgcttcttccccctcccaaaattcttctcctcgcggtctccctcgccgccacgcctgcatccgccactctccgcgctcgcacacgccgcctcctcctccccgtcaccccttcgccgtggtggctcccgtcgtcccacgcctccctcgtctgcaagcgctgacgcctcctcctctccaaccctaccttcgtccgccgcttccatgtcctccacagggcgcctcacctcctcagcttcttcgccgaccacaacaccggcgctccccctccctccctccggtcgtcgtcacgctgcgtcttggcccaaccgttcaggtgctcggtgcttaactctcctattgcacacccatgtttaacttttcttgaattttcttaggaattgaggctgtagggtatatatgaggggttaattcagccgaactgttcagtaacgtggtaactgttcttcagggtgcgagtttgttgtactataaaggtttggtaacctgaataaaacaaatgaacttctgttctagtttcactatcaccaggttgcgggtttgaaggccaaaaccttcagcactggtcctccaaaaccttcagcgctggtcctgcctatgctagtttcatttgcatggataagttatgaatgaagaaaacatacattttaatatctaggcgaccatttcagaagacgtgtagttagaaatcagtaactaagaacagatcttaaccttatacattcttggtctttctttttgtcctgtatttttttattgtttgggtgtaacaccattattacatagcttggttgatgcatacactactacatggtatttatatcgtcctgacgattgttacatcaaccacattacacattatatatagcagtatagaataaatgttgtacatgtctaataatgcacactaataattgtaaatttgcaacccacttatccagctgattgatattgtgatcagttcacgttgcaagagtttctataaggtggtctgttatccacactacaatctacaaacttcatcagtacatcctcatacaagtgcagatcaaattgcatggtgaaatgtgtacttacaaattcgtttgtaagtgaacttagctaattatatggatactcacatagttttttggataccgatcataccaataatttacgaggaggtgcacccattcagcttcccagtatctaattgtactatacactccttccataggtaagtttataaataaagcttcgttttccatacaatatgattatgctcctttttatgtgaactgcaatattggtcactctatatcagtaaagattgagtgttgcacatgtctaacaatgtgcagtgactgtaaatttgcatcccgcttatccagctgatcaacattgtgattggtttacattgcaggaatttctgtaaggtggactgttatccagagcacgtacttcatttgtacagccttatacaagtacagattcgaattgcatgatgaaatgtgtattttcaaattcatctttaagtgaactcagctaattatatgtgcactcatatacttatttgttttggattataccaataatttatgaggagttgcacccatttatttcctagtttttaatagtgctgcacacttcttctttaggtaagtttataaataaagcttcattttcatgcaatttatgattttatgagattttcccatacacttgcacgttcccatgaaagattcctctcacaaaaaaaacttaaatttcatttaatgtgtaactctctaactcctttcttacatccattgagttatattgcaggttgctagatctattacattttcagacgacgacgacactagtagaaaaaacaattcaaagacgaatgttgaagcgtcacatgaggtataatttataaccttaacagaacaagcttatattcagttatacttaactgttaaaataaacctcatcgtatggtacaaatgttttaccacccaacactcccgaaagttcaagaacattagaatcactagcgaaaaggttcttcaaacttttcttttttcttttaactttgaacatctgttttatcatgacaaatattgtgtgtttaatacattcctcatcaaacaaatttggtgtcatatgctcaaaccaaacccttcagcagtccacaaccctagttctgcaaatccacctacaagacacgaataaggtatttcctttagcactttctacaatttatcaatacgaaattgacatacaaaatataatttagcatgcctgctccattttctttcttggtatctaaaatagaaattttatgaacaatttgacctttatgagttctactaaaacttgaaatttatataaactaattgtactccagttatctcgttgccgtcttttcgtaataggtttcttaaacgtatatgttcacctatttcaagagtaatttttttaccaaacatgtatacatacataggagtatatgtgaatagtgtggtatacaatacatcgacactcccactattttaattatggcccattaattcatgcatgcattcatttattcccttgctgcattttttctatatatttgccttcatctaattttgactgttcatttgatcaaacaacaatgtgtgttgaactaaaatagaggcattagtagaccaggatgaaaaaatagcgttaatacatgttaactaaaagtttaagactccatcctggtccgattctatagtggtacacttttttcttgactaattgcttcgtgctttcagtctttttagtttaaactttcagggatgtgtccactgagattgttgctgctcaagtccagcagactctgcgactattatagcttgccgatatccgaagggatcagaccggacagcacgttgagggacaccaggctgtcgagtttaggcggcattgttccaggtttactttgttcagttcaatttgtctagattttacatattcatgaatagccctttattattggtgcaactaatattcagtcgctaaaatatcaatggcctaccaaatttcgcaaaaaaggatgagcactacacgaaccattcctgtactttgtaagccttccctcctaaaagcttcagaatcttaacatgttacagttagttcttagaagattttatgtgcatcataattctaaaactttagccagtttacacctgttatttagtctactccttgaaaaaagtttttccctttgatctaaacatgaatgcttccttttactccaacatcacagcaaaaaaaaatcaaaagcattgcacttcttactactgatacccctatgtcactactaccatacaggttagtgcacgatccttacctttatgttctacatgtctttgggtttctctttttttcaagtgcgttctattattgtttatatgtccaccttcacactgattagctgttccttgttcctacacagttattatctgttatgtacatttttatacctttccaaattagcttattatctttaaaaaattgtattttcttggctactttacatttgaatgaccaatggcaacatcttcaaacaaacatagctaacttagaggaaagaaaacataatctttaaattgctcataagagagaatgtcatttttcagaaaaaaagaaaaacagtattgatgctttagaaaatcttaaactgatgcatgttaatattatcatatcaatgccaacaacatatgtttaagctggtttcatccttcctagcagctctacttgcttcatctcgctcttcactgctattttttaaattggaaggaaaataagagtacgatagaagaacttgaagcgcattcactggtctcttatttaaagtccataaagcaaagttccaaaaaaacaaaaagaaacattgagttgccttcacccggcttctcttgagaaaatacaaggcgttaagaaattctttagaaaggcatattattactacatatagagctaggagtagatcttcatccgaacccctccaacgacgactaggtcggcgttttctctccctgctgtttcagttccggtatgcaaactacacgaatgatgcctacaacaagagtgggaacgaatccttgtggctgcagctgataaaccagagagcatagacttaacctttgtgctcttctcgacaggcttctttgctgttagactttaaccaattcatctcatgtcccaagttcaattttatgtaatgaggattgcatggtattttttggcaatttatctttaatgaactataatgtatagctgaagttggttgcagtttgaaacaatgcgacatttaaa

SEQ ID NO: 71924 - DNA, 3612 bp, Zea Mays
cttccccctcccaaaattcttctcctcgcggtctccctcgccgccacgcctgcatccgccactctccgcgctcgcacacgccgcctcctcctccccgtcaccccttcgccgtggtggctcccgtcgtcccacgcctccctcgtctgcaagcgctgacgcctcctcctctccaaccctaccttcgtccgccgcttccatgtcctccacagggcgcctcacctcctcagcttcttcgccgaccacaacaccggcgctccccctccctccctccggtcgtcgtcacgctgcgtcttggcccaaccgttcaggtgctcggtgcttaactctcctattgcacacccatgtttaacttttcttgaattttcttaggaattgaggctgtagggtatatatgaggggttaattcagccgaactgttcagtaacgtggtaactgttcttcagggtgcgagtttgttgtactataaaggtttggtaacctgaataaaacaaatgaacttctgttctagtttcactatcaccaggttgcgggtttgaaggccaaaaccttcagcactggtcctccaaaaccttcagcgctggtcctgcctatgctagtttcatttgcatggataagttatgaatgaagaaaacatacattttaatatctaggcgaccatttcagaagacgtgtagttagaaatcagtaactaagaacagatcttaaccttatacattcttggtctttctttttgtcctgtatttttttattgtttgggtgtaacaccattattacatagcttggttgatgcatacactactacatggtatttatatcgtcctgacgattgttacatcaaccacattacacattatatatagcagtatagaataaatgttgtacatgtctaataatgcacactaataattgtaaatttgcaacccacttatccagctgattgatattgtgatcagttcacgttgcaagagtttctataaggtggtctgttatccacactacaatctacaaacttcatcagtacatcctcatacaagtgcagatcaaattgcatggtgaaatgtgtacttacaaattcgtttgtaagtgaacttagctaattatatggatactcacatagttttttggataccgatcataccaataatttacgaggaggtgcacccattcagcttcccagtatctaattgtactatacactccttccataggtaagtttataaataaagcttcgttttccatacaatatgattatgctcctttttatgtgaactgcaatattggtcactctatatcagtaaagattgagtgttgcacatgtctaacaatgtgcagtgactgtaaatttgcatcccgcttatccagctgatcaacattgtgattggtttacattgcaggaatttctgtaaggtggactgttatccagagcacgtacttcatttgtacagccttatacaagtacagattcgaattgcatgatgaaatgtgtattttcaaattcatctttaagtgaactcagctaattatatgtgcactcatatacttatttgttttggattataccaataatttatgaggagttgcacccatttatttcctagtttttaatagtgctgcacacttcttctttaggtaagtttataaataaagcttcattttcatgcaatttatgattttatgagattttcccatacacttgcacgttcccatgaaagattcctctcacaaaaaaaacttaaatttcatttaatgtgtaactctctaactcctttcttacatccattgagttatattgcaggttgctagatctattacattttcagacgacgacgacactagaaaaaacaattcaaagacgaatgttgaagcgtcacatgaggtataatttataaccttaacagaacaagcttatattcagttatacttaactgttaaaataaacctcatcgtatggtacaaatgttttaccacccaacactcccgaaagttcaagaacattagaatcactagcgaaaaggttcttcaaacttttcttttttcttttaactttgaacatctgttttatcatgacaaatattgtgtgtttaatacattcctcatcaaacaaatttggtgtcatatgctcaaaccaaacccttcagcagtccacaaccctagttctgcaaatccacctacaagacacgaataagtctttttagtttaaactttcagggatgtgtccactgagattgttgctgctcaagtccagcagactctgcgactattatagcttgccgatatccgaagggatcagaccggacagcacgttgagggacaccaggctgtcgagtttaggcggcattgttccaggatgagcactacacgaaccattcctgtactttgtaagccttccctcctaaaagcttcagaatcttaacatgttacagttagttcttagaagattttatgtgcatcataattctaaaactttagccagtttacacctgttatttagtctactccttgaaaaaagtttttccctttgatctaaacatgaatgcttccttttactccaacatcacagcaaaaaaaaatcaaaagcattgcacttcttactactgatacccctatgtcactactaccatacaggttagtgcacgatccttacctttatgttctacatgtctttgggtttctctttttttcaagtgcgttctattattgtttatatgtccaccttcacactgattagctgttccttgttcctacacagttattatctgttatgtacatttttatacctttccaaattagcttattatctttaaaaaattgtattttcttggctactttacatttgaatgaccaatggcaacatcttcaaacaaacatagctaacttagaggaaagaaaacataatctttaaattgctcataagagagaatgtcatttttcagaaaaaaagaaaaacagtattgatgctttagaaaatcttaaactgatgcatgttaatattatcatatcaatgccaacaacatatgtttaagctggtttcatccttcctagcagctctacttgcttcatctcgctcttcactgctattttttaaattggaaggaaaataagagtacgatagaagaacttgaagcgcattcactggtctcttatttaaagtccataaagcaaagttccaaaaaaacaaaaagaaacattgagttgccttcacccggcttctcttgagaaaatacaaggcgttaagaaattctttagaaaggcatattattactacatatagagctaggagtagatcttcatccgaacccctccaacgacgactaggtcggcgttttctctccctgctgtttcagttccggtatgcaaactacacgaatgatgcctacaacaagagtgggaacgaatccttgtggctgcagctgataaaccagagagcatagacttaacctttgtgctcttctcgacaggcttctttgctgttagactttaaccaattcatctcatgtcccaagttcaattttatgtaatgaggattgcatggtattttttggcaatttatctttaatgaactataatgtatagctgaagttggttgcagtttgaaacaatgcgacatttaaa

SEQ ID NO: 71925 - DNA, 3913 bp, Zea Mays
aattcttctcctcgcggtctccctcgccgccacgcctgcatccgccactctccgcgctcgcacacgccgcctcctcctccccgtcaccccttcgccgtggtggctcccgtcgtcccacgcctccctcgtctgcaagcgctgacgcctcctcctctccaaccctaccttcgtccgccgcttccatgtcctccacagggcgcctcacctcctcagcttcttcgccgaccacaacaccggcgctccccctccctccctccggtcgtcgtcacgctgcgtcttggcccaaccgttcaggtgctcggtgcttaactctcctattgcacacccatgtttaacttttcttgaattttcttaggaattgaggctgtagggtatatatgaggggttaattcagccgaactgttcagtaacgtggtaactgttcttcagggtgcgagtttgttgtactataaaggtttggtaacctgaataaaacaaatgaacttctgttctagtttcactatcaccaggttgcgggtttgaaggccaaaaccttcagcactggtcctccaaaaccttcagcgctggtcctgcctatgctagtttcatttgcatggataagttatgaatgaagaaaacatacattttaatatctaggcgaccatttcagaagacgtgtagttagaaatcagtaactaagaacagatcttaaccttatacattcttggtctttctttttgtcctgtatttttttattgtttgggtgtaacaccattattacatagcttggttgatgcatacactactacatggtatttatatcgtcctgacgattgttacatcaaccacattacacattatatatagcagtatagaataaatgttgtacatgtctaataatgcacactaataattgtaaatttgcaacccacttatccagctgattgatattgtgatcagttcacgttgcaagagtttctataaggtggtctgttatccacactacaatctacaaacttcatcagtacatcctcatacaagtgcagatcaaattgcatggtgaaatgtgtacttacaaattcgtttgtaagtgaacttagctaattatatggatactcacatagttttttggataccgatcataccaataatttacgaggaggtgcacccattcagcttcccagtatctaattgtactatacactccttccataggtaagtttataaataaagcttcgttttccatacaatatgattatgctcctttttatgtgaactgcaatattggtcactctatatcagtaaagattgagtgttgcacatgtctaacaatgtgcagtgactgtaaatttgcatcccgcttatccagctgatcaacattgtgattggtttacattgcaggaatttctgtaaggtggactgttatccagagcacgtacttcatttgtacagccttatacaagtacagattcgaattgcatgatgaaatgtgtattttcaaattcatctttaagtgaactcagctaattatatgtgcactcatatacttatttgttttggattataccaataatttatgaggagttgcacccatttatttcctagtttttaatagtgctgcacacttcttctttaggtaagtttataaataaagcttcattttcatgcaatttatgattttatgagattttcccatacacttgcacgttcccatgaaagattcctctcacaaaaaaaacttaaatttcatttaatgtgtaactctctaactcctttcttacatccattgagttatattgcaggttgctagatctattacattttcagacgacgacgacactagtagaaaaaacaattcaaagacgaatgttgaagcgtcacatgaggtataatttataaccttaacagaacaagcttatattcagttatacttaactgttaaaataaacctcatcgtatggtacaaatgttttaccacccaacactcccgaaagttcaagaacattagaatcactagcgaaaaggttcttcaaacttttcttttttcttttaactttgaacatctgttttatcatgacaaatattgtgtgtttaatacattcctcatcaaacaaatttggtgtcatatgctcaaaccaaacccttcagcagtccacaaccctagttctgcaaatccacctacaagacacgaataaggtatttcctttagcactttctacaatttatcaatacgaaattgacatacaaaatataatttagcatgcctgctccattttctttcttggtatctaaaatagaaattttatgaacaatttgacctttatgagttctactaaaacttgaaatttatataaactaattgtactccagttatctcgttgccgtcttttcgtaataggtttcttaaacgtatatgttcacctatttcaagagtaatttttttaccaaacatgtatacatacataggagtatatgtgaatagtgtggtatacaatacatcgacactcccactattttaattatggcccattaattcatgcatgcattcatttattcccttgctgcattttttctatatatttgccttcatctaattttgactgttcatttgatcaaacaacaatgtgtgttgaactaaaatagaggcattagtagaccaggatgaaaaaatagcgttaatacatgttaactaaaagtttaagactccatcctggtccgattctatagtggtacacttttttcttgactaattgcttcgtgctttcagtctttttagtttaaactttcagggatgtgtccactgagattgttgctgctcaagtccagcagactctgcgactattatagcttgccgatatccgaagggatcagaccggacagcaaaaaaaaatcaaaagcattgcacttcttactactgatacccctatgtcactactaccatacaggaaaataagagtacgatagaagaacttgaagcgcattcactggtctcttatttaaagtccataaagcaaagttccaaaaaaacaaaaagaaacattgagttgccttcacccggcttctcttgagaaaatacaagtaggcaactcagaagagacaacaactgtactttctcaggcgttaagaaattctttagaaaggcatattattactacatatagagctaggagtagatcttcatccgaacccctccaacgacgactaggtcggcgttttctctccctgctgtttcaggtttgttacatttcaacctgtgggctttctttcagacaattgcatttcatctagcattcacatgggaagctctgaaatctgccagcttaaaaactagatgtaccaaacatgctatctgagcaccgcactgatacaacctttgatagtctgcgttttctctccctgctgtttcaggtttgttacatttcaacctgtggggtttctttcagacaattgcatttcatctagcattcacatgggaagctctcaaatctgccagcttaaaaactagatgtaccaaacatgctatctgagcaccgcactgatacaacctttgatcagtatttagtactacttgctcttccatattaatactactggtactactatttcattgcacgtttacatgacatggaacagagactgaatttagtcgagtgggttcacctgcagttccggtatgcaaactacacgaatgatgcctacaacaagagtgggaacgaatccttgtggctgcagctgataaaccagagagcatagacttaacctttgtgctcttctcgacaggcttctttgctgttagactttaaccaattcatctcatgtcccaagttcaattttatgtaatgaggattgcatggtattttttggcaatttatctttaatgaactataatgtatagctgaagttggttgcagtttgaaacaatgcgacatttaaa

SEQ ID NO: 71926 - DNA, 4483 bp, Zea Mays
aattcttctcctcgcggtctccctcgccgccacgcctgcatccgccactctccgcgctcgcacacgccgcctcctcctccccgtcaccccttcgccgtggtggctcccgtcgtcccacgcctccctcgtctgcaagcgctgacgcctcctcctctccaaccctaccttcgtccgccgcttccatgtcctccacagggcgcctcacctcctcagcttcttcgccgaccacaacaccggcgctccccctccctccctccggtcgtcgtcacgctgcgtcttggcccaaccgttcaggtgctcggtgcttaactctcctattgcacacccatgtttaacttttcttgaattttcttaggaattgaggctgtagggtatatatgaggggttaattcagccgaactgttcagtaacgtggtaactgttcttcagggtgcgagtttgttgtactataaaggtttggtaacctgaataaaacaaatgaacttctgttctagtttcactatcaccaggttgcgggtttgaaggccaaaaccttcagcactggtcctccaaaaccttcagcgctggtcctgcctatgctagtttcatttgcatggataagttatgaatgaagaaaacatacattttaatatctaggcgaccatttcagaagacgtgtagttagaaatcagtaactaagaacagatcttaaccttatacattcttggtctttctttttgtcctgtatttttttattgtttgggtgtaacaccattattacatagcttggttgatgcatacactactacatggtatttatatcgtcctgacgattgttacatcaaccacattacacattatatatagcagtatagaataaatgttgtacatgtctaataatgcacactaataattgtaaatttgcaacccacttatccagctgattgatattgtgatcagttcacgttgcaagagtttctataaggtggtctgttatccacactacaatctacaaacttcatcagtacatcctcatacaagtgcagatcaaattgcatggtgaaatgtgtacttacaaattcgtttgtaagtgaacttagctaattatatggatactcacatagttttttggataccgatcataccaataatttacgaggaggtgcacccattcagcttcccagtatctaattgtactatacactccttccataggaatttctgtaaggtggactgttatccagagcacgtacttcatttgtacagccttatacaagtacagattcgaattgcatgatgaaatgtgtattttcaaattcatctttaagtgaactcagctaattatatgtgcactcatatacttatttgttttggattataccaataatttatgaggagttgcacccatttatttcctagtttttaatagtgctgcacacttcttctttaggtaagtttataaataaagcttcattttcatgcaatttatgattttatgagattttcccatacacttgcacgttcccatgaaagattcctctcacaaaaaaaacttaaatttcatttaatgtgtaactctctaactcctttcttacatccattgagttatattgcaggttgctagatctattacattttcagacgacgacgacactagtagaaaaaacaattcaaagacgaatgttgaagcgtcacatgaggtataatttataaccttaacagaacaagcttatattcagttatacttaactgttaaaataaacctcatcgtatggtacaaatgttttaccacccaacactcccgaaagttcaagaacattagaatcactagcgaaaaggttcttcaaacttttcttttttcttttaactttgaacatctgttttatcatgacaaatattgtgtgtttaatacattcctcatcaaacaaatttggtgtcatatgctcaaaccaaacccttcagcagtccacaaccctagttctgcaaatccacctacaagacacgaataaggtatttcctttagcactttctacaatttatcaatacgaaattgacatacaaaatataatttagcatgcctgctccattttctttcttggtatctaaaatagaaattttatgaacaatttgacctttatgagttctactaaaacttgaaatttatataaactaattgtactccagttatctcgttgccgtcttttcgtaataggtttcttaaacgtatatgttcacctatttcaagagtaatttttttaccaaacatgtatacatacataggagtatatgtgaatagtgtggtatacaatacatcgacactcccactattttaattatggcccattaattcatgcatgcattcatttattcccttgctgcattttttctatatatttgccttcatctaattttgactgttcatttgatcaaacaacaatgtgtgttgaactaaaatagaggcattagtagaccaggatgaaaaaatagcgttaatacatgttaactaaaagtttaagactccatcctggtccgattctatagtggtacacttttttcttgactaattgcttcgtgctttcagtctttttagtttaaactttcagggatgtgtccactgagattgttgctgctcaagtccagcagactctgcgactattatagcttgccgatatccgaagggatcagaccggacagacctgagatctggttgtgtgcgagattcagcacgttgagggacaccaggctgtcgagtttaggcggcattgttccaggtttactttgttcagttcaatttgtctagattttacatattcatgaatagccctttattattggtgcaactaatattcagtcgctaaaatatcaatggcctaccaaatttcgcaaaaaaggatgagcactacacgaaccattcctgtactttgtaagccttccctcctaaaagcttcagaatcttaacatgttacagttagttcttagaagattttatgtgcatcataattctaaaactttagccagtttacacctgttatttagtctactccttgaaaaaagtttttccctttgatctaaacatgaatgcttccttttactccaacatcacagcaaaaaaaaatcaaaagcattgcacttcttactactgatacccctatgtcactactaccatacaggttagtgcacgatccttacctttatgttctacatgtctttgggtttctctttttttcaagtgcgttctattattgtttatatgtccaccttcacactgattagctgttccttgttcctacacagttattatctgttatgtacatttttatacctttccaaattagcttattatctttaaaaaattgtattttcttggctactttacatttgaatgaccaatggcaacatcttcaaacaaacatagctaacttagaggaaagaaaacataatctttaaattgctcataagagagaatgtcatttttcagaaaaaaagaaaaacagtattgatgctttagaaaatcttaaactgatgcatgttaatattatcatatcaatgccaacaacatatgtttaagctggtttcatccttcctagcagctctacttgcttcatctcgctcttcactgctattttttaaattggaaggaaaataagagtacgatagaagaacttgaagcgcattcactggtctcttatttaaagtccataaagcaaagttccaaaaaaacaaaaagaaacattgagttgccttcacccggcttctcttgagaaaatacaaggcgttaagaaattctttagaaaggcatattattactacatatagagctaggagtagatcttcatccgaacccctccaacgacgactaggtcggcgttttctctccctgctgtttcagcttaaaaactagatgtaccaaacatgctatctgagcaccgcactgatacaacctttgatagtctgcgttttctctccctgctgtttcaggtttgttacatttcaacctgtggggtttctttcagacaattgcatttcatctagcattcacatgggaagctctcaaatctgccagcttaaaaactagatgtaccaaacatgctatctgagcaccgcactgatacaacctttgatcagtatttagtactacttgctcttccatattaatactactggtactactatttcattgcacgtttacatgacatggaacagagactgaatttagtcgagtgggttcacctgcagttccggtatgcaaactacacgaatgatgcctacaacaagagtgggaacgaatccttgtggctgcagctgataaaccagagagcatagacttaacctttgtgctcttctcgacaggcttctttgctgttagactttaaccaattcatctcatgtcccaagttcaattttatgtaatgaggattgcatggtattttttggcaatttatctttaatgaactataatgtatagctgaagttggttgcagtttgaaacaatgcgacatttaaa

SEQ ID NO: 71927 - DNA, 4392 bp, Zea Mays
aattcttctcctcgcggtctccctcgccgccacgcctgcatccgccactctccgcgctcgcacacgccgcctcctcctccccgtcaccccttcgccgtggtggctcccgtcgtcccacgcctccctcgtctgcaagcgctgacgcctcctcctctccaaccctaccttcgtccgccgcttccatgtcctccacagggcgcctcacctcctcagcttcttcgccgaccacaacaccggcgctccccctccctccctccggtcgtcgtcacgctgcgtcttggcccaaccgttcaggtgctcggtgcttaactctcctattgcacacccatgtttaacttttcttgaattttcttaggaattgaggctgtagggtatatatgaggggttaattcagccgaactgttcagtaacgtggtaactgttcttcagggtgcgagtttgttgtactataaaggtttggtaacctgaataaaacaaatgaacttctgttctagtttcactatcaccaggttgcgggtttgaaggccaaaaccttcagcactggtcctccaaaaccttcagcgctggtcctgcctatgctagtttcatttgcatggataagttatgaatgaagaaaacatacattttaatatctaggcgaccatttcagaagacgtgtagttagaaatcagtaactaagaacagatcttaaccttatacattcttggtctttctttttgtcctgtatttttttattgtttgggtgtaacaccattattacatagcttggttgatgcatacactactacatggtatttatatcgtcctgacgattgttacatcaaccacattacacattatatatagcagtatagaataaatgttgtacatgtctaataatgcacactaataattgtaaatttgcaacccacttatccagctgattgatattgtgatcagttcacgttgcaagagtttctataaggtggtctgttatccacactacaatctacaaacttcatcagtacatcctcatacaagtgcagatcaaattgcatggtgaaatgtgtacttacaaattcgtttgtaagtgaacttagctaattatatggatactcacatagttttttggataccgatcataccaataatttacgaggaggtgcacccattcagcttcccagtatctaattgtactatacactccttccataggaatttctgtaaggtggactgttatccagagcacgtacttcatttgtacagccttatacaagtacagattcgaattgcatgatgaaatgtgtattttcaaattcatctttaagtgaactcagctaattatatgtgcactcatatacttatttgttttggattataccaataatttatgaggagttgcacccatttatttcctagtttttaatagtgctgcacacttcttctttaggtaagtttataaataaagcttcattttcatgcaatttatgattttatgagattttcccatacacttgcacgttcccatgaaagattcctctcacaaaaaaaacttaaatttcatttaatgtgtaactctctaactcctttcttacatccattgagttatattgcaggttgctagatctattacattttcagacgacgacgacactagtagaaaaaacaattcaaagacgaatgttgaagcgtcacatgaggtataatttataaccttaacagaacaagcttatattcagttatacttaactgttaaaataaacctcatcgtatggtacaaatgttttaccacccaacactcccgaaagttcaagaacattagaatcactagcgaaaaggttcttcaaacttttcttttttcttttaactttgaacatctgttttatcatgacaaatattgtgtgtttaatacattcctcatcaaacaaatttggtgtcatatgctcaaaccaaacccttcagcagtccacaaccctagttctgcaaatccacctacaagacacgaataaggtatttcctttagcactttctacaatttatcaatacgaaattgacatacaaaatataatttagcatgcctgctccattttctttcttggtatctaaaatagaaattttatgaacaatttgacctttatgagttctactaaaacttgaaatttatataaactaattgtactccagttatctcgttgccgtcttttcgtaataggtttcttaaacgtatatgttcacctatttcaagagtaatttttttaccaaacatgtatacatacataggagtatatgtgaatagtgtggtatacaatacatcgacactcccactattttaattatggcccattaattcatgcatgcattcatttattcccttgctgcattttttctatatatttgccttcatctaattttgactgttcatttgatcaaacaacaatgtgtgttgaactaaaatagaggcattagtagaccaggatgaaaaaatagcgttaatacatgttaactaaaagtttaagactccatcctggtccgattctatagtggtacacttttttcttgactaattgcttcgtgctttcagtctttttagtttaaactttcagggatgtgtccactgagattgttgctgctcaagtccagcagactctgcgactattatagcttgccgatatccgaagggatcagaccggacagcacgttgagggacaccaggctgtcgagtttaggcggcattgttccaggtttactttgttcagttcaatttgtctagattttacatattcatgaatagccctttattattggtgcaactaatattcagtcgctaaaatatcaatggcctaccaaatttcgcaaaaaaggatgagcactacacgaaccattcctgtactttgtaagccttccctcctaaaagcttcagaatcttaacatgttacagttagttcttagaagattttatgtgcatcataattctaaaactttagccagtttacacctgttatttagtctactccttgaaaaaagtttttccctttgatctaaacatgaatgcttccttttactccaacatcacagcaaaaaaaaatcaaaagcattgcacttcttactactgatacccctatgtcactactaccatacaggttagtgcacgatccttacctttatgttctacatgtctttgggtttctctttttttcaagtgcgttctattattgtttatatgtccaccttcacactgattagctgttccttgttcctacacagttattatctgttatgtacatttttatacctttccaaattagcttattatctttaaaaaattgtattttcttggctactttacatttgaatgaccaatggcaacatcttcaaacaaacatagctaacttagaggaaagaaaacataatctttaaattgctcataagagagaatgtcatttttcagaaaaaaagaaaaacagtattgatgctttagaaaatcttaaactgatgcatgttaatattatcatatcaatgccaacaacatatgtttaagctggtttcatccttcctagcagctctacttgcttcatctcgctcttcactgctattttttaaattggaaggaaaataagagtacgatagaagaacttgaagcgcattcactggtctcttatttaaagtccataaagcaaagttccaaaaaaacaaaaagaaacattgagttgccttcacccggcttctcttgagaaaatacaaggtaaacatatttggcaattgtaatatatgttgttattttgctctttagttgcttcaaattgtttatgggtaccagtaggcaactcagaagagacaacaactgtactttctcaggcgttaagaaattctttagaaaggcatattattactacatatagagctaggagtagatcttcatccgaacccctccaacgacgactaggtcggcgttttctctccctgctgtttcagcttaaaaactagatgtaccaaacatgctatctgagcaccgcactgatacaacctttgatcagtatttagtactacttgctcttccatattaatactactggtactactatttcattgcacgtttacatgacatggaacagagactgaatttagtcgagtgggttcacctgcagttccggtatgcaaactacacgaatgatgcctacaacaagagtgggaacgaatccttgtggctgcagctgataaaccagagagcatagacttaacctttgtgctcttctcgacaggcttctttgctgttagactttaaccaattcatctcatgtcccaagttcaattttatgtaatgaggattgcatggtattttttggcaatttatctttaatgaactataatgtatagctgaagttggttgcagtttgaaacaatgcgacatttaaa

SEQ ID NO: 71928 - DNA, 4447 bp, Zea Mays
aattcttctcctcgcggtctccctcgccgccacgcctgcatccgccactctccgcgctcgcacacgccgcctcctcctccccgtcaccccttcgccgtggtggctcccgtcgtcccacgcctccctcgtctgcaagcgctgacgcctcctcctctccaaccctaccttcgtccgccgcttccatgtcctccacagggcgcctcacctcctcagcttcttcgccgaccacaacaccggcgctccccctccctccctccggtcgtcgtcacgctgcgtcttggcccaaccgttcaggtgctcggtgcttaactctcctattgcacacccatgtttaacttttcttgaattttcttaggaattgaggctgtagggtatatatgaggggttaattcagccgaactgttcagtaacgtggtaactgttcttcagggtgcgagtttgttgtactataaaggtttggtaacctgaataaaacaaatgaacttctgttctagtttcactatcaccaggttgcgggtttgaaggccaaaaccttcagcactggtcctccaaaaccttcagcgctggtcctgcctatgctagtttcatttgcatggataagttatgaatgaagaaaacatacattttaatatctaggcgaccatttcagaagacgtgtagttagaaatcagtaactaagaacagatcttaaccttatacattcttggtctttctttttgtcctgtatttttttattgtttgggtgtaacaccattattacatagcttggttgatgcatacactactacatggtatttatatcgtcctgacgattgttacatcaaccacattacacattatatatagcagtatagaataaatgttgtacatgtctaataatgcacactaataattgtaaatttgcaacccacttatccagctgattgatattgtgatcagttcacgttgcaagagtttctataaggtggtctgttatccacactacaatctacaaacttcatcagtacatcctcatacaagtgcagatcaaattgcatggtgaaatgtgtacttacaaattcgtttgtaagtgaacttagctaattatatggatactcacatagttttttggataccgatcataccaataatttacgaggaggtgcacccattcagcttcccagtatctaattgtactatacactccttccataggtaagtttataaataaagcttcgttttccatacaatatgattatgctcctttttatgtgaactgcaatattggtcactctatatcagtaaagattgagtgttgcacatgtctaacaatgtgcagtgactgtaaatttgcatcccgcttatccagctgatcaacattgtgattggtttacattgcaggaatttctgtaaggtggactgttatccagagcacgtacttcatttgtacagccttatacaagtacagattcgaattgcatgatgaaatgtgtattttcaaattcatctttaagtgaactcagctaattatatgtgcactcatatacttatttgttttggattataccaataatttatgaggagttgcacccatttatttcctagtttttaatagtgctgcacacttcttctttaggtaagtttataaataaagcttcattttcatgcaatttatgattttatgagattttcccatacacttgcacgttcccatgaaagattcctctcacaaaaaaaacttaaatttcatttaatgtgtaactctctaactcctttcttacatccattgagttatattgcaggttgctagatctattacattttcagacgacgacgacactagtagaaaaaacaattcaaagacgaatgttgaagcgtcacatgaggtataatttataaccttaacagaacaagcttatattcagttatacttaactgttaaaataaacctcatcgtatggtacaaatgttttaccacccaacactcccgaaagttcaagaacattagaatcactagcgaaaaggttcttcaaacttttcttttttcttttaactttgaacatctgttttatcatgacaaatattgtgtgtttaatacattcctcatcaaacaaatttggtgtcatatgctcaaaccaaacccttcagcagtccacaaccctagttctgcaaatccacctacaagacacgaataaggtatttcctttagcactttctacaatttatcaatacgaaattgacatacaaaatataatttagcatgcctgctccattttctttcttggtatctaaaatagaaattttatgaacaatttgacctttatgagttctactaaaacttgaaatttatataaactaattgtactccagttatctcgttgccgtcttttcgtaataggtttcttaaacgtatatgttcacctatttcaagagtaatttttttaccaaacatgtatacatacataggagtatatgtgaatagtgtggtatacaatacatcgacactcccactattttaattatggcccattaattcatgcatgcattcatttattcccttgctgcattttttctatatatttgccttcatctaattttgactgttcatttgatcaaacaacaatgtgtgttgaactaaaatagaggcattagtagaccaggatgaaaaaatagcgttaatacatgttaactaaaagtttaagactccatcctggtccgattctatagtggtacacttttttcttgactaattgcttcgtgctttcagtctttttagtttaaactttcagggatgtgtccactgagattgttgctgctcaagtccagcagactctgcgactattatagcttgccgatatccgaagggatcagaccggacagacctgagatctggttgtgtgcgagattcagcacgttgagggacaccaggctgtcgagtttaggcggcattgttccaggtttactttgttcagttcaatttgtctagattttacatattcatgaatagccctttattattggtgcaactaatattcagtcgctaaaatatcaatggcctaccaaatttcgcaaaaaaggatgagcactacacgaaccattcctgtactttgtaagccttccctcctaaaagcttcagaatcttaacatgttacagttagttcttagaagattttatgtgcatcataattctaaaactttagccagtttacacctgttatttagtctactccttgaaaaaagtttttccctttgatctaaacatgaatgcttccttttactccaacatcacagcaaaaaaaaatcaaaagcattgcacttcttactactgatacccctatgtcactactaccatacagctctacttgcttcatctcgctcttcactgctattttttaaattggaaggaaaataagagtacgatagaagaacttgaagcgcattcactggtctcttatttaaagtccataaagcaaagttccaaaaaaacaaaaagaaacattgagttgccttcacccggcttctcttgagaaaatacaaggtaaacatatttggcaattgtaatatatgttgttattttgctctttagttgcttcaaattgtttatgggtaccagtaggcaactcagaagagacaacaactgtactttctcaggcgttaagaaattctttagaaaggcatattattactacatatagagctaggagtagatcttcatccgaacccctccaacgacgactaggtcggcgttttctctccctgctgtttcaggtttgttacatttcaacctgtgggctttctttcagacaattgcatttcatctagcattcacatgggaagctctgaaatctgccagcttaaaaactagatgtaccaaacatgctatctgagcaccgcactgatacaacctttgatagtctgcgttttctctccctgctgtttcaggtttgttacatttcaacctgtggggtttctttcagacaattgcatttcatctagcattcacatgggaagctctcaaatctgccagcttaaaaactagatgtaccaaacatgctatctgagcaccgcactgatacaacctttgatcagtatttagtactacttgctcttccatattaatactactggtactactatttcattgcacgtttacatgacatggaacagagactgaatttagtcgagtgggttcacctgcagttccggtatgcaaactacacgaatgatgcctacaacaagagtgggaacgaatccttgtggctgcagctgataaaccagagagcatagacttaacctttgtgctcttctcgacaggcttctttgctgttagactttaaccaattcatctcatgtcccaagttcaattttatgtaatgaggattgcatggtattttttggcaatttatctttaatgaactataatgtatagctgaagttggttgcagtttgaaacaatgcgacatttaaa

SEQ ID NO: 71929 - DNA, 4639 bp, Zea Mays
aattcttctcctcgcggtctccctcgccgccacgcctgcatccgccactctccgcgctcgcacacgccgcctcctcctccccgtcaccccttcgccgtggtggctcccgtcgtcccacgcctccctcgtctgcaagcgctgacgcctcctcctctccaaccctaccttcgtccgccgcttccatgtcctccacagggcgcctcacctcctcagcttcttcgccgaccacaacaccggcgctccccctccctccctccggtcgtcgtcacgctgcgtcttggcccaaccgttcaggtgctcggtgcttaactctcctattgcacacccatgtttaacttttcttgaattttcttaggaattgaggctgtagggtatatatgaggggttaattcagccgaactgttcagtaacgtggtaactgttcttcagggtgcgagtttgttgtactataaaggtttggtaacctgaataaaacaaatgaacttctgttctagtttcactatcaccaggttgcgggtttgaaggccaaaaccttcagcactggtcctccaaaaccttcagcgctggtcctgcctatgctagtttcatttgcatggataagttatgaatgaagaaaacatacattttaatatctaggcgaccatttcagaagacgtgtagttagaaatcagtaactaagaacagatcttaaccttatacattcttggtctttctttttgtcctgtatttttttattgtttgggtgtaacaccattattacatagcttggttgatgcatacactactacatggtatttatatcgtcctgacgattgttacatcaaccacattacacattatatatagcagtatagaataaatgttgtacatgtctaataatgcacactaataattgtaaatttgcaacccacttatccagctgattgatattgtgatcagttcacgttgcaagagtttctataaggtggtctgttatccacactacaatctacaaacttcatcagtacatcctcatacaagtgcagatcaaattgcatggtgaaatgtgtacttacaaattcgtttgtaagtgaacttagctaattatatggatactcacatagttttttggataccgatcataccaataatttacgaggaggtgcacccattcagcttcccagtatctaattgtactatacactccttccataggtaagtttataaataaagcttcgttttccatacaatatgattatgctcctttttatgtgaactgcaatattggtcactctatatcagtaaagattgagtgttgcacatgtctaacaatgtgcagtgactgtaaatttgcatcccgcttatccagctgatcaacattgtgattggtttacattgcaggaatttctgtaaggtggactgttatccagagcacgtacttcatttgtacagccttatacaagtacagattcgaattgcatgatgaaatgtgtattttcaaattcatctttaagtgaactcagctaattatatgtgcactcatatacttatttgttttggattataccaataatttatgaggagttgcacccatttatttcctagtttttaatagtgctgcacacttcttctttaggtaagtttataaataaagcttcattttcatgcaatttatgattttatgagattttcccatacacttgcacgttcccatgaaagattcctctcacaaaaaaaacttaaatttcatttaatgtgtaactctctaactcctttcttacatccattgagttatattgcaggttgctagatctattacattttcagacgacgacgacactagtagaaaaaacaattcaaagacgaatgttgaagcgtcacatgaggtataatttataaccttaacagaacaagcttatattcagttatacttaactgttaaaataaacctcatcgtatggtacaaatgttttaccacccaacactcccgaaagttcaagaacattagaatcactagcgaaaaggttcttcaaacttttcttttttcttttaactttgaacatctgttttatcatgacaaatattgtgtgtttaatacattcctcatcaaacaaatttggtgtcatatgctcaaaccaaacccttcagcagtccacaaccctagttctgcaaatccacctacaagacacgaataaggtatttcctttagcactttctacaatttatcaatacgaaattgacatacaaaatataatttagcatgcctgctccattttctttcttggtatctaaaatagaaattttatgaacaatttgacctttatgagttctactaaaacttgaaatttatataaactaattgtactccagttatctcgttgccgtcttttcgtaataggtttcttaaacgtatatgttcacctatttcaagagtaatttttttaccaaacatgtatacatacataggagtatatgtgaatagtgtggtatacaatacatcgacactcccactattttaattatggcccattaattcatgcatgcattcatttattcccttgctgcattttttctatatatttgccttcatctaattttgactgttcatttgatcaaacaacaatgtgtgttgaactaaaatagaggcattagtagaccaggatgaaaaaatagcgttaatacatgttaactaaaagtttaagactccatcctggtccgattctatagtggtacacttttttcttgactaattgcttcgtgctttcagtctttttagtttaaactttcagggatgtgtccactgagattgttgctgctcaagtccagcagactctgcgactattatagcttgccgatatccgaagggatcagaccggacagcacgttgagggacaccaggctgtcgagtttaggcggcattgttccaggtttactttgttcagttcaatttgtctagattttacatattcatgaatagccctttattattggtgcaactaatattcagtcgctaaaatatcaatggcctaccaaatttcgcaaaaaaggatgagcactacacgaaccattcctgtactttgtaagccttccctcctaaaagcttcagaatcttaacatgttacagttagttcttagaagattttatgtgcatcataattctaaaactttagccagtttacacctgttatttagtctactccttgaaaaaagtttttccctttgatctaaacatgaatgcttccttttactccaacatcacagcaaaaaaaaatcaaaagcattgcacttcttactactgatacccctatgtcactactaccatacaggttagtgcacgatccttacctttatgttctacatgtctttgggtttctctttttttcaagtgcgttctattattgtttatatgtccaccttcacactgattagctgttccttgttcctacacagttattatctgttatgtacatttttatacctttccaaattagcttattatctttaaaaaattgtattttcttggctactttacatttgaatgaccaatggcaacatcttcaaacaaacatagctaacttagaggaaagaaaacataatctttaaattgctcataagagagaatgtcatttttcagaaaaaaagaaaaacagtattgatgctttagaaaatcttaaactgatgcatgttaatattatcatatcaatgccaacaacatatgtttaagctggtttcatccttcctagcagctctacttgcttcatctcgctcttcactgctattttttaaattggaaggaaaataagagtacgatagaagaacttgaagcgcattcactggtctcttatttaaagtccataaagcaaagttccaaaaaaacaaaaagaaacattgagttgccttcacccggcttctcttgagaaaatacaaggcgttaagaaattctttagaaaggcatattattactacatatagagctaggagtagatcttcatccgaacccctccaacgacgactaggtcggcgttttctctccctgctgtttcagcttaaaaactagatgtaccaaacatgctatctgagcaccgcactgatacaacctttgatagtctgcgttttctctccctgctgtttcaggtttgttacatttcaacctgtggggtttctttcagacaattgcatttcatctagcattcacatgggaagctctcaaatctgccagcttaaaaactagatgtaccaaacatgctatctgagcaccgcactgatacaacctttgatcagtatttagtactacttgctcttccatattaatactactggtactactatttcattgcacgtttacatgacatggaacagagactgaatttagtcgagtgggttcacctgcagttccggtatgcaaactacacgaatgatgcctacaacaagagtgggaacgaatccttgtggctgcagctgataaaccagagagcatagacttaacctttgtgctcttctcgacaggcttctttgctgttagactttaaccaattcatctcatgtcccaagttcaattttatgtaatgaggattgcatggtattttttggcaatttatctttaatgaactataatgtatagctgaagttggttgcagtttgaaacaatgcgacatttaaa

SEQ ID NO: 71930 - DNA, 4283 bp, Zea Mays
aattcttctcctcgcggtctccctcgccgccacgcctgcatccgccactctccgcgctcgcacacgccgcctcctcctccccgtcaccccttcgccgtggtggctcccgtcgtcccacgcctccctcgtctgcaagcgctgacgcctcctcctctccaaccctaccttcgtccgccgcttccatgtcctccacagggcgcctcacctcctcagcttcttcgccgaccacaacaccggcgctccccctccctccctccggtcgtcgtcacgctgcgtcttggcccaaccgttcaggtgctcggtgcttaactctcctattgcacacccatgtttaacttttcttgaattttcttaggaattgaggctgtagggtatatatgaggggttaattcagccgaactgttcagtaacgtggtaactgttcttcagggtgcgagtttgttgtactataaaggtttggtaacctgaataaaacaaatgaacttctgttctagtttcactatcaccaggttgcgggtttgaaggccaaaaccttcagcactggtcctccaaaaccttcagcgctggtcctgcctatgctagtttcatttgcatggataagttatgaatgaagaaaacatacattttaatatctaggcgaccatttcagaagacgtgtagttagaaatcagtaactaagaacagatcttaaccttatacattcttggtctttctttttgtcctgtatttttttattgtttgggtgtaacaccattattacatagcttggttgatgcatacactactacatggtatttatatcgtcctgacgattgttacatcaaccacattacacattatatatagcagtatagaataaatgttgtacatgtctaataatgcacactaataattgtaaatttgcaacccacttatccagctgattgatattgtgatcagttcacgttgcaagagtttctataaggtggtctgttatccacactacaatctacaaacttcatcagtacatcctcatacaagtgcagatcaaattgcatggtgaaatgtgtacttacaaattcgtttgtaagtgaacttagctaattatatggatactcacatagttttttggataccgatcataccaataatttacgaggaggtgcacccattcagcttcccagtatctaattgtactatacactccttccataggtaagtttataaataaagcttcgttttccatacaatatgattatgctcctttttatgtgaactgcaatattggtcactctatatcagtaaagattgagtgttgcacatgtctaacaatgtgcagtgactgtaaatttgcatcccgcttatccagctgatcaacattgtgattggtttacattgcaggaatttctgtaaggtggactgttatccagagcacgtacttcatttgtacagccttatacaagtacagattcgaattgcatgatgaaatgtgtattttcaaattcatctttaagtgaactcagctaattatatgtgcactcatatacttatttgttttggattataccaataatttatgaggagttgcacccatttatttcctagtttttaatagtgctgcacacttcttctttaggtaagtttataaataaagcttcattttcatgcaatttatgattttatgagattttcccatacacttgcacgttcccatgaaagattcctctcacaaaaaaaacttaaatttcatttaatgtgtaactctctaactcctttcttacatccattgagttatattgcaggttgctagatctattacattttcagacgacgacgacactagaaaaaacaattcaaagacgaatgttgaagcgtcacatgaggtataatttataaccttaacagaacaagcttatattcagttatacttaactgttaaaataaacctcatcgtatggtacaaatgttttaccacccaacactcccgaaagttcaagaacattagaatcactagcgaaaaggttcttcaaacttttcttttttcttttaactttgaacatctgttttatcatgacaaatattgtgtgtttaatacattcctcatcaaacaaatttggtgtcatatgctcaaaccaaacccttcagcagtccacaaccctagttctgcaaatccacctacaagacacgaataaggtatttcctttagcactttctacaatttatcaatacgaaattgacatacaaaatataatttagcatgcctgctccattttctttcttggtatctaaaatagaaattttatgaacaatttgacctttatgagttctactaaaacttgaaatttatataaactaattgtactccagttatctcgttgccgtcttttcgtaataggtttcttaaacgtatatgttcacctatttcaagagtaatttttttaccaaacatgtatacatacataggagtatatgtgaatagtgtggtatacaatacatcgacactcccactattttaattatggcccattaattcatgcatgcattcatttattcccttgctgcattttttctatatatttgccttcatctaattttgactgttcatttgatcaaacaacaatgtgtgttgaactaaaatagaggcattagtagaccaggatgaaaaaatagcgttaatacatgttaactaaaagtttaagactccatcctggtccgattctatagtggtacacttttttcttgactaattgcttcgtgctttcagtctttttagtttaaactttcagggatgtgtccactgagattgttgctgctcaagtccagcagactctgcgactattatagcttgccgatatccgaagggatcagaccggacagacctgagatctggttgtgtgcgagattcagcacgttgagggacaccaggctgtcgagtttaggcggcattgttccaggtttactttgttcagttcaatttgtctagattttacatattcatgaatagccctttattattggtgcaactaatattcagtcgctaaaatatcaatggcctaccaaatttcgcaaaaaaggatgagcactacacgaaccattcctgtactttgtaagccttccctcctaaaagcttcagaatcttaacatgttacagttagttcttagaagattttatgtgcatcataattctaaaactttagccagtttacacctgttatttagtctactccttgaaaaaagtttttccctttgatctaaacatgaatgcttccttttactccaacatcacagcaaaaaaaaatcaaaagcattgcacttcttactactgatacccctatgtcactactaccatacaggaaaataagagtacgatagaagaacttgaagcgcattcactggtctcttatttaaagtccataaagcaaagttccaaaaaaacaaaaagaaacattgagttgccttcacccggcttctcttgagaaaatacaaggcgttaagaaattctttagaaaggcatattattactacatatagagctaggagtagatcttcatccgaacccctccaacgacgactaggtcggcgttttctctccctgctgtttcaggtttgttacatttcaacctgtgggctttctttcagacaattgcatttcatctagcattcacatgggaagctctgaaatctgccagcttaaaaactagatgtaccaaacatgctatctgagcaccgcactgatacaacctttgatagtctgcgttttctctccctgctgtttcaggtttgttacatttcaacctgtggggtttctttcagacaattgcatttcatctagcattcacatgggaagctctcaaatctgccagcttaaaaactagatgtaccaaacatgctatctgagcaccgcactgatacaacctttgatcagtatttagtactacttgctcttccatattaatactactggtactactatttcattgcacgtttacatgacatggaacagagactgaatttagtcgagtgggttcacctgcagttccggtatgcaaactacacgaatgatgcctacaacaagagtgggaacgaatccttgtggctgcagctgataaaccagagagcatagacttaacctttgtgctcttctcgacaggcttctttgctgttagactttaaccaattcatctcatgtcccaagttcaattttatgtaatgaggattgcatggtattttttggcaatttatctttaatgaactataatgtatagctgaagttggttgcagtttgaaacaatgcgacatttaaa

SEQ ID NO: 71931 - DNA, 4572 bp, Zea Mays
aattcttctcctcgcggtctccctcgccgccacgcctgcatccgccactctccgcgctcgcacacgccgcctcctcctccccgtcaccccttcgccgtggtggctcccgtcgtcccacgcctccctcgtctgcaagcgctgacgcctcctcctctccaaccctaccttcgtccgccgcttccatgtcctccacagggcgcctcacctcctcagcttcttcgccgaccacaacaccggcgctccccctccctccctccggtcgtcgtcacgctgcgtcttggcccaaccgttcaggtgctcggtgcttaactctcctattgcacacccatgtttaacttttcttgaattttcttaggaattgaggctgtagggtatatatgaggggttaattcagccgaactgttcagtaacgtggtaactgttcttcagggtgcgagtttgttgtactataaaggtttggtaacctgaataaaacaaatgaacttctgttctagtttcactatcaccaggttgcgggtttgaaggccaaaaccttcagcactggtcctccaaaaccttcagcgctggtcctgcctatgctagtttcatttgcatggataagttatgaatgaagaaaacatacattttaatatctaggcgaccatttcagaagacgtgtagttagaaatcagtaactaagaacagatcttaaccttatacattcttggtctttctttttgtcctgtatttttttattgtttgggtgtaacaccattattacatagcttggttgatgcatacactactacatggtatttatatcgtcctgacgattgttacatcaaccacattacacattatatatagcagtatagaataaatgttgtacatgtctaataatgcacactaataattgtaaatttgcaacccacttatccagctgattgatattgtgatcagttcacgttgcaagagtttctataaggtggtctgttatccacactacaatctacaaacttcatcagtacatcctcatacaagtgcagatcaaattgcatggtgaaatgtgtacttacaaattcgtttgtaagtgaacttagctaattatatggatactcacatagttttttggataccgatcataccaataatttacgaggaggtgcacccattcagcttcccagtatctaattgtactatacactccttccataggtaagtttataaataaagcttcgttttccatacaatatgattatgctcctttttatgtgaactgcaatattggtcactctatatcagtaaagattgagtgttgcacatgtctaacaatgtgcagtgactgtaaatttgcatcccgcttatccagctgatcaacattgtgattggtttacattgcaggaatttctgtaaggtggactgttatccagagcacgtacttcatttgtacagccttatacaagtacagattcgaattgcatgatgaaatgtgtattttcaaattcatctttaagtgaactcagctaattatatgtgcactcatatacttatttgttttggattataccaataatttatgaggagttgcacccatttatttcctagtttttaatagtgctgcacacttcttctttaggtaagtttataaataaagcttcattttcatgcaatttatgattttatgagattttcccatacacttgcacgttcccatgaaagattcctctcacaaaaaaaacttaaatttcatttaatgtgtaactctctaactcctttcttacatccattgagttatattgcaggttgctagatctattacattttcagacgacgacgacactagtagaaaaaacaattcaaagacgaatgttgaagcgtcacatgaggtataatttataaccttaacagaacaagcttatattcagttatacttaactgttaaaataaacctcatcgtatggtacaaatgttttaccacccaacactcccgaaagttcaagaacattagaatcactagcgaaaaggttcttcaaacttttcttttttcttttaactttgaacatctgttttatcatgacaaatattgtgtgtttaatacattcctcatcaaacaaatttggtgtcatatgctcaaaccaaacccttcagcagtccacaaccctagttctgcaaatccacctacaagacacgaataaggtatttcctttagcactttctacaatttatcaatacgaaattgacatacaaaatataatttagcatgcctgctccattttctttcttggtatctaaaatagaaattttatgaacaatttgacctttatgagttctactaaaacttgaaatttatataaactaattgtactccagttatctcgttgccgtcttttcgtaataggtttcttaaacgtatatgttcacctatttcaagagtaatttttttaccaaacatgtatacatacataggagtatatgtgaatagtgtggtatacaatacatcgacactcccactattttaattatggcccattaattcatgcatgcattcatttattcccttgctgcattttttctatatatttgccttcatctaattttgactgttcatttgatcaaacaacaatgtgtgttgaactaaaatagaggcattagtagaccaggatgaaaaaatagcgttaatacatgttaactaaaagtttaagactccatcctggtccgattctatagtggtacacttttttcttgactaattgcttcgtgctttcagtctttttagtttaaactttcagggatgtgtccactgagattgttgctgctcaagtccagcagactctgcgactattatagcttgccgatatccgaagggatcagaccggacagcacgttgagggacaccaggctgtcgagtttaggcggcattgttccaggtttactttgttcagttcaatttgtctagattttacatattcatgaatagccctttattattggtgcaactaatattcagtcgctaaaatatcaatggcctaccaaatttcgcaaaaaaggatgagcactacacgaaccattcctgtactttgtaagccttccctcctaaaagcttcagaatcttaacatgttacagttagttcttagaagattttatgtgcatcataattctaaaactttagccagtttacacctgttatttagtctactccttgaaaaaagtttttccctttgatctaaacatgaatgcttccttttactccaacatcacagcaaaaaaaaatcaaaagcattgcacttcttactactgatacccctatgtcactactaccatacaggttagtgcacgatccttacctttatgttctacatgtctttgggtttctctttttttcaagtgcgttctattattgtttatatgtccaccttcacactgattagctgttccttgttcctacacagttattatctgttatgtacatttttatacctttccaaattagcttattatctttaaaaaattgtattttcttggctactttacatttgaatgaccaatggcaacatcttcaaacaaacatagctaacttagaggaaagaaaacataatctttaaattgctcataagagagaatgtcatttttcagaaaaaaagaaaaacagtattgatgctttagaaaatcttaaactgatgcatgttaatattatcatatcaatgccaacaacatatgtttaagctggtttcatccttcctagcagctctacttgcttcatctcgctcttcactgctattttttaaattggaaggaaaataagagtacgatagaagaacttgaagcgcattcactggtctcttatttaaagtccataaagcaaagttccaaaaaaacaaaaagaaacattgagttgccttcacccggcttctcttgagaaaatacaagacaattgcatttcatctagcattcacatgggaagctctgaaatctgccagcttaaaaactagatgtaccaaacatgctatctgagcaccgcactgatacaacctttgatagtctgcgttttctctccctgctgtttcaggtttgttacatttcaacctgtggggtttctttcagacaattgcatttcatctagcattcacatgggaagctctcaaatctgccagcttaaaaactagatgtaccaaacatgctatctgagcaccgcactgatacaacctttgatcagtatttagtactacttgctcttccatattaatactactggtactactatttcattgcacgtttacatgacatggaacagagactgaatttagtcgagtgggttcacctgcagttccggtatgcaaactacacgaatgatgcctacaacaagagtgggaacgaatccttgtggctgcagctgataaaccagagagcatagacttaacctttgtgctcttctcgacaggcttctttgctgttagactttaaccaattcatctcatgtcccaagttcaattttatgtaatgaggattgcatggtattttttggcaatttatctttaatgaactataatgtatagctgaagttggttgcagtttgaaacaatgcgacatttaaa

SEQ ID NO: 71932 - DNA, 3414 bp, Zea Mays
cttctcctcgcggtctccctcgccgccacgcctgcatccgccactctccgcgctcgcacacgccgcctcctcctccccgtcaccccttcgccgtggtggctcccgtcgtcccacgcctccctcgtctgcaagcgctgacgcctcctcctctccaaccctaccttcgtccgccgcttccatgtcctccacagggcgcctcacctcctcagcttcttcgccgaccacaacaccggcgctccccctccctccctccggtcgtcgtcacgctgcgtcttggcccaaccgttcaggaatttctgtaaggtggactgttatccagagcacgtacttcatttgtacagccttatacaagtacagattcgaattgcatgatgaaatgtgtattttcaaattcatctttaagtgaactcagctaattatatgtgcactcatatacttatttgttttggattataccaataatttatgaggagttgcacccatttatttcctagtttttaatagtgctgcacacttcttctttaggtaagtttataaataaagcttcattttcatgcaatttatgattttatgagattttcccatacacttgcacgttcccatgaaagattcctctcacaaaaaaaacttaaatttcatttaatgtgtaactctctaactcctttcttacatccattgagttatattgcaggttgctagatctattacattttcagacgacgacgacactaggtaagtatatttccattaacattctattcaactcactattatatgcttctattatatactcctatttaataacatttattttttgttaataaaccagtagaaaaaacaattcaaagacgaatgttgaagcgtcacatgaggtataatttataaccttaacagaacaagcttatattcagttatacttaactgttaaaataaacctcatcgtatggtacaaatgttttaccacccaacactcccgaaagttcaagaacattagaatcactagcgaaaaggttcttcaaacttttcttttttcttttaactttgaacatctgttttatcatgacaaatattgtgtgtttaatacattcctcatcaaacaaatttggtgtcatatgctcaaaccaaacccttcagcagtccacaaccctagttctgcaaatccacctacaagacacgaataaggtatttcctttagcactttctacaatttatcaatacgaaattgacatacaaaatataatttagcatgcctgctccattttctttcttggtatctaaaatagaaattttatgaacaatttgacctttatgagttctactaaaacttgaaatttatataaactaattgtactccagttatctcgttgccgtcttttcgtaataggtttcttaaacgtatatgttcacctatttcaagagtaatttttttaccaaacatgtatacatacataggagtatatgtgaatagtgtggtatacaatacatcgacactcccactattttaattatggcccattaattcatgcatgcattcatttattcccttgctgcattttttctatatatttgccttcatctaattttgactgttcatttgatcaaacaacaatgtgtgttgaactaaaatagaggcattagtagaccaggatgaaaaaatagcgttaatacatgttaactaaaagtttaagactccatcctggtccgattctatagtggtacacttttttcttgactaattgcttcgtgctttcagtctttttagtttaaactttcagggatgtgtccactgagattgttgctgctcaagtccagcagactctgcgactattatagcttgccgatatccgaagggatcagaccggacagcacgttgagggacaccaggctgtcgagtttaggcggcattgttccaggtttactttgttcagttcaatttgtctagattttacatattcatgaatagccctttattattggtgcaactaatattcagtcgctaaaatatcaatggcctaccaaatttcgcaaaaaaggatgagcactacacgaaccattcctgtactttgtaagccttccctcctaaaagcttcagaatcttaacatgttacagttagttcttagaagattttatgtgcatcataattctaaaactttagccagtttacacctgttatttagtctactccttgaaaaaagtttttccctttgatctaaacatgaatgcttccttttactccaacatcacagcaaaaaaaaatcaaaagcattgcacttcttactactgatacccctatgtcactactaccatacaggttagtgcacgatccttacctttatgttctacatgtctttgggtttctctttttttcaagtgcgttctattattgtttatatgtccaccttcacactgattagctgttccttgttcctacacagttattatctgttatgtacatttttatacctttccaaattagcttattatctttaaaaaattgtattttcttggctactttacatttgaatgaccaatggcaacatcttcaaacaaacatagctaacttagaggaaagaaaacataatctttaaattgctcataagagagaatgtcatttttcagaaaaaaagaaaaacagtattgatgctttagaaaatcttaaactgatgcatgttaatattatcatatcaatgccaacaacatatgtttaagctggtttcatccttcctagcagctctacttgcttcatctcgctcttcactgctattttttaaattggaaggaaaataagagtacgatagaagaacttgaagcgcattcactggtctcttatttaaagtccataaagcaaagttccaaaaaaacaaaaagaaacattgagttgccttcacccggcttctcttgagaaaatacaaggtaaacatatttggcaattgtaatatatgttgttattttgctctttagttgcttcaaattgtttatgggtaccagtaggcaactcagaagagacaacaactgtactttctcaggcgttaagaaattctttagaaaggcatattattactacatatagagctaggagtagatcttcatccgaacccctccaacgacgactaggtcggcgttttctctccctgctgtttcagagttccggtatgcaaactacacgaatgatgcctacaacaagagtgggaacgaatccttgtggctgcagctgataaaccagagagcatagacttaacctttgtgctcttctcgacaggcttctttgctgttagactttaaccaattcatctcatgtcccaagttcaattttatgtaatgaggattgcatggtattttttggcaatttatctttaatgaactataatgtatagctgaagttggttgcagtttgaaacaatgcgacatttaaa

SEQ ID NO: 71933 - DNA, 1938 bp, Zea Mays
cttctcctcgcggtctccctcgccgccacgcctgcatccgccactctccgcgctcgcacacgccgcctcctcctccccgtcaccccttcgccgtggtggctcccgtcgtcccacgcctccctcgtctgcaagcgctgacgcctcctcctctccaaccctaccttcgtccgccgcttccatgtcctccacagggcgcctcacctcctcagcttcttcgccgaccacaacaccggcgctccccctccctccctccggtcgtcgtcacgctgcgtcttggcccaaccgttcaggaatttctgtaaggtggactgttatccagagcacgtacttcatttgtacagccttatacaagtacagattcgaattgcatgatgaaatgtgtattttcaaattcatctttaagtgaactcagctaattatatgtgcactcatatacttatttgttttggattataccaataatttatgaggagttgcacccatttatttcctagtttttaatagtgctgcacacttcttctttaggtaagtttataaataaagcttcattttcatgcaatttatgattttatgagattttcccatacacttgcacgttcccatgaaagattcctctcacaaaaaaaacttaaatttcatttaatgtgtaactctctaactcctttcttacatccattgagttatattgcaggttgctagatctattacattttcagacgacgacgacactaggtaagtatatttccattaacattctattcaactcactattatatgcttctattatatactcctatttaataacatttattttttgttaataaaccagtagaaaaaacaattcaaagacgaatgttgaagcgtcacatgaggtataatttataaccttaacagaacaagcttatattcagttatacttaactgttaaaataaacctcatcgtatggtacaaatgttttaccacccaacactcccgaaagttcaagaacattagaatcactagcgaaaaggttcttcaaacttttcttttttcttttaactttgaacatctgttttatcatgacaaatattgtgtgtttaatacattcctcatcaaacaaatttggtgtcatatgctcaaaccaaacccttcagcagtccacaaccctagttctgcaaatccacctacaagacacgaataagggatgtgtccactgagattgttgctgctcaagtccagcagactctgcgactattatagcttgccgatatccgaagggatcagaccggacagcaaaaaaaaatcaaaagcattgcacttcttactactgatacccctatgtcactactaccatacagctctacttgcttcatctcgctcttcactgctattttttaaattggaaggaaaataagagtacgatagaagaacttgaagcgcattcactggtctcttatttaaagtccataaagcaaagttccaaaaaaacaaaaagaaacattgagttgccttcacccggcttctcttgagaaaatacaaggcgttaagaaattctttagaaaggcatattattactacatatagagctaggagtagatcttcatccgaacccctccaacgacgactaggtcggcgttttctctccctgctgtttcagagactgaatttagtcgagtgggttcacctgcagttccggtatgcaaactacacgaatgatgcctacaacaagagtgggaacgaatccttgtggctgcagctgataaaccagagagcatagacttaacctttgtgctcttctcgacaggcttctttgctgttagactttaaccaattcatctcatgtcccaagttcaattttatgtaatgaggattgcatggtattttttggcaatttatctttaatgaactataatgtatagctgaagttggttgcagtttgaaacaatgcgacatttaaa

SEQ ID NO: 71934 - DNA, 3631 bp, Zea Mays
cttctcctcgcggtctccctcgccgccacgcctgcatccgccactctccgcgctcgcacacgccgcctcctcctccccgtcaccccttcgccgtggtggctcccgtcgtcccacgcctccctcgtctgcaagcgctgacgcctcctcctctccaaccctaccttcgtccgccgcttccatgtcctccacagggcgcctcacctcctcagcttcttcgccgaccacaacaccggcgctccccctccctccctccggtcgtcgtcacgctgcgtcttggcccaaccgttcaggaatttctgtaaggtggactgttatccagagcacgtacttcatttgtacagccttatacaagtacagattcgaattgcatgatgaaatgtgtattttcaaattcatctttaagtgaactcagctaattatatgtgcactcatatacttatttgttttggattataccaataatttatgaggagttgcacccatttatttcctagtttttaatagtgctgcacacttcttctttaggtaagtttataaataaagcttcattttcatgcaatttatgattttatgagattttcccatacacttgcacgttcccatgaaagattcctctcacaaaaaaaacttaaatttcatttaatgtgtaactctctaactcctttcttacatccattgagttatattgcaggttgctagatctattacattttcagacgacgacgacactagaaaaaacaattcaaagacgaatgttgaagcgtcacatgaggtataatttataaccttaacagaacaagcttatattcagttatacttaactgttaaaataaacctcatcgtatggtacaaatgttttaccacccaacactcccgaaagttcaagaacattagaatcactagcgaaaaggttcttcaaacttttcttttttcttttaactttgaacatctgttttatcatgacaaatattgtgtgtttaatacattcctcatcaaacaaatttggtgtcatatgctcaaaccaaacccttcagcagtccacaaccctagttctgcaaatccacctacaagacacgaataaggtatttcctttagcactttctacaatttatcaatacgaaattgacatacaaaatataatttagcatgcctgctccattttctttcttggtatctaaaatagaaattttatgaacaatttgacctttatgagttctactaaaacttgaaatttatataaactaattgtactccagttatctcgttgccgtcttttcgtaataggtttcttaaacgtatatgttcacctatttcaagagtaatttttttaccaaacatgtatacatacataggagtatatgtgaatagtgtggtatacaatacatcgacactcccactattttaattatggcccattaattcatgcatgcattcatttattcccttgctgcattttttctatatatttgccttcatctaattttgactgttcatttgatcaaacaacaatgtgtgttgaactaaaatagaggcattagtagaccaggatgaaaaaatagcgttaatacatgttaactaaaagtttaagactccatcctggtccgattctatagtggtacacttttttcttgactaattgcttcgtgctttcagtctttttagtttaaactttcagggatgtgtccactgagattgttgctgctcaagtccagcagactctgcgactattatagcttgccgatatccgaagggatcagaccggacagcacgttgagggacaccaggctgtcgagtttaggcggcattgttccaggtttactttgttcagttcaatttgtctagattttacatattcatgaatagccctttattattggtgcaactaatattcagtcgctaaaatatcaatggcctaccaaatttcgcaaaaaaggatgagcactacacgaaccattcctgtactttgtaagccttccctcctaaaagcttcagaatcttaacatgttacagttagttcttagaagattttatgtgcatcataattctaaaactttagccagtttacacctgttatttagtctactccttgaaaaaagtttttccctttgatctaaacatgaatgcttccttttactccaacatcacagcaaaaaaaaatcaaaagcattgcacttcttactactgatacccctatgtcactactaccatacaggttagtgcacgatccttacctttatgttctacatgtctttgggtttctctttttttcaagtgcgttctattattgtttatatgtccaccttcacactgattagctgttccttgttcctacacagttattatctgttatgtacatttttatacctttccaaattagcttattatctttaaaaaattgtattttcttggctactttacatttgaatgaccaatggcaacatcttcaaacaaacatagctaacttagaggaaagaaaacataatctttaaattgctcataagagagaatgtcatttttcagaaaaaaagaaaaacagtattgatgctttagaaaatcttaaactgatgcatgttaatattatcatatcaatgccaacaacatatgtttaagctggtttcatccttcctagcagctctacttgcttcatctcgctcttcactgctattttttaaattggaaggaaaataagagtacgatagaagaacttgaagcgcattcactggtctcttatttaaagtccataaagcaaagttccaaaaaaacaaaaagaaacattgagttgccttcacccggcttctcttgagaaaatacaaggcgttaagaaattctttagaaaggcatattattactacatatagagctaggagtagatcttcatccgaacccctccaacgacgactaggtcggcgttttctctccctgctgtttcaggtttgttacatttcaacctgtgggctttctttcagacaattgcatttcatctagcattcacatgggaagctctgaaatctgccagcttaaaaactagatgtaccaaacatgctatctgagcaccgcactgatacaacctttgatagtctgcgttttctctccctgctgtttcaggtttgttacatttcaacctgtggggtttctttcagacaattgcatttcatctagcattcacatgggaagctctcaaatctgccagcttaaaaactagatgtaccaaacatgctatctgagcaccgcactgatacaacctttgatcagtatttagtactacttgctcttccatattaatactactggtactactatttcattgcacgtttacatgacatggaacagagactgaatttagtcgagtgggttcacctgcagttccggtatgcaaactacacgaatgatgcctacaacaagagtgggaacgaatccttgtggctgcagctgataaaccagagagcatagacttaacctttgtgctcttctcgacaggcttctttgctgttagactttaaccaattcatctcatgtcccaagttcaattttatgtaatgaggattgcatggtattttttggcaatttatctttaatgaactataatgtatagctgaagttggttgcagtttgaaacaatgcgacatttaaa

SEQ ID NO: 71935 - DNA, 3421 bp, Zea Mays
cttctcctcgcggtctccctcgccgccacgcctgcatccgccactctccgcgctcgcacacgccgcctcctcctccccgtcaccccttcgccgtggtggctcccgtcgtcccacgcctccctcgtctgcaagcgctgacgcctcctcctctccaaccctaccttcgtccgccgcttccatgtcctccacagggcgcctcacctcctcagcttcttcgccgaccacaacaccggcgctccccctccctccctccggtcgtcgtcacgctgcgtcttggcccaaccgttcaggaatttctgtaaggtggactgttatccagagcacgtacttcatttgtacagccttatacaagtacagattcgaattgcatgatgaaatgtgtattttcaaattcatctttaagtgaactcagctaattatatgtgcactcatatacttatttgttttggattataccaataatttatgaggagttgcacccatttatttcctagtttttaatagtgctgcacacttcttctttaggtaagtttataaataaagcttcattttcatgcaatttatgattttatgagattttcccatacacttgcacgttcccatgaaagattcctctcacaaaaaaaacttaaatttcatttaatgtgtaactctctaactcctttcttacatccattgagttatattgcaggttgctagatctattacattttcagacgacgacgacactaggtaagtatatttccattaacattctattcaactcactattatatgcttctattatatactcctatttaataacatttattttttgttaataaaccagtagaaaaaacaattcaaagacgaatgttgaagcgtcacatgaggtataatttataaccttaacagaacaagcttatattcagttatacttaactgttaaaataaacctcatcgtatggtacaaatgttttaccacccaacactcccgaaagttcaagaacattagaatcactagcgaaaaggttcttcaaacttttcttttttcttttaactttgaacatctgttttatcatgacaaatattgtgtgtttaatacattcctcatcaaacaaatttggtgtcatatgctcaaaccaaacccttcagcagtccacaaccctagttctgcaaatccacctacaagacacgaataaggtatttcctttagcactttctacaatttatcaatacgaaattgacatacaaaatataatttagcatgcctgctccattttctttcttggtatctaaaatagaaattttatgaacaatttgacctttatgagttctactaaaacttgaaatttatataaactaattgtactccagttatctcgttgccgtcttttcgtaataggtttcttaaacgtatatgttcacctatttcaagagtaatttttttaccaaacatgtatacatacataggagtatatgtgaatagtgtggtatacaatacatcgacactcccactattttaattatggcccattaattcatgcatgcattcatttattcccttgctgcattttttctatatatttgccttcatctaattttgactgttcatttgatcaaacaacaatgtgtgttgaactaaaatagaggcattagtagaccaggatgaaaaaatagcgttaatacatgttaactaaaagtttaagactccatcctggtccgattctatagtggtacacttttttcttgactaattgcttcgtgctttcagtctttttagtttaaactttcagggatgtgtccactgagattgttgctgctcaagtccagcagactctgcgactattatagcttgccgatatccgaagggatcagaccggacaggtaattttgtgaattgtgatagatttagctcatagagactgctcagttttgtgaccgccatcaaaatcagacctgagatctggttgtgtgcgagattcagcacgttgagggacaccaggctgtcgagtttaggcggcattgttccaggtttactttgttcagttcaatttgtctagattttacatattcatgaatagccctttattattggtgcaactaatattcagtcgctaaaatatcaatggcctaccaaatttcgcaaaaaaggatgagcactacacgaaccattcctgtactttgtaagccttccctcctaaaagcttcagaatcttaacatgttacagttagttcttagaagattttatgtgcatcataattctaaaactttagccagtttacacctgttatttagtctactccttgaaaaaagtttttccctttgatctaaacatgaatgcttccttttactccaacatcacagcaaaaaaaaatcaaaagcattgcacttcttactactgatacccctatgtcactactaccatacaggttagtgcacgatccttacctttatgttctacatgtctttgggtttctctttttttcaagtgcgttctattattgtttatatgtccaccttcacactgattagctgttccttgttcctacacagttattatctgttatgtacatttttatacctttccaaattagcttattatctttaaaaaattgtattttcttggctactttacatttgaatgaccaatggcaacatcttcaaacaaacatagctaacttagaggaaagaaaacataatctttaaattgctcataagagagaatgtcatttttcagaaaaaaagaaaaacagtattgatgctttagaaaatcttaaactgatgcatgttaatattatcatatcaatgccaacaacatatgtttaagctggtttcatccttcctagcagctctacttgcttcatctcgctcttcactgctattttttaaattggaaggaaaataagagtacgatagaagaacttgaagcgcattcactggtctcttatttaaagtccataaagcaaagttccaaaaaaacaaaaagaaacattgagttgccttcacccggcttctcttgagaaaatacaagacaattgcatttcatctagcattcacatgggaagctctgaaatctgccagcttaaaaactagatgtaccaaacatgctatctgagcaccgcactgatacaacctttgatagtctgcgttttctctccctgctgtttcagttccggtatgcaaactacacgaatgatgcctacaacaagagtgggaacgaatccttgtggctgcagctgataaaccagagagcatagacttaacctttgtgctcttctcgacaggcttctttgctgttagactttaaccaattcatctcatgtcccaagttcaattttatgtaatgaggattgcatggtattttttggcaatttatctttaatgaactataatgtatagctgaagttggttgcagtttgaaacaatgcgacatttaaa

SEQ ID NO: 71936 - DNA, 3564 bp, Zea Mays
cttctcctcgcggtctccctcgccgccacgcctgcatccgccactctccgcgctcgcacacgccgcctcctcctccccgtcaccccttcgccgtggtggctcccgtcgtcccacgcctccctcgtctgcaagcgctgacgcctcctcctctccaaccctaccttcgtccgccgcttccatgtcctccacagggcgcctcacctcctcagcttcttcgccgaccacaacaccggcgctccccctccctccctccggtcgtcgtcacgctgcgtcttggcccaaccgttcaggaatttctgtaaggtggactgttatccagagcacgtacttcatttgtacagccttatacaagtacagattcgaattgcatgatgaaatgtgtattttcaaattcatctttaagtgaactcagctaattatatgtgcactcatatacttatttgttttggattataccaataatttatgaggagttgcacccatttatttcctagtttttaatagtgctgcacacttcttctttaggtaagtttataaataaagcttcattttcatgcaatttatgattttatgagattttcccatacacttgcacgttcccatgaaagattcctctcacaaaaaaaacttaaatttcatttaatgtgtaactctctaactcctttcttacatccattgagttatattgcaggttgctagatctattacattttcagacgacgacgacactagaaaaaacaattcaaagacgaatgttgaagcgtcacatgaggtataatttataaccttaacagaacaagcttatattcagttatacttaactgttaaaataaacctcatcgtatggtacaaatgttttaccacccaacactcccgaaagttcaagaacattagaatcactagcgaaaaggttcttcaaacttttcttttttcttttaactttgaacatctgttttatcatgacaaatattgtgtgtttaatacattcctcatcaaacaaatttggtgtcatatgctcaaaccaaacccttcagcagtccacaaccctagttctgcaaatccacctacaagacacgaataaggtatttcctttagcactttctacaatttatcaatacgaaattgacatacaaaatataatttagcatgcctgctccattttctttcttggtatctaaaatagaaattttatgaacaatttgacctttatgagttctactaaaacttgaaatttatataaactaattgtactccagttatctcgttgccgtcttttcgtaataggtttcttaaacgtatatgttcacctatttcaagagtaatttttttaccaaacatgtatacatacataggagtatatgtgaatagtgtggtatacaatacatcgacactcccactattttaattatggcccattaattcatgcatgcattcatttattcccttgctgcattttttctatatatttgccttcatctaattttgactgttcatttgatcaaacaacaatgtgtgttgaactaaaatagaggcattagtagaccaggatgaaaaaatagcgttaatacatgttaactaaaagtttaagactccatcctggtccgattctatagtggtacacttttttcttgactaattgcttcgtgctttcagtctttttagtttaaactttcagggatgtgtccactgagattgttgctgctcaagtccagcagactctgcgactattatagcttgccgatatccgaagggatcagaccggacagacctgagatctggttgtgtgcgagattcagcacgttgagggacaccaggctgtcgagtttaggcggcattgttccaggtttactttgttcagttcaatttgtctagattttacatattcatgaatagccctttattattggtgcaactaatattcagtcgctaaaatatcaatggcctaccaaatttcgcaaaaaaggatgagcactacacgaaccattcctgtactttgtaagccttccctcctaaaagcttcagaatcttaacatgttacagttagttcttagaagattttatgtgcatcataattctaaaactttagccagtttacacctgttatttagtctactccttgaaaaaagtttttccctttgatctaaacatgaatgcttccttttactccaacatcacagcaaaaaaaaatcaaaagcattgcacttcttactactgatacccctatgtcactactaccatacaggttagtgcacgatccttacctttatgttctacatgtctttgggtttctctttttttcaagtgcgttctattattgtttatatgtccaccttcacactgattagctgttccttgttcctacacagttattatctgttatgtacatttttatacctttccaaattagcttattatctttaaaaaattgtattttcttggctactttacatttgaatgaccaatggcaacatcttcaaacaaacatagctaacttagaggaaagaaaacataatctttaaattgctcataagagagaatgtcatttttcagaaaaaaagaaaaacagtattgatgctttagaaaatcttaaactgatgcatgttaatattatcatatcaatgccaacaacatatgtttaagctggtttcatccttcctagcagctctacttgcttcatctcgctcttcactgctattttttaaattggaaggaaaataagagtacgatagaagaacttgaagcgcattcactggtctcttatttaaagtccataaagcaaagttccaaaaaaacaaaaagaaacattgagttgccttcacccggcttctcttgagaaaatacaaggcgttaagaaattctttagaaaggcatattattactacatatagagctaggagtagatcttcatccgaacccctccaacgacgactaggtcggcgttttctctccctgctgtttcagatgtaccaaacatgctatctgagcaccgcactgatacaacctttgatagtctgcgttttctctccctgctgtttcaggtttgttacatttcaacctgtggggtttctttcagacaattgcatttcatctagcattcacatgggaagctctcaaatctgccagcttaaaaactagatgtaccaaacatgctatctgagcaccgcactgatacaacctttgatcagtatttagtactacttgctcttccatattaatactactggtactactatttcattgcacgtttacatgacatggaacagagactgaatttagtcgagtgggttcacctgcagttccggtatgcaaactacacgaatgatgcctacaacaagagtgggaacgaatccttgtggctgcagctgataaaccagagagcatagacttaacctttgtgctcttctcgacaggcttctttgctgttagactttaaccaattcatctcatgtcccaagttcaattttatgtaatgaggattgcatggtattttttggcaatttatctttaatgaactataatgtatagctgaagttggttgcagtttgaaacaatgcgacatttaaa

SEQ ID NO: 71937 - DNA, 3417 bp, Zea Mays
cttctcctcgcggtctccctcgccgccacgcctgcatccgccactctccgcgctcgcacacgccgcctcctcctccccgtcaccccttcgccgtggtggctcccgtcgtcccacgcctccctcgtctgcaagcgctgacgcctcctcctctccaaccctaccttcgtccgccgcttccatgtcctccacagggcgcctcacctcctcagcttcttcgccgaccacaacaccggcgctccccctccctccctccggtcgtcgtcacgctgcgtcttggcccaaccgttcaggaatttctgtaaggtggactgttatccagagcacgtacttcatttgtacagccttatacaagtacagattcgaattgcatgatgaaatgtgtattttcaaattcatctttaagtgaactcagctaattatatgtgcactcatatacttatttgttttggattataccaataatttatgaggagttgcacccatttatttcctagtttttaatagtgctgcacacttcttctttaggtaagtttataaataaagcttcattttcatgcaatttatgattttatgagattttcccatacacttgcacgttcccatgaaagattcctctcacaaaaaaaacttaaatttcatttaatgtgtaactctctaactcctttcttacatccattgagttatattgcaggttgctagatctattacattttcagacgacgacgacactagaaaaaacaattcaaagacgaatgttgaagcgtcacatgaggtataatttataaccttaacagaacaagcttatattcagttatacttaactgttaaaataaacctcatcgtatggtacaaatgttttaccacccaacactcccgaaagttcaagaacattagaatcactagcgaaaaggttcttcaaacttttcttttttcttttaactttgaacatctgttttatcatgacaaatattgtgtgtttaatacattcctcatcaaacaaatttggtgtcatatgctcaaaccaaacccttcagcagtccacaaccctagttctgcaaatccacctacaagacacgaataaggtatttcctttagcactttctacaatttatcaatacgaaattgacatacaaaatataatttagcatgcctgctccattttctttcttggtatctaaaatagaaattttatgaacaatttgacctttatgagttctactaaaacttgaaatttatataaactaattgtactccagttatctcgttgccgtcttttcgtaataggtttcttaaacgtatatgttcacctatttcaagagtaatttttttaccaaacatgtatacatacataggagtatatgtgaatagtgtggtatacaatacatcgacactcccactattttaattatggcccattaattcatgcatgcattcatttattcccttgctgcattttttctatatatttgccttcatctaattttgactgttcatttgatcaaacaacaatgtgtgttgaactaaaatagaggcattagtagaccaggatgaaaaaatagcgttaatacatgttaactaaaagtttaagactccatcctggtccgattctatagtggtacacttttttcttgactaattgcttcgtgctttcagtctttttagtttaaactttcagggatgtgtccactgagattgttgctgctcaagtccagcagactctgcgactattatagcttgccgatatccgaagggatcagaccggacagcacgttgagggacaccaggctgtcgagtttaggcggcattgttccaggtttactttgttcagttcaatttgtctagattttacatattcatgaatagccctttattattggtgcaactaatattcagtcgctaaaatatcaatggcctaccaaatttcgcaaaaaaggatgagcactacacgaaccattcctgtactttgtaagccttccctcctaaaagcttcagaatcttaacatgttacagttagttcttagaagattttatgtgcatcataattctaaaactttagccagtttacacctgttatttagtctactccttgaaaaaagtttttccctttgatctaaacatgaatgcttccttttactccaacatcacagcaaaaaaaaatcaaaagcattgcacttcttactactgatacccctatgtcactactaccatacaggttagtgcacgatccttacctttatgttctacatgtctttgggtttctctttttttcaagtgcgttctattattgtttatatgtccaccttcacactgattagctgttccttgttcctacacagttattatctgttatgtacatttttatacctttccaaattagcttattatctttaaaaaattgtattttcttggctactttacatttgaatgaccaatggcaacatcttcaaacaaacatagctaacttagaggaaagaaaacataatctttaaattgctcataagagagaatgtcatttttcagaaaaaaagaaaaacagtattgatgctttagaaaatcttaaactgatgcatgttaatattatcatatcaatgccaacaacatatgtttaagctggtttcatccttcctagcagctctacttgcttcatctcgctcttcactgctattttttaaattggaaggaaaataagagtacgatagaagaacttgaagcgcattcactggtctcttatttaaagtccataaagcaaagttccaaaaaaacaaaaagaaacattgagttgccttcacccggcttctcttgagaaaatacaaggtaccagtaggcaactcagaagagacaacaactgtactttctcaggcgttaagaaattctttagaaaggcatattattactacatatagagctaggagtagatcttcatccgaacccctccaacgacgactaggtcggcgttttctctccctgctgtttcagcttaaaaactagatgtaccaaacatgctatctgagcaccgcactgatacaacctttgatcagtatttagtactacttgctcttccatattaatactactggtactactatttcattgcacgtttacatgacatggaacagagactgaatttagtcgagtgggttcacctgcagttccggtatgcaaactacacgaatgatgcctacaacaagagtgggaacgaatccttgtggctgcagctgataaaccagagagcatagacttaacctttgtgctcttctcgacaggcttctttgctgttagactttaaccaattcatctcatgtcccaagttcaattttatgtaatgaggattgcatggtattttttggcaatttatctttaatgaactataatgtatagctgaagttggttgcagtttgaaacaatgcgacatttaaa

SEQ ID NO: 71938 - DNA, 2946 bp, Zea Mays
cttctcctcgcggtctccctcgccgccacgcctgcatccgccactctccgcgctcgcacacgccgcctcctcctccccgtcaccccttcgccgtggtggctcccgtcgtcccacgcctccctcgtctgcaagcgctgacgcctcctcctctccaaccctaccttcgtccgccgcttccatgtcctccacagggcgcctcacctcctcagcttcttcgccgaccacaacaccggcgctccccctccctccctccggtcgtcgtcacgctgcgtcttggcccaaccgttcaggaatttctgtaaggtggactgttatccagagcacgtacttcatttgtacagccttatacaagtacagattcgaattgcatgatgaaatgtgtattttcaaattcatctttaagtgaactcagctaattatatgtgcactcatatacttatttgttttggattataccaataatttatgaggagttgcacccatttatttcctagtttttaatagtgctgcacacttcttctttaggtaagtttataaataaagcttcattttcatgcaatttatgattttatgagattttcccatacacttgcacgttcccatgaaagattcctctcacaaaaaaaacttaaatttcatttaatgtgtaactctctaactcctttcttacatccattgagttatattgcaggttgctagatctattacattttcagacgacgacgacactagtagaaaaaacaattcaaagacgaatgttgaagcgtcacatgaggtataatttataaccttaacagaacaagcttatattcagttatacttaactgttaaaataaacctcatcgtatggtacaaatgttttaccacccaacactcccgaaagttcaagaacattagaatcactagcgaaaaggttcttcaaacttttcttttttcttttaactttgaacatctgttttatcatgacaaatattgtgtgtttaatacattcctcatcaaacaaatttggtgtcatatgctcaaaccaaacccttcagcagtccacaaccctagttctgcaaatccacctacaagacacgaataaggtatttcctttagcactttctacaatttatcaatacgaaattgacatacaaaatataatttagcatgcctgctccattttctttcttggtatctaaaatagaaattttatgaacaatttgacctttatgagttctactaaaacttgaaatttatataaactaattgtactccagttatctcgttgccgtcttttcgtaataggtttcttaaacgtatatgttcacctatttcaagagtaatttttttaccaaacatgtatacatacataggagtatatgtgaatagtgtggtatacaatacatcgacactcccactattttaattatggcccattaattcatgcatgcattcatttattcccttgctgcattttttctatatatttgccttcatctaattttgactgttcatttgatcaaacaacaatgtgtgttgaactaaaatagaggcattagtagaccaggatgaaaaaatagcgttaatacatgttaactaaaagtttaagactccatcctggtccgattctatagtggtacacttttttcttgactaattgcttcgtgctttcagtctttttagtttaaactttcagggatgtgtccactgagattgttgctgctcaagtccagcagactctgcgactattatagcttgccgatatccgaagggatcagaccggacagcaaaaaaaaatcaaaagcattgcacttcttactactgatacccctatgtcactactaccatacagctctacttgcttcatctcgctcttcactgctattttttaaattggaaggaaaataagagtacgatagaagaacttgaagcgcattcactggtctcttatttaaagtccataaagcaaagttccaaaaaaacaaaaagaaacattgagttgccttcacccggcttctcttgagaaaatacaaggtaaacatatttggcaattgtaatatatgttgttattttgctctttagttgcttcaaattgtttatgggtaccagtaggcaactcagaagagacaacaactgtactttctcaggcgttaagaaattctttagaaaggcatattattactacatatagagctaggagtagatcttcatccgaacccctccaacgacgactaggtcggcgttttctctccctgctgtttcaggtttgttacatttcaacctgtgggctttctttcagacaattgcatttcatctagcattcacatgggaagctctgaaatctgccagcttaaaaactagatgtaccaaacatgctatctgagcaccgcactgatacaacctttgatagtctgcgttttctctccctgctgtttcaggtttgttacatttcaacctgtggggtttctttcagacaattgcatttcatctagcattcacatgggaagctctcaaatctgccagcttaaaaactagatgtaccaaacatgctatctgagcaccgcactgatacaacctttgatcagtatttagtactacttgctcttccatattaatactactggtactactatttcattgcacgtttacatgacatggaacagagactgaatttagtcgagtgggttcacctgcagttccggtatgcaaactacacgaatgatgcctacaacaagagtgggaacgaatccttgtggctgcagctgataaaccagagagcatagacttaacctttgtgctcttctcgacaggcttctttgctgttagactttaaccaattcatctcatgtcccaagttcaattttatgtaatgaggattgcatggtattttttggcaatttatctttaatgaactataatgtatagctgaagttggttgcagtttgaaacaatgcgacatttaaa

SEQ ID NO: 71939 - DNA, 3823 bp, Zea Mays
tctcctcgcggtctccctcgccgccacgcctgcatccgccactctccgcgctcgcacacgccgcctcctcctccccgtcaccccttcgccgtggtggctcccgtcgtcccacgcctccctcgtctgcaagcgctgacgcctcctcctctccaaccctaccttcgtccgccgcttccatgtcctccacagggcgcctcacctcctcagcttcttcgccgaccacaacaccggcgctccccctccctccctccggtcgtcgtcacgctgcgtcttggcccaaccgttcaggtgctcggtgcttaactctcctattgcacacccatgtttaacttttcttgaattttcttaggaattgaggctgtagggtatatatgaggggttaattcagccgaactgttcagtaacgtggtaactgttcttcagggtgcgagtttgttgtactataaaggtttggtaacctgaataaaacaaatgaacttctgttctagtttcactatcaccaggttgcgggtttgaaggccaaaaccttcagcactggtcctccaaaaccttcagcgctggtcctgcctatgctagtttcatttgcatggataagttatgaatgaagaaaacatacattttaatatctaggcgaccatttcagaagacgtgtagttagaaatcagtaactaagaacagatcttaaccttatacattcttggtctttctttttgtcctgtatttttttattgtttgggtgtaacaccattattacatagcttggttgatgcatacactactacatggtatttatatcgtcctgacgattgttacatcaaccacattacacattatatatagcagtatagaataaatgttgtacatgtctaataatgcacactaataattgtaaatttgcaacccacttatccagctgattgatattgtgatcagttcacgttgcaagagtttctataaggtggtctgttatccacactacaatctacaaacttcatcagtacatcctcatacaagtgcagatcaaattgcatggtgaaatgtgtacttacaaattcgtttgtaagtgaacttagctaattatatggatactcacatagttttttggataccgatcataccaataatttacgaggaggtgcacccattcagcttcccagtatctaattgtactatacactccttccataggtaagtttataaataaagcttcgttttccatacaatatgattatgctcctttttatgtgaactgcaatattggtcactctatatcagtaaagattgagtgttgcacatgtctaacaatgtgcagtgactgtaaatttgcatcccgcttatccagctgatcaacattgtgattggtttacattgcaggaatttctgtaaggtggactgttatccagagcacgtacttcatttgtacagccttatacaagtacagattcgaattgcatgatgaaatgtgtattttcaaattcatctttaagtgaactcagctaattatatgtgcactcatatacttatttgttttggattataccaataatttatgaggagttgcacccatttatttcctagtttttaatagtgctgcacacttcttctttaggtaagtttataaataaagcttcattttcatgcaatttatgattttatgagattttcccatacacttgcacgttcccatgaaagattcctctcacaaaaaaaacttaaatttcatttaatgtgtaactctctaactcctttcttacatccattgagttatattgcaggttgctagatctattacattttcagacgacgacgacactaggtaagtatatttccattaacattctattcaactcactattatatgcttctattatatactcctatttaataacatttattttttgttaataaaccagtagaaaaaacaattcaaagacgaatgttgaagcgtcacatgaggtataatttataaccttaacagaacaagcttatattcagttatacttaactgttaaaataaacctcatcgtatggtacaaatgttttaccacccaacactcccgaaagttcaagaacattagaatcactagcgaaaaggttcttcaaacttttcttttttcttttaactttgaacatctgttttatcatgacaaatattgtgtgtttaatacattcctcatcaaacaaatttggtgtcatatgctcaaaccaaacccttcagcagtccacaaccctagttctgcaaatccacctacaagacacgaataagggatgtgtccactgagattgttgctgctcaagtccagcagactctgcgactattatagcttgccgatatccgaagggatcagaccggacagcacgttgagggacaccaggctgtcgagtttaggcggcattgttccaggtttactttgttcagttcaatttgtctagattttacatattcatgaatagccctttattattggtgcaactaatattcagtcgctaaaatatcaatggcctaccaaatttcgcaaaaaaggatgagcactacacgaaccattcctgtactttgtaagccttccctcctaaaagcttcagaatcttaacatgttacagttagttcttagaagattttatgtgcatcataattctaaaactttagccagtttacacctgttatttagtctactccttgaaaaaagtttttccctttgatctaaacatgaatgcttccttttactccaacatcacagcaaaaaaaaatcaaaagcattgcacttcttactactgatacccctatgtcactactaccatacaggttagtgcacgatccttacctttatgttctacatgtctttgggtttctctttttttcaagtgcgttctattattgtttatatgtccaccttcacactgattagctgttccttgttcctacacagttattatctgttatgtacatttttatacctttccaaattagcttattatctttaaaaaattgtattttcttggctactttacatttgaatgaccaatggcaacatcttcaaacaaacatagctaacttagaggaaagaaaacataatctttaaattgctcataagagagaatgtcatttttcagaaaaaaagaaaaacagtattgatgctttagaaaatcttaaactgatgcatgttaatattatcatatcaatgccaacaacatatgtttaagctggtttcatccttcctagcagctctacttgcttcatctcgctcttcactgctattttttaaattggaaggaaaataagagtacgatagaagaacttgaagcgcattcactggtctcttatttaaagtccataaagcaaagttccaaaaaaacaaaaagaaacattgagttgccttcacccggcttctcttgagaaaatacaaggcgttaagaaattctttagaaaggcatattattactacatatagagctaggagtagatcttcatccgaacccctccaacgacgactaggtcggcgttttctctccctgctgtttcagagactgaatttagtcgagtgggttcacctgcagttccggtatgcaaactacacgaatgatgcctacaacaagagtgggaacgaatccttgtggctgcagctgataaaccagagagcatagacttaacctttgtgctcttctcgacaggcttctttgctgttagactttaaccaattcatctcatgtcccaagttcaattttatgtaatgaggattgcatggtattttttggcaatttatctttaatgaactataatgtatagctgaagttggttgcagtttgaaacaatgcgacatttaaa

SEQ ID NO: 71940 - DNA, 3577 bp, Zea Mays
ctcgccgccacgcctgcatccgccactctccgcgctcgcacacgccgcctcctcctccccgtcaccccttcgccgtggtggctcccgtcgtcccacgcctccctcgtctgcaagcgctgacgcctcctcctctccaaccctaccttcgtccgccgcttccatgtcctccacagggcgcctcacctcctcagcttcttcgccgaccacaacaccggcgctccccctccctccctccggtcgtcgtcacgctgcgtcttggcccaaccgttcaggtgctcggtgcttaactctcctattgcacacccatgtttaacttttcttgaattttcttaggaattgaggctgtagggtatatatgaggggttaattcagccgaactgttcagtaacgtggtaactgttcttcagggtgcgagtttgttgtactataaaggtttggtaacctgaataaaacaaatgaacttctgttctagtttcactatcaccaggttgcgggtttgaaggccaaaaccttcagcactggtcctccaaaaccttcagcgctggtcctgcctatgctagtttcatttgcatggataagttatgaatgaagaaaacatacattttaatatctaggcgaccatttcagaagacgtgtagttagaaatcagtaactaagaacagatcttaaccttatacattcttggtctttctttttgtcctgtatttttttattgtttgggtgtaacaccattattacatagcttggttgatgcatacactactacatggtatttatatcgtcctgacgattgttacatcaaccacattacacattatatatagcagtatagaataaatgttgtacatgtctaataatgcacactaataattgtaaatttgcaacccacttatccagctgattgatattgtgatcagttcacgttgcaagagtttctataaggtggtctgttatccacactacaatctacaaacttcatcagtacatcctcatacaagtgcagatcaaattgcatggtgaaatgtgtacttacaaattcgtttgtaagtgaacttagctaattatatggatactcacatagttttttggataccgatcataccaataatttacgaggaggtgcacccattcagcttcccagtatctaattgtactatacactccttccataggaatttctgtaaggtggactgttatccagagcacgtacttcatttgtacagccttatacaagtacagattcgaattgcatgatgaaatgtgtattttcaaattcatctttaagtgaactcagctaattatatgtgcactcatatacttatttgttttggattataccaataatttatgaggagttgcacccatttatttcctagtttttaatagtgctgcacacttcttctttaggtaagtttataaataaagcttcattttcatgcaatttatgattttatgagattttcccatacacttgcacgttcccatgaaagattcctctcacaaaaaaaacttaaatttcatttaatgtgtaactctctaactcctttcttacatccattgagttatattgcaggttgctagatctattacattttcagacgacgacgacactagaaaaaacaattcaaagacgaatgttgaagcgtcacatgaggtataatttataaccttaacagaacaagcttatattcagttatacttaactgttaaaataaacctcatcgtatggtacaaatgttttaccacccaacactcccgaaagttcaagaacattagaatcactagcgaaaaggttcttcaaacttttcttttttcttttaactttgaacatctgttttatcatgacaaatattgtgtgtttaatacattcctcatcaaacaaatttggtgtcatatgctcaaaccaaacccttcagcagtccacaaccctagttctgcaaatccacctacaagacacgaataagggatgtgtccactgagattgttgctgctcaagtccagcagactctgcgactattatagcttgccgatatccgaagggatcagaccggacagcacgttgagggacaccaggctgtcgagtttaggcggcattgttccaggtttactttgttcagttcaatttgtctagattttacatattcatgaatagccctttattattggtgcaactaatattcagtcgctaaaatatcaatggcctaccaaatttcgcaaaaaaggatgagcactacacgaaccattcctgtactttgtaagccttccctcctaaaagcttcagaatcttaacatgttacagttagttcttagaagattttatgtgcatcataattctaaaactttagccagtttacacctgttatttagtctactccttgaaaaaagtttttccctttgatctaaacatgaatgcttccttttactccaacatcacagcaaaaaaaaatcaaaagcattgcacttcttactactgatacccctatgtcactactaccatacaggttagtgcacgatccttacctttatgttctacatgtctttgggtttctctttttttcaagtgcgttctattattgtttatatgtccaccttcacactgattagctgttccttgttcctacacagttattatctgttatgtacatttttatacctttccaaattagcttattatctttaaaaaattgtattttcttggctactttacatttgaatgaccaatggcaacatcttcaaacaaacatagctaacttagaggaaagaaaacataatctttaaattgctcataagagagaatgtcatttttcagaaaaaaagaaaaacagtattgatgctttagaaaatcttaaactgatgcatgttaatattatcatatcaatgccaacaacatatgtttaagctggtttcatccttcctagcagctctacttgcttcatctcgctcttcactgctattttttaaattggaaggaaaataagagtacgatagaagaacttgaagcgcattcactggtctcttatttaaagtccataaagcaaagttccaaaaaaacaaaaagaaacattgagttgccttcacccggcttctcttgagaaaatacaaggcgttaagaaattctttagaaaggcatattattactacatatagagctaggagtagatcttcatccgaacccctccaacgacgactaggtcggcgttttctctccctgctgtttcagcttaaaaactagatgtaccaaacatgctatctgagcaccgcactgatacaacctttgatagtctgcgttttctctccctgctgtttcagttccggtatgcaaactacacgaatgatgcctacaacaagagtgggaacgaatccttgtggctgcagctgataaaccagagagcatagacttaacctttgtgctcttctcgacaggcttctttgctgttagactttaaccaattcatctcatgtcccaagttcaattttatgtaatgaggattgcatggtattttttggcaatttatctttaatgaactataatgtatagctgaagttggttgcagtttgaaacaatgcgacatttaaa

SEQ ID NO: 71941 - DNA, 2351 bp, Zea Mays
cctgcatccgccactctccgcgctcgcacacgccgcctcctcctccccgtcaccccttcgccgtggtggctcccgtcgtcccacgcctccctcgtctgcaagcgctgacgcctcctcctctccaaccctaccttcgtccgccgcttccatgtcctccacagggcgcctcacctcctcagcttcttcgccgaccacaacaccggcgctccccctccctccctccggtcgtcgtcacgctgcgtcttggcccaaccgttcaggttgctagatctattacattttcagacgacgacgacactagtagaaaaaacaattcaaagacgaatgttgaagcgtcacatgaggtataatttataaccttaacagaacaagcttatattcagttatacttaactgttaaaataaacctcatcgtatggtacaaatgttttaccacccaacactcccgaaagttcaagaacattagaatcactagcgaaaaggttcttcaaacttttcttttttcttttaactttgaacatctgttttatcatgacaaatattgtgtgtttaatacattcctcatcaaacaaatttggtgtcatatgctcaaaccaaacccttcagcagtccacaaccctagttctgcaaatccacctacaagacacgaataagggatgtgtccactgagattgttgctgctcaagtccagcagactctgcgactattatagcttgccgatatccgaagggatcagaccggacagcacgttgagggacaccaggctgtcgagtttaggcggcattgttccaggtttactttgttcagttcaatttgtctagattttacatattcatgaatagccctttattattggtgcaactaatattcagtcgctaaaatatcaatggcctaccaaatttcgcaaaaaaggatgagcactacacgaaccattcctgtactttgtaagccttccctcctaaaagcttcagaatcttaacatgttacagttagttcttagaagattttatgtgcatcataattctaaaactttagccagtttacacctgttatttagtctactccttgaaaaaagtttttccctttgatctaaacatgaatgcttccttttactccaacatcacagcaaaaaaaaatcaaaagcattgcacttcttactactgatacccctatgtcactactaccatacaggttagtgcacgatccttacctttatgttctacatgtctttgggtttctctttttttcaagtgcgttctattattgtttatatgtccaccttcacactgattagctgttccttgttcctacacagttattatctgttatgtacatttttatacctttccaaattagcttattatctttaaaaaattgtattttcttggctactttacatttgaatgaccaatggcaacatcttcaaacaaacatagctaacttagaggaaagaaaacataatctttaaattgctcataagagagaatgtcatttttcagaaaaaaagaaaaacagtattgatgctttagaaaatcttaaactgatgcatgttaatattatcatatcaatgccaacaacatatgtttaagctggtttcatccttcctagcagctctacttgcttcatctcgctcttcactgctattttttaaattggaaggaaaataagagtacgatagaagaacttgaagcgcattcactggtctcttatttaaagtccataaagcaaagttccaaaaaaacaaaaagaaacattgagttgccttcacccggcttctcttgagaaaatacaaggcgttaagaaattctttagaaaggcatattattactacatatagagctaggagtagatcttcatccgaacccctccaacgacgactaggtcggcgttttctctccctgctgtttcagcttaaaaactagatgtaccaaacatgctatctgagcaccgcactgatacaacctttgatcagtatttagtactacttgctcttccatattaatactactggtactactatttcattgcacgtttacatgacatggaacagagactgaatttagtcgagtgggttcacctgcagttccggtatgcaaactacacgaatgatgcctacaacaagagtgggaacgaatccttgtggctgcagctgataaaccagagagcatagacttaacctttgtgctcttctcgacaggcttctttgctgttagactttaaccaattcatctcatgtcccaagttcaattttatgtaatgaggattgcatggtattttttggcaatttatctttaatgaactataatgtatagctgaagttggttgcagtttgaaacaatgcgacatttaaa

SEQ ID NO: 71942 - DNA, 3403 bp, Zea Mays
cctgcatccgccactctccgcgctcgcacacgccgcctcctcctccccgtcaccccttcgccgtggtggctcccgtcgtcccacgcctccctcgtctgcaagcgctgacgcctcctcctctccaaccctaccttcgtccgccgcttccatgtcctccacagggcgcctcacctcctcagcttcttcgccgaccacaacaccggcgctccccctccctccctccggtcgtcgtcacgctgcgtcttggcccaaccgttcaggtgctcggtgcttaactctcctattgcacacccatgtttaacttttcttgaattttcttaggaattgaggctgtagggtatatatgaggggttaattcagccgaactgttcagtaacgtggtaactgttcttcagggtgcgagtttgttgtactataaaggtttggtaacctgaataaaacaaatgaacttctgttctagtttcactatcaccaggttgcgggtttgaaggccaaaaccttcagcactggtcctccaaaaccttcagcgctggtcctgcctatgctagtttcatttgcatggataagttatgaatgaagaaaacatacattttaatatctaggcgaccatttcagaagacgtgtagttagaaatcagtaactaagaacagatcttaaccttatacattcttggtctttctttttgtcctgtatttttttattgtttgggtgtaacaccattattacatagcttggttgatgcatacactactacatggtatttatatcgtcctgacgattgttacatcaaccacattacacattatatatagcagtatagaataaatgttgtacatgtctaataatgcacactaataattgtaaatttgcaacccacttatccagctgattgatattgtgatcagttcacgttgcaagagtttctataaggtggtctgttatccacactacaatctacaaacttcatcagtacatcctcatacaagtgcagatcaaattgcatggtgaaatgtgtacttacaaattcgtttgtaagtgaacttagctaattatatggatactcacatagttttttggataccgatcataccaataatttacgaggaggtgcacccattcagcttcccagtatctaattgtactatacactccttccataggtaagtttataaataaagcttcgttttccatacaatatgattatgctcctttttatgtgaactgcaatattggtcactctatatcagtaaagattgagtgttgcacatgtctaacaatgtgcagtgactgtaaatttgcatcccgcttatccagctgatcaacattgtgattggtttacattgcaggaatttctgtaaggtggactgttatccagagcacgtacttcatttgtacagccttatacaagtacagattcgaattgcatgatgaaatgtgtattttcaaattcatctttaagtgaactcagctaattatatgtgcactcatatacttatttgttttggattataccaataatttatgaggagttgcacccatttatttcctagtttttaatagtgctgcacacttcttctttaggtaagtttataaataaagcttcattttcatgcaatttatgattttatgagattttcccatacacttgcacgttcccatgaaagattcctctcacaaaaaaaacttaaatttcatttaatgtgtaactctctaactcctttcttacatccattgagttatattgcaggttgctagatctattacattttcagacgacgacgacactaggtaagtatatttccattaacattctattcaactcactattatatgcttctattatatactcctatttaataacatttattttttgttaataaaccagtagaaaaaacaattcaaagacgaatgttgaagcgtcacatgaggtataatttataaccttaacagaacaagcttatattcagttatacttaactgttaaaataaacctcatcgtatggtacaaatgttttaccacccaacactcccgaaagttcaagaacattagaatcactagcgaaaaggttcttcaaacttttcttttttcttttaactttgaacatctgttttatcatgacaaatattgtgtgtttaatacattcctcatcaaacaaatttggtgtcatatgctcaaaccaaacccttcagcagtccacaaccctagttctgcaaatccacctacaagacacgaataagtctttttagtttaaactttcagggatgtgtccactgagattgttgctgctcaagtccagcagactctgcgactattatagcttgccgatatccgaagggatcagaccggacagcaaaaaaaaatcaaaagcattgcacttcttactactgatacccctatgtcactactaccatacaggttagtgcacgatccttacctttatgttctacatgtctttgggtttctctttttttcaagtgcgttctattattgtttatatgtccaccttcacactgattagctgttccttgttcctacacagttattatctgttatgtacatttttatacctttccaaattagcttattatctttaaaaaattgtattttcttggctactttacatttgaatgaccaatggcaacatcttcaaacaaacatagctaacttagaggaaagaaaacataatctttaaattgctcataagagagaatgtcatttttcagaaaaaaagaaaaacagtattgatgctttagaaaatcttaaactgatgcatgttaatattatcatatcaatgccaacaacatatgtttaagctggtttcatccttcctagcagctctacttgcttcatctcgctcttcactgctattttttaaattggaaggaaaataagagtacgatagaagaacttgaagcgcattcactggtctcttatttaaagtccataaagcaaagttccaaaaaaacaaaaagaaacattgagttgccttcacccggcttctcttgagaaaatacaaggcgttaagaaattctttagaaaggcatattattactacatatagagctaggagtagatcttcatccgaacccctccaacgacgactaggtcggcgttttctctccctgctgtttcagttccggtatgcaaactacacgaatgatgcctacaacaagagtgggaacgaatccttgtggctgcagctgataaaccagagagcatagacttaacctttgtgctcttctcgacaggcttctttgctgttagactttaaccaattcatctcatgtcccaagttcaattttatgtaatgaggattgcatggtattttttggcaatttatctttaatgaactataatgtatagctgaagttggttgcagtttgaaacaatgcgacatttaaa

SEQ ID NO: 71943 - DNA, 3901 bp, Zea Mays
cctgcatccgccactctccgcgctcgcacacgccgcctcctcctccccgtcaccccttcgccgtggtggctcccgtcgtcccacgcctccctcgtctgcaagcgctgacgcctcctcctctccaaccctaccttcgtccgccgcttccatgtcctccacagggcgcctcacctcctcagcttcttcgccgaccacaacaccggcgctccccctccctccctccggtcgtcgtcacgctgcgtcttggcccaaccgttcaggtgctcggtgcttaactctcctattgcacacccatgtttaacttttcttgaattttcttaggaattgaggctgtagggtatatatgaggggttaattcagccgaactgttcagtaacgtggtaactgttcttcagggtgcgagtttgttgtactataaaggtttggtaacctgaataaaacaaatgaacttctgttctagtttcactatcaccaggttgcgggtttgaaggccaaaaccttcagcactggtcctccaaaaccttcagcgctggtcctgcctatgctagtttcatttgcatggataagttatgaatgaagaaaacatacattttaatatctaggcgaccatttcagaagacgtgtagttagaaatcagtaactaagaacagatcttaaccttatacattcttggtctttctttttgtcctgtatttttttattgtttgggtgtaacaccattattacatagcttggttgatgcatacactactacatggtatttatatcgtcctgacgattgttacatcaaccacattacacattatatatagcagtatagaataaatgttgtacatgtctaataatgcacactaataattgtaaatttgcaacccacttatccagctgattgatattgtgatcagttcacgttgcaagagtttctataaggtggtctgttatccacactacaatctacaaacttcatcagtacatcctcatacaagtgcagatcaaattgcatggtgaaatgtgtacttacaaattcgtttgtaagtgaacttagctaattatatggatactcacatagttttttggataccgatcataccaataatttacgaggaggtgcacccattcagcttcccagtatctaattgtactatacactccttccataggtaagtttataaataaagcttcgttttccatacaatatgattatgctcctttttatgtgaactgcaatattggtcactctatatcagtaaagattgagtgttgcacatgtctaacaatgtgcagtgactgtaaatttgcatcccgcttatccagctgatcaacattgtgattggtttacattgcaggaatttctgtaaggtggactgttatccagagcacgtacttcatttgtacagccttatacaagtacagattcgaattgcatgatgaaatgtgtattttcaaattcatctttaagtgaactcagctaattatatgtgcactcatatacttatttgttttggattataccaataatttatgaggagttgcacccatttatttcctagtttttaatagtgctgcacacttcttctttaggtaagtttataaataaagcttcattttcatgcaatttatgattttatgagattttcccatacacttgcacgttcccatgaaagattcctctcacaaaaaaaacttaaatttcatttaatgtgtaactctctaactcctttcttacatccattgagttatattgcaggttgctagatctattacattttcagacgacgacgacactagtagaaaaaacaattcaaagacgaatgttgaagcgtcacatgaggtataatttataaccttaacagaacaagcttatattcagttatacttaactgttaaaataaacctcatcgtatggtacaaatgttttaccacccaacactcccgaaagttcaagaacattagaatcactagcgaaaaggttcttcaaacttttcttttttcttttaactttgaacatctgttttatcatgacaaatattgtgtgtttaatacattcctcatcaaacaaatttggtgtcatatgctcaaaccaaacccttcagcagtccacaaccctagttctgcaaatccacctacaagacacgaataaggtatttcctttagcactttctacaatttatcaatacgaaattgacatacaaaatataatttagcatgcctgctccattttctttcttggtatctaaaatagaaattttatgaacaatttgacctttatgagttctactaaaacttgaaatttatataaactaattgtactccagttatctcgttgccgtcttttcgtaataggtttcttaaacgtatatgttcacctatttcaagagtaatttttttaccaaacatgtatacatacataggagtatatgtgaatagtgtggtatacaatacatcgacactcccactattttaattatggcccattaattcatgcatgcattcatttattcccttgctgcattttttctatatatttgccttcatctaattttgactgttcatttgatcaaacaacaatgtgtgttgaactaaaatagaggcattagtagaccaggatgaaaaaatagcgttaatacatgttaactaaaagtttaagactccatcctggtccgattctatagtggtacacttttttcttgactaattgcttcgtgctttcagtctttttagtttaaactttcagggatgtgtccactgagattgttgctgctcaagtccagcagactctgcgactattatagcttgccgatatccgaagggatcagaccggacagacctgagatctggttgtgtgcgagattcagcacgttgagggacaccaggctgtcgagtttaggcggcattgttccaggtttactttgttcagttcaatttgtctagattttacatattcatgaatagccctttattattggtgcaactaatattcagtcgctaaaatatcaatggcctaccaaatttcgcaaaaaaggatgagcactacacgaaccattcctgtactttgtaagccttccctcctaaaagcttcagaatcttaacatgttacagttagttcttagaagattttatgtgcatcataattctaaaactttagccagtttacacctgttatttagtctactccttgaaaaaagtttttccctttgatctaaacatgaatgcttccttttactccaacatcacagcaaaaaaaaatcaaaagcattgcacttcttactactgatacccctatgtcactactaccatacaggttagtgcacgatccttacctttatgttctacatgtctttgggtttctctttttttcaagaaaataagagtacgatagaagaacttgaagcgcattcactggtctcttatttaaagtccataaagcaaagttccaaaaaaacaaaaagaaacattgagttgccttcacccggcttctcttgagaaaatacaagacaattgcatttcatctagcattcacatgggaagctctgaaatctgccagcttaaaaactagatgtaccaaacatgctatctgagcaccgcactgatacaacctttgatagtctgcgttttctctccctgctgtttcagttccggtatgcaaactacacgaatgatgcctacaacaagagtgggaacgaatccttgtggctgcagctgataaaccagagagcatagacttaacctttgtgctcttctcgacaggcttctttgctgttagactttaaccaattcatctcatgtcccaagttcaattttatgtaatgaggattgcatggtattttttggcaatttatctttaatgaactataatgtatagctgaagttggttgcagtttgaaacaatgcgacatttaaa

SEQ ID NO: 71944 - DNA, 1160 bp, Zea Mays
ccactctccgcgctcgcacacgccgcctcctcctccccgtcaccccttcgccgtggtggctcccgtcgtcccacgcctccctcgtctgcaagcgctgacgcctcctcctctccaaccctaccttcgtccgccgcttccatgtcctccacagggcgcctcacctcctcagcttcttcgccgaccacaacaccggcgctccccctccctccctccggtcgtcgtcacgctgcgtcttggcccaaccgttcaggttgctagatctattacattttcagacgacgacgacactagtagaaaaaacaattcaaagacgaatgttgaagcgtcacatgagcagtccacaaccctagttctgcaaatccacctacaagacacgaataagtctttttagtttaaactttcagggatgtgtccactgagattgttgctgctcaagtccagcagactctgcgactattatagcttgccgatatccgaagggatcagaccggacagcaaaaaaaaatcaaaagcattgcacttcttactactgatacccctatgtcactactaccatacagctctacttgcttcatctcgctcttcactgctattttttaaattggaaggaaaataagagtacgatagaagaacttgaagcgcattcactggtctcttatttaaagtccataaagcaaagttccaaaaaaacaaaaagaaacattgagttgccttcacccggcttctcttgagaaaatacaaggcgttaagaaattctttagaaaggcatattattactacatatagagctaggagtagatcttcatccgaacccctccaacgacgactaggtcggcgttttctctccctgctgtttcagagactgaatttagtcgagtgggttcacctgcagttccggtatgcaaactacacgaatgatgcctacaacaagagtgggaacgaatccttgtggctgcagctgataaaccagagagcatagacttaacctttgtgctcttctcgacaggcttctttgctgttagactttaaccaattcatctcatgtcccaagttcaattttatgtaatgaggattgcatggtattttttggcaatttatctttaatgaactataatgtatagctgaagttggttgcagtttgaaacaatgcgacatttaaa

SEQ ID NO: 71945 - DNA, 2488 bp, Zea Mays
ctccgcgctcgcacacgccgcctcctcctccccgtcaccccttcgccgtggtggctcccgtcgtcccacgcctccctcgtctgcaagcgctgacgcctcctcctctccaaccctaccttcgtccgccgcttccatgtcctccacagggcgcctcacctcctcagcttcttcgccgaccacaacaccggcgctccccctccctccctccggtcgtcgtcacgctgcgtcttggcccaaccgttcaggtgctcggtgcttaactctcctattgcacacccatgtttaacttttcttgaattttcttaggaattgaggctgtagggtatatatgaggggttaattcagccgaactgttcagtaacgtggtaactgttcttcagggtgcgagtttgttgtactataaaggtttggtaacctgaataaaacaaatgaacttctgttctagtttcactatcaccaggttgcgggtttgaaggccaaaaccttcagcactggtcctccaaaaccttcagcgctggtcctgcctatgctagtttcatttgcatggataagttatgaatgaagaaaacatacattttaatatctaggcgaccatttcagaagacgtgtagttagaaatcagtaactaagaacagatcttaaccttatacattcttggtctttctttttgtcctgtatttttttattgtttgggtgtaacaccattattacatagcttggttgatgcatacactactacatggtatttatatcgtcctgacgattgttacatcaaccacattacacattatatatagcagtatagaataaatgttgtacatgtctaataatgcacactaataattgtaaatttgcaacccacttatccagctgattgatattgtgatcagttcacgttgcaagagtttctataaggtggtctgttatccacactacaatctacaaacttcatcagtacatcctcatacaagtgcagatcaaattgcatggtgaaatgtgtacttacaaattcgtttgtaagtgaacttagctaattatatggatactcacatagttttttggataccgatcataccaataatttacgaggaggtgcacccattcagcttcccagtatctaattgtactatacactccttccataggtaagtttataaataaagcttcgttttccatacaatatgattatgctcctttttatgtgaactgcaatattggtcactctatatcagtaaagattgagtgttgcacatgtctaacaatgtgcagtgactgtaaatttgcatcccgcttatccagctgatcaacattgtgattggtttacattgcaggaatttctgtaaggtggactgttatccagagcacgtacttcatttgtacagccttatacaagtacagattcgaattgcatgatgaaatgtgtattttcaaattcatctttaagtgaactcagctaattatatgtgcactcatatacttatttgttttggattataccaataatttatgaggagttgcacccatttatttcctagtttttaatagtgctgcacacttcttctttaggtaagtttataaataaagcttcattttcatgcaatttatgattttatgagattttcccatacacttgcacgttcccatgaaagattcctctcacaaaaaaaacttaaatttcatttaatgtgtaactctctaactcctttcttacatccattgagttatattgcaggttgctagatctattacattttcagacgacgacgacactagaaaaaacaattcaaagacgaatgttgaagcgtcacatgagggatgtgtccactgagattgttgctgctcaagtccagcagactctgcgactattatagcttgccgatatccgaagggatcagaccggacagcaaaaaaaaatcaaaagcattgcacttcttactactgatacccctatgtcactactaccatacaggaaaataagagtacgatagaagaacttgaagcgcattcactggtctcttatttaaagtccataaagcaaagttccaaaaaaacaaaaagaaacattgagttgccttcacccggcttctcttgagaaaatacaaggcgttaagaaattctttagaaaggcatattattactacatatagagctaggagtagatcttcatccgaacccctccaacgacgactaggtcggcgttttctctccctgctgtttcagttccggtatgcaaactacacgaatgatgcctacaacaagagtgggaacgaatccttgtggctgcagctgataaaccagagagcatagacttaacctttgtgctcttctcgacaggcttctttgctgttagactttaaccaattcatctcatgtcccaagttcaattttatgtaatgaggattgcatggtattttttggcaatttatctttaatgaactataatgtatagctgaagttggttgcagtttgaaacaatgcgacatttaaa

SEQ ID NO: 71946 - DNA, 4014 bp, Zea Mays
ctccgcgctcgcacacgccgcctcctcctccccgtcaccccttcgccgtggtggctcccgtcgtcccacgcctccctcgtctgcaagcgctgacgcctcctcctctccaaccctaccttcgtccgccgcttccatgtcctccacagggcgcctcacctcctcagcttcttcgccgaccacaacaccggcgctccccctccctccctccggtcgtcgtcacgctgcgtcttggcccaaccgttcaggtgctcggtgcttaactctcctattgcacacccatgtttaacttttcttgaattttcttaggaattgaggctgtagggtatatatgaggggttaattcagccgaactgttcagtaacgtggtaactgttcttcagggtgcgagtttgttgtactataaaggtttggtaacctgaataaaacaaatgaacttctgttctagtttcactatcaccaggttgcgggtttgaaggccaaaaccttcagcactggtcctccaaaaccttcagcgctggtcctgcctatgctagtttcatttgcatggataagttatgaatgaagaaaacatacattttaatatctaggcgaccatttcagaagacgtgtagttagaaatcagtaactaagaacagatcttaaccttatacattcttggtctttctttttgtcctgtatttttttattgtttgggtgtaacaccattattacatagcttggttgatgcatacactactacatggtatttatatcgtcctgacgattgttacatcaaccacattacacattatatatagcagtatagaataaatgttgtacatgtctaataatgcacactaataattgtaaatttgcaacccacttatccagctgattgatattgtgatcagttcacgttgcaagagtttctataaggtggtctgttatccacactacaatctacaaacttcatcagtacatcctcatacaagtgcagatcaaattgcatggtgaaatgtgtacttacaaattcgtttgtaagtgaacttagctaattatatggatactcacatagttttttggataccgatcataccaataatttacgaggaggtgcacccattcagcttcccagtatctaattgtactatacactccttccataggtaagtttataaataaagcttcgttttccatacaatatgattatgctcctttttatgtgaactgcaatattggtcactctatatcagtaaagattgagtgttgcacatgtctaacaatgtgcagtgactgtaaatttgcatcccgcttatccagctgatcaacattgtgattggtttacattgcaggaatttctgtaaggtggactgttatccagagcacgtacttcatttgtacagccttatacaagtacagattcgaattgcatgatgaaatgtgtattttcaaattcatctttaagtgaactcagctaattatatgtgcactcatatacttatttgttttggattataccaataatttatgaggagttgcacccatttatttcctagtttttaatagtgctgcacacttcttctttaggtaagtttataaataaagcttcattttcatgcaatttatgattttatgagattttcccatacacttgcacgttcccatgaaagattcctctcacaaaaaaaacttaaatttcatttaatgtgtaactctctaactcctttcttacatccattgagttatattgcaggttgctagatctattacattttcagacgacgacgacactagtagaaaaaacaattcaaagacgaatgttgaagcgtcacatgagcagtccacaaccctagttctgcaaatccacctacaagacacgaataaggtatttcctttagcactttctacaatttatcaatacgaaattgacatacaaaatataatttagcatgcctgctccattttctttcttggtatctaaaatagaaattttatgaacaatttgacctttatgagttctactaaaacttgaaatttatataaactaattgtactccagttatctcgttgccgtcttttcgtaataggtttcttaaacgtatatgttcacctatttcaagagtaatttttttaccaaacatgtatacatacataggagtatatgtgaatagtgtggtatacaatacatcgacactcccactattttaattatggcccattaattcatgcatgcattcatttattcccttgctgcattttttctatatatttgccttcatctaattttgactgttcatttgatcaaacaacaatgtgtgttgaactaaaatagaggcattagtagaccaggatgaaaaaatagcgttaatacatgttaactaaaagtttaagactccatcctggtccgattctatagtggtacacttttttcttgactaattgcttcgtgctttcagtctttttagtttaaactttcagggatgtgtccactgagattgttgctgctcaagtccagcagactctgcgactattatagcttgccgatatccgaagggatcagaccggacagcacgttgagggacaccaggctgtcgagtttaggcggcattgttccaggtttactttgttcagttcaatttgtctagattttacatattcatgaatagccctttattattggtgcaactaatattcagtcgctaaaatatcaatggcctaccaaatttcgcaaaaaaggatgagcactacacgaaccattcctgtactttgtaagccttccctcctaaaagcttcagaatcttaacatgttacagttagttcttagaagattttatgtgcatcataattctaaaactttagccagtttacacctgttatttagtctactccttgaaaaaagtttttccctttgatctaaacatgaatgcttccttttactccaacatcacagcaaaaaaaaatcaaaagcattgcacttcttactactgatacccctatgtcactactaccatacaggttagtgcacgatccttacctttatgttctacatgtctttgggtttctctttttttcaagtgcgttctattattgtttatatgtccaccttcacactgattagctgttccttgttcctacacagttattatctgttatgtacatttttatacctttccaaattagcttattatctttaaaaaattgtattttcttggctactttacatttgaatgaccaatggcaacatcttcaaacaaacatagctaacttagaggaaagaaaacataatctttaaattgctcataagagagaatgtcatttttcagaaaaaaagaaaaacagtattgatgctttagaaaatcttaaactgatgcatgttaatattatcatatcaatgccaacaacatatgtttaagctggtttcatccttcctagcagctctacttgcttcatctcgctcttcactgctattttttaaattggaaggaaaataagagtacgatagaagaacttgaagcgcattcactggtctcttatttaaagtccataaagcaaagttccaaaaaaacaaaaagaaacattgagttgccttcacccggcttctcttgagaaaatacaaggcgttaagaaattctttagaaaggcatattattactacatatagagctaggagtagatcttcatccgaacccctccaacgacgactaggtcggcgttttctctccctgctgtttcagagactgaatttagtcgagtgggttcacctgcagttccggtatgcaaactacacgaatgatgcctacaacaagagtgggaacgaatccttgtggctgcagctgataaaccagagagcatagacttaacctttgtgctcttctcgacaggcttctttgctgttagactttaaccaattcatctcatgtcccaagttcaattttatgtaatgaggattgcatggtattttttggcaatttatctttaatgaactataatgtatagctgaagttggttgcagtttgaaacaatgcgacatttaaa

SEQ ID NO: 71947 - DNA, 2595 bp, Zea Mays
ccgcgctcgcacacgccgcctcctcctccccgtcaccccttcgccgtggtggctcccgtcgtcccacgcctccctcgtctgcaagcgctgacgcctcctcctctccaaccctaccttcgtccgccgcttccatgtcctccacagggcgcctcacctcctcagcttcttcgccgaccacaacaccggcgctccccctccctccctccggtcgtcgtcacgctgcgtcttggcccaaccgttcaggaatttctgtaaggtggactgttatccagagcacgtacttcatttgtacagccttatacaagtacagattcgaattgcatgatgaaatgtgtattttcaaattcatctttaagtgaactcagctaattatatgtgcactcatatacttatttgttttggattataccaataatttatgaggagttgcacccatttatttcctagtttttaatagtgctgcacacttcttctttaggtaagtttataaataaagcttcattttcatgcaatttatgattttatgagattttcccatacacttgcacgttcccatgaaagattcctctcacaaaaaaaacttaaatttcatttaatgtgtaactctctaactcctttcttacatccattgagttatattgcaggttgctagatctattacattttcagacgacgacgacactagtagaaaaaacaattcaaagacgaatgttgaagcgtcacatgaggtataatttataaccttaacagaacaagcttatattcagttatacttaactgttaaaataaacctcatcgtatggtacaaatgttttaccacccaacactcccgaaagttcaagaacattagaatcactagcgaaaaggttcttcaaacttttcttttttcttttaactttgaacatctgttttatcatgacaaatattgtgtgtttaatacattcctcatcaaacaaatttggtgtcatatgctcaaaccaaacccttcagcagtccacaaccctagttctgcaaatccacctacaagacacgaataagggatgtgtccactgagattgttgctgctcaagtccagcagactctgcgactattatagcttgccgatatccgaagggatcagaccggacagcacgttgagggacaccaggctgtcgagtttaggcggcattgttccaggtttactttgttcagttcaatttgtctagattttacatattcatgaatagccctttattattggtgcaactaatattcagtcgctaaaatatcaatggcctaccaaatttcgcaaaaaaggatgagcactacacgaaccattcctgtactttgtaagccttccctcctaaaagcttcagaatcttaacatgttacagttagttcttagaagattttatgtgcatcataattctaaaactttagccagtttacacctgttatttagtctactccttgaaaaaagtttttccctttgatctaaacatgaatgcttccttttactccaacatcacagcaaaaaaaaatcaaaagcattgcacttcttactactgatacccctatgtcactactaccatacaggttagtgcacgatccttacctttatgttctacatgtctttgggtttctctttttttcaagtgcgttctattattgtttatatgtccaccttcacactgattagctgttccttgttcctacacagttattatctgttatgtacatttttatacctttccaaattagcttattatctttaaaaaattgtattttcttggctactttacatttgaatgaccaatggcaacatcttcaaacaaacatagctaacttagaggaaagaaaacataatctttaaattgctcataagagagaatgtcatttttcagaaaaaaagaaaaacagtattgatgctttagaaaatcttaaactgatgcatgttaatattatcatatcaatgccaacaacatatgtttaagctggtttcatccttcctagcagctctacttgcttcatctcgctcttcactgctattttttaaattggaaggaaaataagagtacgatagaagaacttgaagcgcattcactggtctcttatttaaagtccataaagcaaagttccaaaaaaacaaaaagaaacattgagttgccttcacccggcttctcttgagaaaatacaaggcgttaagaaattctttagaaaggcatattattactacatatagagctaggagtagatcttcatccgaacccctccaacgacgactaggtcggcgttttctctccctgctgtttcagagactgaatttagtcgagtgggttcacctgcagttccggtatgcaaactacacgaatgatgcctacaacaagagtgggaacgaatccttgtggctgcagctgataaaccagagagcatagacttaacctttgtgctcttctcgacaggcttctttgctgttagactttaaccaattcatctcatgtcccaagttcaattttatgtaatgaggattgcatggtattttttggcaatttatctttaatgaactataatgtatagctgaagttggttgcagtttgaaacaatgcgacatttaaa

SEQ ID NO: 71948 - DNA, 3037 bp, Zea Mays
ccccgtcaccccttcgccgtggtggctcccgtcgtcccacgcctccctcgtctgcaagcgctgacgcctcctcctctccaaccctaccttcgtccgccgcttccatgtcctccacagggcgcctcacctcctcagcttcttcgccgaccacaacaccggcgctccccctccctccctccggtcgtcgtcacgctgcgtcttggcccaaccgttcaggaatttctgtaaggtggactgttatccagagcacgtacttcatttgtacagccttatacaagttgctagatctattacattttcagacgacgacgacactaggtaagtatatttccattaacattctattcaactcactattatatgcttctattatatactcctatttaataacatttattttttgttaataaaccagtagaaaaaacaattcaaagacgaatgttgaagcgtcacatgaggtataatttataaccttaacagaacaagcttatattcagttatacttaactgttaaaataaacctcatcgtatggtacaaatgttttaccacccaacactcccgaaagttcaagaacattagaatcactagcgaaaaggttcttcaaacttttcttttttcttttaactttgaacatctgttttatcatgacaaatattgtgtgtttaatacattcctcatcaaacaaatttggtgtcatatgctcaaaccaaacccttcagcagtccacaaccctagttctgcaaatccacctacaagacacgaataaggtatttcctttagcactttctacaatttatcaatacgaaattgacatacaaaatataatttagcatgcctgctccattttctttcttggtatctaaaatagaaattttatgaacaatttgacctttatgagttctactaaaacttgaaatttatataaactaattgtactccagttatctcgttgccgtcttttcgtaataggtttcttaaacgtatatgttcacctatttcaagagtaatttttttaccaaacatgtatacatacataggagtatatgtgaatagtgtggtatacaatacatcgacactcccactattttaattatggcccattaattcatgcatgcattcatttattcccttgctgcattttttctatatatttgccttcatctaattttgactgttcatttgatcaaacaacaatgtgtgttgaactaaaatagaggcattagtagaccaggatgaaaaaatagcgttaatacatgttaactaaaagtttaagactccatcctggtccgattctatagtggtacacttttttcttgactaattgcttcgtgctttcagtctttttagtttaaactttcagggatgtgtccactgagattgttgctgctcaagtccagcagactctgcgactattatagcttgccgatatccgaagggatcagaccggacagacctgagatctggttgtgtgcgagattcagcacgttgagggacaccaggctgtcgagtttaggcggcattgttccaggtttactttgttcagttcaatttgtctagattttacatattcatgaatagccctttattattggtgcaactaatattcagtcgctaaaatatcaatggcctaccaaatttcgcaaaaaaggatgagcactacacgaaccattcctgtactttgtaagccttccctcctaaaagcttcagaatcttaacatgttacagttagttcttagaagattttatgtgcatcataattctaaaactttagccagtttacacctgttatttagtctactccttgaaaaaagtttttccctttgatctaaacatgaatgcttccttttactccaacatcacagcaaaaaaaaatcaaaagcattgcacttcttactactgatacccctatgtcactactaccatacaggttagtgcacgatccttacctttatgttctacatgtctttgggtttctctttttttcaagtgcgttctattattgtttatatgtccaccttcacactgattagctgttccttgttcctacacagttattatctgttatgtacatttttatacctttccaaattagcttattatctttaaaaaattgtattttcttggctactttacatttgaatgaccaatggcaacatcttcaaacaaacatagctaacttagaggaaagaaaacataatctttaaattgctcataagagagaatgtcatttttcagaaaaaaagaaaaacagtattgatgctttagaaaatcttaaactgatgcatgttaatattatcatatcaatgccaacaacatatgtttaagctggtttcatccttcctagcagctctacttgcttcatctcgctcttcactgctattttttaaattggaaggaaaataagagtacgatagaagaacttgaagcgcattcactggtctcttatttaaagtccataaagcaaagttccaaaaaaacaaaaagaaacattgagttgccttcacccggcttctcttgagaaaatacaaggcgttaagaaattctttagaaaggcatattattactacatatagagctaggagtagatcttcatccgaacccctccaacgacgactaggtcggcgttttctctccctgctgtttcagcttaaaaactagatgtaccaaacatgctatctgagcaccgcactgatacaacctttgatagtctgcgttttctctccctgctgtttcagagactgaatttagtcgagtgggttcacctgcagttccggtatgcaaactacacgaatgatgcctacaacaagagtgggaacgaatccttgtggctgcagctgataaaccagagagcatagacttaacctttgtgctcttctcgacaggcttctttgctgttagactttaaccaattcatctcatgtcccaagttcaattttatgtaatgaggattgcatggtattttttggcaatttatctttaatgaactataatgtatagctgaagttggttgcagtttgaaacaatgcgacatttaaa

SEQ ID NO: 71949 - DNA, 2915 bp, Zea Mays
ccccgtcaccccttcgccgtggtggctcccgtcgtcccacgcctccctcgtctgcaagcgctgacgcctcctcctctccaaccctaccttcgtccgccgcttccatgtcctccacagggcgcctcacctcctcagcttcttcgccgaccacaacaccggcgctccccctccctccctccggtcgtcgtcacgctgcgtcttggcccaaccgttcaggaatttctgtaaggtggactgttatccagagcacgtacttcatttgtacagccttatacaagttgctagatctattacattttcagacgacgacgacactaggtaagtatatttccattaacattctattcaactcactattatatgcttctattatatactcctatttaataacatttattttttgttaataaaccagtagaaaaaacaattcaaagacgaatgttgaagcgtcacatgaggtataatttataaccttaacagaacaagcttatattcagttatacttaactgttaaaataaacctcatcgtatggtacaaatgttttaccacccaacactcccgaaagttcaagaacattagaatcactagcgaaaaggttcttcaaacttttcttttttcttttaactttgaacatctgttttatcatgacaaatattgtgtgtttaatacattcctcatcaaacaaatttggtgtcatatgctcaaaccaaacccttcagcagtccacaaccctagttctgcaaatccacctacaagacacgaataaggtatttcctttagcactttctacaatttatcaatacgaaattgacatacaaaatataatttagcatgcctgctccattttctttcttggtatctaaaatagaaattttatgaacaatttgacctttatgagttctactaaaacttgaaatttatataaactaattgtactccagttatctcgttgccgtcttttcgtaataggtttcttaaacgtatatgttcacctatttcaagagtaatttttttaccaaacatgtatacatacataggagtatatgtgaatagtgtggtatacaatacatcgacactcccactattttaattatggcccattaattcatgcatgcattcatttattcccttgctgcattttttctatatatttgccttcatctaattttgactgttcatttgatcaaacaacaatgtgtgttgaactaaaatagaggcattagtagaccaggatgaaaaaatagcgttaatacatgttaactaaaagtttaagactccatcctggtccgattctatagtggtacacttttttcttgactaattgcttcgtgctttcagtctttttagtttaaactttcagggatgtgtccactgagattgttgctgctcaagtccagcagactctgcgactattatagcttgccgatatccgaagggatcagaccggacagacctgagatctggttgtgtgcgagattcagcacgttgagggacaccaggctgtcgagtttaggcggcattgttccaggtttactttgttcagttcaatttgtctagattttacatattcatgaatagccctttattattggtgcaactaatattcagtcgctaaaatatcaatggcctaccaaatttcgcaaaaaaggatgagcactacacgaaccattcctgtactttgtaagccttccctcctaaaagcttcagaatcttaacatgttacagttagttcttagaagattttatgtgcatcataattctaaaactttagccagtttacacctgttatttagtctactccttgaaaaaagtttttccctttgatctaaacatgaatgcttccttttactccaacatcacagcaaaaaaaaatcaaaagcattgcacttcttactactgatacccctatgtcactactaccatacaggttagtgcacgatccttacctttatgttctacatgtctttgggtttctctttttttcaagtgcgttctattattgtttatatgtccaccttcacactgattagctgttccttgttcctacacagttattatctgttatgtacatttttatacctttccaaattagcttattatctttaaaaaattgtattttcttggctactttacatttgaatgaccaatggcaacatcttcaaacaaacatagctaacttagaggaaagaaaacataatctttaaattgctcataagagagaatgtcatttttcagaaaaaaagaaaaacagtattgatgctttagaaaatcttaaactgatgcatgttaatattatcatatcaatgccaacaacatatgtttaagctggtttcatccttcctagcagctctacttgcttcatctcgctcttcactgctattttttaaattggaaggaaaataagagtacgatagaagaacttgaagcgcattcactggtctcttatttaaagtccataaagcaaagttccaaaaaaacaaaaagaaacattgagttgccttcacccggcttctcttgagaaaatacaaggcgttaagaaattctttagaaaggcatattattactacatatagagctaggagtagatcttcatccgaacccctccaacgacgactaggtcggcgttttctctccctgctgtttcagttccggtatgcaaactacacgaatgatgcctacaacaagagtgggaacgaatccttgtggctgcagctgataaaccagagagcatagacttaacctttgtgctcttctcgacaggcttctttgctgttagactttaaccaattcatctcatgtcccaagttcaattttatgtaatgaggattgcatggtattttttggcaatttatctttaatgaactataatgtatagctgaagttggttgcagtttgaaacaatgcgacatttaaa

SEQ ID NO: 71950 - DNA, 2417 bp, Zea Mays
ccccgtcaccccttcgccgtggtggctcccgtcgtcccacgcctccctcgtctgcaagcgctgacgcctcctcctctccaaccctaccttcgtccgccgcttccatgtcctccacagggcgcctcacctcctcagcttcttcgccgaccacaacaccggcgctccccctccctccctccggtcgtcgtcacgctgcgtcttggcccaaccgttcaggaatttctgtaaggtggactgttatccagagcacgtacttcatttgtacagccttatacaagtacagattcgaattgcatgatgaaatgtgtattttcaaattcatctttaagtgaactcagctaattatatgtgcactcatatacttatttgttttggattataccaataatttatgaggagttgcacccatttatttcctagtttttaatagtgctgcacacttcttctttaggtaagtttataaataaagcttcattttcatgcaatttatgattttatgagattttcccatacacttgcacgttcccatgaaagattcctctcacaaaaaaaacttaaatttcatttaatgtgtaactctctaactcctttcttacatccattgagttatattgcaggttgctagatctattacattttcagacgacgacgacactagtagaaaaaacaattcaaagacgaatgttgaagcgtcacatgaggtataatttataaccttaacagaacaagcttatattcagttatacttaactgttaaaataaacctcatcgtatggtacaaatgttttaccacccaacactcccgaaagttcaagaacattagaatcactagcgaaaaggttcttcaaacttttcttttttcttttaactttgaacatctgttttatcatgacaaatattgtgtgtttaatacattcctcatcaaacaaatttggtgtcatatgctcaaaccaaacccttcagcagtccacaaccctagttctgcaaatccacctacaagacacgaataagggatgtgtccactgagattgttgctgctcaagtccagcagactctgcgactattatagcttgccgatatccgaagggatcagaccggacaggtaattttgtgaattgtgatagatttagctcatagagactgctcagttttgtgaccgccatcaaaatcagacctgagatctggttgtgtgcgagattcagcacgttgagggacaccaggctgtcgagtttaggcggcattgttccaggtttactttgttcagttcaatttgtctagattttacatattcatgaatagccctttattattggtgcaactaatattcagtcgctaaaatatcaatggcctaccaaatttcgcaaaaaaggatgagcactacacgaaccattcctgtactttcaaaaaaaaatcaaaagcattgcacttcttactactgatacccctatgtcactactaccatacaggaaaataagagtacgatagaagaacttgaagcgcattcactggtctcttatttaaagtccataaagcaaagttccaaaaaaacaaaaagaaacattgagttgccttcacccggcttctcttgagaaaatacaaggcgttaagaaattctttagaaaggcatattattactacatatagagctaggagtagatcttcatccgaacccctccaacgacgactaggtcggcgttttctctccctgctgtttcaggtttgttacatttcaacctgtgggctttctttcagacaattgcatttcatctagcattcacatgggaagctctgaaatctgccagcttaaaaactagatgtaccaaacatgctatctgagcaccgcactgatacaacctttgatagtctgcgttttctctccctgctgtttcaggtttgttacatttcaacctgtggggtttctttcagacaattgcatttcatctagcattcacatgggaagctctcaaatctgccagcttaaaaactagatgtaccaaacatgctatctgagcaccgcactgatacaacctttgatcagtatttagtactacttgctcttccatattaatactactggtactactatttcattgcacgtttacatgacatggaacagagactgaatttagtcgagtgggttcacctgcagttccggtatgcaaactacacgaatgatgcctacaacaagagtgggaacgaatccttgtggctgcagctgataaaccagagagcatagacttaacctttgtgctcttctcgacaggcttctttgctgttagactttaaccaattcatctcatgtcccaagttcaattttatgtaatgaggattgcatggtattttttggcaatttatctttaatgaactataatgtatagctgaagttggttgcagtttgaaacaatgcgacatttaaa

SEQ ID NO: 71951 - DNA, 1624 bp, Zea Mays
aaacaattcaaagacgaatgttgaagcgtcacatgagggatgtgtccactgagattgttgctgctcaagtccagcagactctgcgactattatagcttgccgatatccgaagggatcagaccggacagacctgagatctggttgtgtgcgagattcagcacgttgagggacaccaggctgtcgagtttaggcggcattgttccaggtttactttgttcagttcaatttgtctagattttacatattcatgaatagccctttattattggtgcaactaatattcagtcgctaaaatatcaatggcctaccaaatttcgcaaaaaaggatgagcactacacgaaccattcctgtactttgtaagccttccctcctaaaagcttcagaatcttaacatgttacagttagttcttagaagattttatgtgcatcataattctaaaactttagccagtttacacctgttatttagtctactccttgaaaaaagtttttccctttgatctaaacatgaatgcttccttttactccaacatcacagcaaaaaaaaatcaaaagcattgcacttcttactactgatacccctatgtcactactaccatacaggttagtgcacgatccttacctttatgttctacatgtctttgggtttctctttttttcaagtgcgttctattattgtttatatgtccaccttcacactgattagctgttccttgttcctacacagttattatctgttatgtacatttttatacctttccaaattagcttattatctttaaaaaattgtattttcttggctactttacatttgaatgaccaatggcaacatcttcaaacaaacatagctaacttagaggaaagaaaacataatctttaaattgctcataagagagaatgtcatttttcagaaaaaaagaaaaacagtattgatgctttagaaaatcttaaactgatgcatgttaatattatcatatcaatgccaacaacatatgtttaagctggtttcatccttcctagcagctctacttgcttcatctcgctcttcactgctattttttaaattggaaggaaaataagagtacgatagaagaacttgaagcgcattcactggtctcttatttaaagtccataaagcaaagttccaaaaaaacaaaaagaaacattgagttgccttcacccggcttctcttgagaaaatacaaggcgttaagaaattctttagaaaggcatattattactacatatagagctaggagtagatcttcatccgaacccctccaacgacgactaggtcggcgttttctctccctgctgtttcagagactgaatttagtcgagtgggttcacctgcagttccggtatgcaaactacacgaatgatgcctacaacaagagtgggaacgaatccttgtggctgcagctgataaaccagagagcatagacttaacctttgtgctcttctcgacaggcttctttgctgttagactttaaccaattcatctcatgtcccaagttcaattttatgtaatgaggattgcatggtattttttggcaatttatctttaatgaactataatgtatagctgaagttggttgcagtttgaaacaatgcgacatttaaa

SEQ ID NO: 71952 - DNA, 1135 bp, Zea Mays
cagcacgttgagggacaccaggctgtcgagtttaggcggcattgttccagcaaaaaaaaatcaaaagcattgcacttcttactactgatacccctatgtcactactaccatacaggttagtgcacgatccttacctttatgttctacatgtctttgggtttctctttttttcaagtgcgttctattattgtttatatgtccaccttcacactgattagctgttccttgttcctacacagttattatctgttatgtacatttttatacctttccaaattagcttattatctttaaaaaattgtattttcttggctactttacatttgaatgaccaatggcaacatcttcaaacaaacatagctaacttagaggaaagaaaacataatctttaaattgctcataagagagaatgtcatttttcagaaaaaaagaaaaacagtattgatgctttagaaaatcttaaactgatgcatgttaatattatcatatcaatgccaacaacatatgtttaagctggtttcatccttcctagcagctctacttgcttcatctcgctcttcactgctattttttaaattggaaggaaaataagagtacgatagaagaacttgaagcgcattcactggtctcttatttaaagtccataaagcaaagttccaaaaaaacaaaaagaaacattgagttgccttcacccggcttctcttgagaaaatacaaggcgttaagaaattctttagaaaggcatattattactacatatagagctaggagtagatcttcatccgaacccctccaacgacgactaggtcggcgttttctctccctgctgtttcagagactgaatttagtcgagtgggttcacctgcagttccggtatgcaaactacacgaatgatgcctacaacaagagtgggaacgaatccttgtggctgcagctgataaaccagagagcatagacttaacctttgtgctcttctcgacaggcttctttgctgttagactttaaccaattcatctcatgtcccaagttcaattttatgtaatgaggattgcatggtattttttggcaatttatctttaatgaactataatgtatagctgaagttggttgcagtttgaaacaatgcgacatttaaa

SEQ ID NO: 71953 - DNA, 2943 bp, Zea Mays
cgacacagtagagcacattcgtgtcgtgtcgtgtagtgtatctctgctagtgaggagttcagcagagcccttgccaagaacatgcgattgtttgataggaattgcaaaaattaaatgccgaaggtgcatttgataagaaaccaagtgtattacgttataaacatcagggatcagaaaaacctacaattcatatctctcgcatactctcttctttcttcttctatctcagccgccgattgaccgccctacccgacggcgtagttgacaccatagccacacgacaccagctgggtcaaggggtccaagcctgcgctgcgcggccaagcttttgcccagaccatcattgctcctctcatctttagttggggaagtgggaaagtggcaatcatacggacccatcaaaagaggccccttcatctttggtggcctagctggattggatatttggacgagtgttcttcttggcttggccacccgcctactccgtcttcttcatacgagacaagccgtgcgcttcttcttggcctagcccttcgagcagttcactttgggcactaatggttgctgctgtctagtcactgaaactctactttgcggtagggcaggagaggaggccactctgactgtcactctgagcttcgcgtcacctgagtactgacggacgacatgggagaagttgaggacatgtacacccaagacgggaccgtggacatgaaagggaatcccgccgtgaagaagggcaccggcaactggcgcgcctgcccctacatcctcggtcagtgctcagtagtcatttgtgtccattgccgctctgctttgtgctcgctctgtttgtttgttgtcgactccattgacggccgctgatacttacatggttgatggttcagcgaacgagtgctgcgagaggctggcttactatggcatgagcaccaacctggtgaactacatgaagacccgacttggccaggtgaactccgttgcctccaacaacgtcaccaactggcaagggacgtgctacatcacgccgctcatcggcgccttcttcgccgacgcgtacatggggaggttctggaccatcgccatcttcatgatcatctacattttcggcctggcgctgctgacgatggcttcgtcggtgaaggggctggtgcctacgtcgtgcggcgacaaggatgtgtgccacccgacggacgcgcaggcggcggtggtgttcgtggcgctgtacctcatcgcgctgggcacgggcgggatcaagccgtgcgtgtcctccttcggcgccgaccagttcgacgagaacgacgagcgggagaagaagagcaagagctccttcttcaactggttctacttctccatcaacatcggcgcgctggtggcgtccacagtgctggtgtacgtgcagacgcacgtgggctggggctggggcttcggcatccccgccgtggtcatggccatcgccgtcggcagcttcttcgtgggcacgccgctgtacaggcaccagaagcccgggggcagcccgctgacgcgcatcgcgcaggtgctcgtcgcgtgcgcgcgcaagtggaacgtggccgtgcccgcggacaagtcgcggctgcacgagacggtggacggggagtccgtcatcgaggggagccgcaagctggagcactcggagcagctggcgtgcctcgacagggctgccgtggtgacggccgaggacggcgcggaggcgagcccgtggcgcctgtgctcggtgacgcaggtggaggagctcaagagcgtgatccggctgctgcccatctgggccagcgggatcgtgttcgcggcggtgtactcgcagatgagcaccatgttcgtgctgcagggtaacacgctggaccagagcatggggccccggttcaagatcccctcggcgacgctgtccatggtggacaccatcagcgtcatcgtctgggtccccgtgtacgaccgcgccatcgtgcccctggtgcgctcctacaccgggaggccgcgcgggttcacgcagctgcagcgcatgggcatcggcctcgtcgtctccatcttctccatggtggcggcgggcgtgctggacatcgtgcggctgcgcgccatcgcgcggcacggcctgtacggcgaggacgacatcgtgcccatctccatcttctggcagataccgcagtacttcatcatcgggtgcgcggaggtgttcaccttcgtggggcagctggagttcttctacgaccaggcgcccgacgccatgaggagcatgtgctccgcgctgtcgctcaccaccgtcgcgctcggcaactacctcagcacggtcctggtgaccatcgtcacccacatcaccaccaggcacggccgcatcgggtggatcccggagaacctcaaccgcggccacctcgactacttcttctggctgctcgccgtgctcagccttctcaacttccttgcctacctcgtcatcgccagctggtacaagtacaagaagacggccgatgattaccctggcgccaaaggggagcacggtacagagcactgatgggcgagagatggcggaaattgagtgatttctatgtgtggttagctgtctgcctgtctgtcgacttgttttgccacagtttgggtgcttaaacgttaacgtacgtactagttcaatatagtgtctcgggggcgaattggttgtttacatgtcatgtgtttatatatgcgcaatgttcgatcttagtggaataagtcaagtgctcttatgaatcaaggagtgttgatgatttgatgcgtcaagttttaactcgacgcgccataaagaagcaatatgctgcaaaacaacaatacatcatagataaattacaaataaatctgacatgtaacatgaaaactttatttaaccatacaaaacaacaaaaaataatatgacacgtgcactggtgagctaggtggcttggttgcctgggttgggttaag

SEQ ID NO: 71954 - DNA, 2686 bp, Zea Mays
ctcttctttcttcttctatctcagccgccgattgaccgccctacccgacggcgtagttgacaccatagccacacgacaccagctgggtcaaggggtccaagcctgcgctgcgcggccaagcttttgcccagaccatcattgctcctctcatctttagttggggaagtgggaaagtggcaatcatacggacccatcaaaagaggccccttcatctttggtggcctagctggattggatatttggacgagtgttcttcttggcttggccacccgcctactccgtcttcttcatacgagacaagccgtgcgcttcttcttggcctagcccttcgagcagttcactttgggcactaatggttgctgctgtctagtcactgaaactctactttgcgtctactactcatgcaagaagaatcgttcacacgctgaagaacaagaatcggtgtgtatttgcagggcaggagaggaggccactctgactgtcactctgagcttcgcgtcacctgagtactgacggacgacatgggagaagttgaggacatgtacacccaagacgggaccgtggacatgaaagggaatcccgccgtgaagaagggcaccggcaactggcgcgcctgcccctacatcctcgcgaacgagtgctgcgagaggctggcttactatggcatgagcaccaacctggtgaactacatgaagacccgacttggccaggtgaactccgttgcctccaacaacgtcaccaactggcaagggacgtgctacatcacgccgctcatcggcgccttcttcgccgacgcgtacatggggaggttctggaccatcgccatcttcatgatcatctacattttcggcctggcgctgctgacgatggcttcgtcggtgaaggggctggtgcctacgtcgtgcggcgacaaggatgtgtgccacccgacggacgcgcaggcggcggtggtgttcgtggcgctgtacctcatcgcgctgggcacgggcgggatcaagccgtgcgtgtcctccttcggcgccgaccagttcgacgagaacgacgagcgggagaagaagagcaagagctccttcttcaactggttctacttctccatcaacatcggcgcgctggtggcgtccacagtgctggtgtacgtgcagacgcacgtgggctggggctggggcttcggcatccccgccgtggtcatggccatcgccgtcggcagcttcttcgtgggcacgccgctgtacaggcaccagaagcccgggggcagcccgctgacgcgcatcgcgcaggtgctcgtcgcgtgcgcgcgcaagtggaacgtggccgtgcccgcggacaagtcgcggctgcacgagacggtggacggggagtccgtcatcgaggggagccgcaagctggagcactcggagcagctggcgtgcctcgacagggctgccgtggtgacggccgaggacggcgcggaggcgagcccgtggcgcctgtgctcggtgacgcaggtggaggagctcaagagcgtgatccggctgctgcccatctgggccagcgggatcgtgttcgcggcggtgtactcgcagatgagcaccatgttcgtgctgcagggtaacacgctggaccagagcatggggccccggttcaagatcccctcggcgacgctgtccatggtggacaccatcagcgtcatcgtctgggtccccgtgtacgaccgcgccatcgtgcccctggtgcgctcctacaccgggaggccgcgcgggttcacgcagctgcagcgcatgggcatcggcctcgtcgtctccatcttctccatggtggcggcgggcgtgctggacatcgtgcggctgcgcgccatcgcgcggcacggcctgtacggcgaggacgacatcgtgcccatctccatcttctggcagataccgcagtacttcatcatcgggtgcgcggaggtgttcaccttcgtggggcagctggagttcttctacgaccaggcgcccgacgccatgaggagcatgtgctccgcgctgtcgctcaccaccgtcgcgctcggcaactacctcagcacggtcctggtgaccatcgtcacccacatcaccaccaggcacggccgcatcgggtggatcccggagaacctcaaccgcggccacctcgactacttcttctggctgctcgccgtgctcagccttctcaacttccttgcctacctcgtcatcgccagctggtacaagtacaagaagacggccgatgattaccctggcgccaaaggggagcacggtacagagcactgatgggcgagagatggcggaaattgagtgatttctatgtgtggttagctgtctgcctgtctgtcgacttgttttgccacagtttgggtgcttaaacgttaacgtacgtactagttcaatatagtgtctcgggggcgaattggttgtttacatgtcatgtgtttatatatgcgcaatgttcgatcttagtggaataagtcaagtgctcttatgaatcaaggagtgttgatgatttgatgcgtcaagttttaactcgacgcgccataaagaagcaatatgctgcaaaacaacaatacatcatagataaattacaaataaatctgacatgtaacatgaaaactttatttaaccatacaaaacaacaaaaaataatatgacacgtgcactggtgagctaggtggcttggttgcctgggttgggttaag

SEQ ID NO: 71955 - DNA, 1804 bp, Zea Mays
ctcaaacattccgagcgtgtgcttggtcaactgggccaccgcgcacaaaacccattgcagttgtagcagggactctttccccgtgccacggacgacaatgactgccgacgcggcgctcctcgccatcatcgtcgccttcctcctcccgctacgcctcgtctccctcggcctcagcctggcgtccgggcgtcacggtactagctccagacgcgtccgccgttcctgtgccgctttggccgtcgcagccgcgctcctcgcagtcatcttcgccctcccgcgtgaccacgtccgggagtgcgccgctccgatcgcttctgtctccagtgccggggatgatgacggcggtttccgcgaggagctgcggttggaggtcgagcagcttaagcagcagctggcgcggcttgaatctctttgggatagtaaatcgaaagctgtggatgataaacttgattctttagaggaggataatggccgtgtaatgagagcaatggcactcgatgtccagtctctgatcaatgagcgggaaaatatcaagattcaggaatcattatgcagctcatattttggtaacagtatcaaggaaatggaaaatgaggttcaaattctaaaagatgggtcaagaaagatgaattctgatatatcatcagtagcaaaggacacggcagaaaaggtcgaagttttgcattcagctatcgagaaggttcaagttatagctgatgaatgggtcaagatgaactatactattaacagaatatggtcattcactaaggagacagagaaaagggtggaaggtctatattcagatttaatgaagacgaagagaaaagtgccgttctggagagactgatgatgctgtggacctgatgtttgaccactgtcattgacgacccgcttggaattgacacaccgaagctgctagcaacttaatccgcttccatccagtgtttatattttcgcgtccttagtgcttgtgagacgtcagtgcaaggttgtggttgatgagaccttgtgcgacccgacttgctaactgtttgcatgccgtcatggccccataatgggactatctctatctatagcagcttatctataattatatttaaattacactgtacaaataatacaatacagcccaaaacggtgtaaaacggtgtttttgtgaccatatggtgcaatgctgacattataatgtttgtagactgtaatttgaatatgagtaaagctcgagatagttttatgcgctaccaccactgacgatggatgtccctaggaatatgaattgttattttttcctatatataaaatacacaatagatctccgtattggagaggtaaatgggggtagtattctatattgaatagaggagaggatgccttacaatatataggcttacacatgtgacgcaccaggtaacggcagcttggtgccaatctgaccaaacctaccaaagatagaaatcctcctttctatactagtacaacatatctgtttatctaaggaacctctagttgacatagaagactatattgctattcaaagggaaatagggtcaaaccttttcctaaataattttggtggttgaaatgcccaacacaaataattggactaactagcttgctctaaatcatacattctacaggtgccaaaggttcaacacaaaccaataaaaagaacaagttaggcttcaaaagaaaggagcaaaaaggaaaccgaagtgttccatggtctggcgcaccggaatgtctggtgcaccaccggacagtgtttggtgcaccaccagacagtgtccgatgcaccagggtgaat

SEQ ID NO: 71956 - DNA, 1234 bp, Zea Mays
attaacagaagaaaagagtccaaaatagaccaaagtacaatgccaaaaaaggcagaacacgagaccaccaaactcctgcagcgcacagtactccagcctccgtctgctcatgaaaacagcaggacacacaaggacacaaggaggcaaatagcaaaagtgccaggctccacacacacctgctctacactacacacccagaataatggcagcaccaaggtccaagccctcaagatgcttggcacagacgaagagaaaagtgccgttctggagagactgatgatgctgtggacctgatgtttgaccactgtcattgacgacccgcttggaattgacacaccgaagctgctagcaacttaatccgcttccatccagtgtttatattttcgcgtccttagtgcttgtgagacgtcagtgcaaggttgtggttgatgagaccttgtgcgacccgacttgctaactgtttgcatgccgtcatggccccataatgggactatctctatctatagcagcttatctataattatatttaaattacactgtacaaataatacaatacagcccaaaacggtgtaaaacggtgtttttgtgaccatatggtgcaatgctgacattataatgtttgtagactgtaatttgaatatgagtaaagctcgagatagttttatgcgctaccaccactgacgatggatgtccctaggaatatgaattgttattttttcctatatataaaatacacaatagatctccgtattggagaggtaaatgggggtagtattctatattgaatagaggagaggatgccttacaatatataggcttacacatgtgacgcaccaggtaacggcagcttggtgccaatctgaccaaacctaccaaagatagaaatcctcctttctatactagtacaacatatctgtttatctaaggaacctctagttgacatagaagactatattgctattcaaagggaaatagggtcaaaccttttcctaaataattttggtggttgaaatgcccaacacaaataattggactaactagcttgctctaaatcatacattctacaggtgccaaaggttcaacacaaaccaataaaaagaacaagttaggcttcaaaagaaaggagcaaaaaggaaaccgaagtgttccatggtctggcgcaccggaatgtctggtgcaccaccggacagtgtttggtgcaccaccagacagtgtccgatgcaccagggtgaat

SEQ ID NO: 71957 - DNA, 1466 bp, Zea Mays
caaaaactgccttattatgatgaagccataaacaccaagcccccacgatgatgatactattagctcttcttttggatttgtgcacttgcttacataccttcctccaccactcagcaaaagaagaatcattagaaacaggagagattaacaagccccaacgaagaaagaatgcagtgccaaaactgtcgagcaaaaatgcaattgcaaaggaggtgttggatattttccggctcttgatcacataaaggacaaacctcaggataatccaaccctctcttctgcagtctatcagatgtccaacatctattactaattgccaaccaaagaaaaagtttgcatttgggtggagcccaagtctttcataatcccttccatggtttaaaagtaatcgaacccacgaagaaagccttatagcatgatttagaagagaactgtccaagcaagaatgaatccacatgtgtctatcagcctcatgtacgaagagaaaagtgccgttctggagagactgatgatgctgtggacctgatgtttgaccactgtcattgacgacccgcttggaattgacacaccgaagctgctagcaacttaatccgcttccatccagtgtttatattttcgcgtccttagtgcttgtgagacgtcagtgcaaggttgtggttgatgagaccttgtgcgacccgacttgctaactgtttgcatgccgtcatggccccataatgggactatctctatctatagcagcttatctataattatatttaaattacactgtacaaataatacaatacagcccaaaacggtgtaaaacggtgtttttgtgaccatatggtgcaatgctgacattataatgtttgtagactgtaatttgaatatgagtaaagctcgagatagttttatgcgctaccaccactgacgatggatgtccctaggaatatgaattgttattttttcctatatataaaatacacaatagatctccgtattggagaggtaaatgggggtagtattctatattgaatagaggagaggatgccttacaatatataggcttacacatgtgacgcaccaggtaacggcagcttggtgccaatctgaccaaacctaccaaagatagaaatcctcctttctatactagtacaacatatctgtttatctaaggaacctctagttgacatagaagactatattgctattcaaagggaaatagggtcaaaccttttcctaaataattttggtggttgaaatgcccaacacaaataattggactaactagcttgctctaaatcatacattctacaggtgccaaaggttcaacacaaaccaataaaaagaacaagttaggcttcaaaagaaaggagcaaaaaggaaaccgaagtgttccatggtctggcgcaccggaatgtctggtgcaccaccggacagtgtttggtgcaccaccagacagtgtccgatgcaccagggtgaat

SEQ ID NO: 71958 - DNA, 1449 bp, Zea Mays
gacgaagtcgaatgtgtcgtgttttataatgtcaaaaatctcagcgacgaggggcaacagttttctcgaagaagggaaggcagcctcttcctcgtcgccggcgacgtcaccctcagcggctatcagggatgccggtcagggtggtagataccgccacgccttcctcccagccctccccagggcaagaagcaaatactggacacccatctcctcctagctgttcactcttaagtgctggaagatcttttgctggaactcaaaatgtttcaagcctgcagaaggatgaagcatggaaagtgaatgtacgcatccatggttgtgatcttgatcagggttatctatgtggaacgatggaagcgcttaatgttccattagcagatacacctgttgtgactttctgggagggggagatagtggatgctaaaaattacacatttttcactggaaagtgggaggcatcaccagaggatgatataagacattggtccaagttcccatcatttacacctcttctgggtcagattgagacagatggtggcaagtctctggactttagcaactatccttatatatttatggatggaaagagcaatattttgtcaatgttggagtcgactgtgggttaaccatcgctggtttctactacgtctgcttttcttgtagcgatggctccatcagtggattttattatgatccaaatagcagtccatttcagaagctcgagctgaagtgtaccaatgagaaaaaatccgggttcaccttttcatcctacgagctgcagtgacaggacacagatgtcctcgacagacaactttctgttagcatatagtgtgtgtactgaactcgtactccctaatgaaaggaatgagtggtcgtttacgtaacagtttgttttctagcaagacgaagcaaactgtcactttgtaatctgcagaagcatcctgtcctttctaaaatctaccttttgtattacgtttctattccacaattgttatctgcaattggggatttctatttatgatatacacattgtgcgtggttcctgattaaatgggtcgtgaatacatgtttctgatacaaatcatggtgccaagctttactgaaggtgaaacttcatcaaggtcgctgattgctttctctcactcaagttcctggtgcaaaagctgtggagaccttcctgcagctattgtatgttttcacctgtgacagttctatatgagcaagataaacttggggcatgttcttcgcctttgccttcagcttcttgacattgcaagcggggctcgggaccggtggattatgtcttggtgatgcttccaggaacacctcagacgccctctctgaatcgccctctgtaatgtgcacgatagaacacttattaacatgcatgctccaccatagtgatgccatgctacagtttggtgtctggactgaattcagctgatgtga

SEQ ID NO: 71959 - DNA, 1413 bp, Zea Mays
gacgaagtcgaatgtgtcgtgttttataatgtcaaaaatctcagcgacgaggggcaacagttttctcgaagaagggaaggcagcctcttcctcgtcgccggcgacgtcaccctcagcggctatcagggatgccggtcagggtgggcaagaagcaaatactggacacccatctcctcctagctgttcactcttaagtgctggaagatcttttgctggaactcaaaatgtttcaagcctgcagaaggatgaagcatggaaagtgaatgtacgcatccatggttgtgatcttgatcagggttatctatgtggaacgatggaagcgcttaatgttccattagcagatacacctgttgtgactttctgggagggggagatagtggatgctaaaaattacacatttttcactggaaagtgggaggcatcaccagaggatgatataagacattggtccaagttcccatcatttacacctcttctgggtcagattgagacagatggtggcaagtctctggactttagcaactatccttatatatttatgagatggaaagagcaatattttgtcaatgttggagtcgactgtgggttaaccatcgctggtttctactacgtctgcttttcttgtagcgatggctccatcagtggattttattatgatccaaatagcagtccatttcagaagctcgagctgaagtgtaccaatgagaaaaaatccgggttcaccttttcatcctacgagctgcagtgacaggacacagatgtcctcgacagacaactttctgttagcatatagtgtgtgtactgaactcgtactccctaatgaaaggaatgagtggtcgtttacgtaacagtttgttttctagcaagacgaagcaaactgtcactttgtaatctgcagaagcatcctgtcctttctaaaatctaccttttgtattacgtttctattccacaattgttatctgcaattggggatttctatttatgatatacacattgtgcgtggttcctgattaaatgggtcgtgaatacatgtttctgatacaaatcatggtgccaagctttactgaaggtgaaacttcatcaaggtcgctgattgctttctctcactcaagttcctggtgcaaaagctgtggagaccttcctgcagctattgtatgttttcacctgtgacagttctatatgagcaagataaacttggggcatgttcttcgcctttgccttcagcttcttgacattgcaagcggggctcgggaccggtggattatgtcttggtgatgcttccaggaacacctcagacgccctctctgaatcgccctctgtaatgtgcacgatagaacacttattaacatgcatgctccaccatagtgatgccatgctacagtttggtgtctggactgaattcagctgatgtga

SEQ ID NO: 71960 - DNA, 2198 bp, Zea Mays
ccttttcctccccgtcgcggcgtcgccggctcccacggtccaccgacgactcttcttcctcacctcctcccgctccagctccagctcgtctctctcctcgcctcgcgtagggtttcgcttcccgtctcgccgccgtcagcatgggggacaactacgatgacgaaggcgagccgatcgtgaacctcgacgaacgggaaccctcccctgagcatcagccgtacgaagacctcgatgacgacctcgacggcggcggcgattggacccgcgaccgctctccgacccccgtccacggcgacgacggcggggcagggtcctcctccaagccccgaaagcgccttctcaagaagggcggcggtggaggcatgcccggcgatgacgggctggatgactttgggttggaggacgaggacgcggacccttcggctgaggcgaggaagaggaagggctcgtcgtcgctgagggacctcgcgaggggcggggcgggcagggagaagaaggctaagaaaatgcggatggaggacgacgggagggggagggacactgggatggtgagggataggcggggatcaggaggaagggactcaggcggtagggatgaccaggatgatggggagagggagatccaggagctctgggataccattgctggtggtgagtcagagcctggcgtcatgaggtcacggaggatgaccaagaaggtgttagaaccgtagatgatgataatttcattgatgacactggagttgatccagctgatcgttatggcagcgataatgagcgacattcacctggacgttatgcacaggctgaggagggtgaggaggacgatgaaatcgaacgactcttcaagggtggtaagaagaagaagaagaagaatgatcgccctcgtgcagatattggccttatagtggaacaattcattgctgagtttgaagtagcagccgaagaagatgcaaacttgaataggcaatcaaaaccagccattaacaaacttatgaagcttcctctgctcatagatgttctctccaagaagaatcttcagcaggaatttcttgaccacggagttctcactcttctaaaaaattggcttgagccattacctgatggaagcatgccaaacatgaatattcgatctgctgtactgaaattattaactgattttccaattgacttggaacagtatgaccgaagagagcagcttaagaaaagtggtctgggaaaggtcattatgtttttgtccaaatctgacgaggagactactgcaaataggaaattggctaaggagctggttgataaatggagtcgaccaatattcaacaagagcacgagatttgaggacatgaagagatatgatgatgaaagagcaccttacaggcggccacaaatgaagaaaccttcatcgagtagctctggaatggaatccagagatgatgatcttgatgctgacttttcacaacgcaagtctgggcaaagtagttcaaggcagcacgcttctaggccggaagcctcgcctttggactttgtcattcgtccacagtccaaaattgaccctgagcagatacgggctcgtgctaagcaggctgtccaagaccagcgtcggctgaagatgaacaagaaattgcagcagctgaaagcgcccaagaagaaaaaccttcaggcgtcgaagctcagcgtggaaggccgtggcatgatcaagtacctgtagatcacccgctatggcatccgcagtcagcagtgcccagcacattatacaggacctgcatgggcccagggattgctggattactaagaagcatcctatcaccattccatggcaaacagcccggcatcaataattccttggatcttttttccaaatatttttcttgcctggtagggtgcagcatctgcgcttcagaaaccggttgatttgagcactatctatgagcatgtataaatatggtgcttttcaagcagagtggtgcctttatattgtataaaatatttgtcatgcttatgagttacagttaactctgtctatgttgtctcgatgtactaggtctcaagccctcttaatggagggttgtgatagggtaagcaagtcaacgttaaatctccataaaatgataggttaagcgagtcaacattaaatgtctccaatttaatggagatgaaatccgaaagaaaggattctgttgaggcgtaattcttggatccct

SEQ ID NO: 71961 - DNA, 257 bp, Zea Mays
aaaatgttgctctctcttccattcatttataccagtgcatcaactgaattcctatcctaggaggacctaacaacactaatccccagatcaccttatgctcaaaggaaaaacaaaaggaattttgtactatgtacatcagaatgatcccatgcctttgcacaatgtagaactcctaataaacgcagagaaaaggacaaaaataaatgcctgaaactcaaaactctgcaagctgaagaacgagctcagtcagaagcttg

SEQ ID NO: 71962 - DNA, 4070 bp, Zea Mays
cattggagtacacgagacaagaacgaagaagaggagcatccaaagctcatggcaactaaaaccgtcaagaagatcactggttcgcttggatttaagtcgtaatggattctattgctgttatagtgtttttatctctataaattacaaaagttgtagcagtccaaatagttatctttaatccaaagcgaataacacatttcatagtgataaatgcaggaggttgcaattacagagatggctgaattggatagcggtagcggacttctcaatgtttctacgagtgatgttatcatctgaccggttaaattaattagtgtagttaaggggtagaggcgaccgacttgggggtgtaactcttcttggcatatactgtactgtatgtcagtatgtgtcacgattatgttcactgtggttttgttccatataagatgtaggcactagtacatttctgtcgttaggaaaaaaaaagggagcccaaaacccatgtgatgttgacggtgcacccaagtgcccctttaatgcagatctcatagtctaaattttgatcacctctgtctaggcagtttgggatatgctctgtttcaggatccttttgcctcaacgttagtcatcttgcaattgcaaagcacttattctgcccttgctatcctcaagaatcaagattattggctacgatctaccaaatattgactgcaagacacttctctattctctttcaaaaaaaaggctccaacaaccagatggaagcttcatgcctactcatattggataagtagtgtagagacaagtcactaatggagggtgtttcaagcgaaaagaaacaagcccagtgatacctattacctgctatgtttttttttgggttggagctgtcttgaaaatcttgggtgctagacacctgtaattggcctcaaatatcttacaccagcttaatgccttaatcacgttctcagataactcaggacatgttctcgttcaccgttgcaacagtatggaggctttacgaaattcttttgacatctgcatctgtaccatcttcgcttttctctcagaattcagctggaaaaaaaacagctattactgtcgtgatcacagggttaccgtgaccgagttgtagagattgaggagggctgccgacggatagaagaaattgcagcttttctcggagagctgaaaaagagaggaagaaaatagaaagggcatgttcattctgctaagcacacacggatggaattggcgcgggcggcgggaaggcagttgcgcagctggaggctgctgcaacagtggcaataactcccgctgcccaccggctcacctgtccttcatccgccccgatccgaacccattcaattccaaattcacaaccctgccagtggttggcccgccgctgccaaatcgaatcggactccgatccgtgcagcccaccggcgagacggcgagacgccgaagctagcacacttcatgccatctgtctgacgtgatgcgtgtggcctctctgcttttactggatccctagccagctcaggagaaactcagaatagtactatagccaagtccatccagtcctttcgcggcgtcttccttgctcaccgcggctccggcgatgtcggccgccggctcggcggctctacctctccgtctacaactgggtcgtcttctccgtctacaacagccgccatcatggagattcttcatgggcttgtagggttggtgaggtctccagtctctgcaactcttccacaaattggatccagattattcctcacgtgaggtgtcttgtggagttttcccgagacccagtcacatcttcttgctactgccctgatcataagctggtctgtcactgagatcatcaggtactctttctttgcaatgaaggaggcatttggatctgcaccttcctggttatcatggctttggtaaatttggatttttcctccgaatctggagagtaatcctaccacctttgccaaggaaatttcccttgaacgtgtttttgcgtactgatcgtctgcacgtacagcagctttatgctgttctatcctacttgtatctctagtgaagttggtctgatctacatggctttgccttacatgaaggtacaccgatcctactagaaaaccgaagaggtatagtatgcatgctgttcacatctcataactaccatttttaaccgttttttcttgtgggaccacaatttcaagcatcggtcttaggccctgtttgggagggcttcacttcaattattacagctttgattttgcagcttcacaatgaaagcctcaacagattagtcagcggtgttcaagagtgtttggtttgcacatacactctaccttttataatacagtaaatttgtgtgatttttccttaaatatccttgatgattagcgggtgaagaaagagatctaaatcgataagtcatgtaatcaatgtcatgttttttttttaaactatagccggtggaggtaaaatagacttgaaattcttgaagtgaagctctccgagccataagatgcgcaacacatggaacttgtcatacgactacttgtacccatctgttcttgccctcctggtttatgttccagttggattgcaaaagaccccttcgctaatcggaacaaaaaaaaatcccgttcgccggctcctcccgtcgtgccctcggatatatggccatcgattctgagttctggccacatcaatccccgggatttagaggctgtttgttcgtggctaaatatgtcacactttgattaaggccgtcaaagccaccaccttaaagccatgggcagcagcatctcagggtcttcgtcttcctccctgcagcgcttcaatggcggcgggtgacgacgggtcggcggttcggcggctctacctctccgtgtacaactgggttagcttcttcggatggttgcaggtgctgtaccacgtgaccttggcgctgttgggtagcggccatcaggccgtctacgctgctgtcaaactgccactcctgttctcacaaactgctgccctagcagagattcttcattctattacagggctcgtgagatctccaatcagcgcaactcttccacaagttggtgcgaggatatttgttacctggtgcatcgtctggagttttcctgagacacagtcccatgtcctcgttacttccttggtcctaagctggtctatcactgaggtcatcagataccctttctttggcttgagggaggcatttgggatcacaccttcctggctcctatggctcaggtacagcacgttcactgtactctaccctgttgggctgatcagtgagctcggcttaatcttcactgccatgcctcacatgaagggaaggtccttctacatctgcgctgcactgaccactatctacattccagcgttcccgcacatgtacggtcacatgctcgcccagaggaagaagaacctgtccaaggcgaaagccgcatgacgctccagacgagcctaggcctcactgtcccagacggagagtaaccactgtctctaaccacgggatgtcagagtgcactactcttatcaggtggcaataacaccggggttgtaccaaggaatatactggatagctcttccatgggcaaatcaataataaataaaatcaccatttatataagtggatactcttttttttaaaaaaaaatacacatatatcgttggagttcttggtccaagtctatttaccttataattgatccaacccgctctttatagtaatataatagtatggtgcaaaatgtaaataatagaagtggaagaaaaccaatttaaatcgcttaccttttgccactgtatgaaactatgaatagagtcgtaagaagagagtaagctatagttacacgtacgcgcgcgcgcatattattgtgatcggtgatttttctgtctctattttttttgtcaaaattttactttaatttcaacaatatcttgctcattaagttcaggaacgttttatggttgagtaatatcataagatactgttagaatctatactgtataggatcgatttctaagtccctagaataccaatccgtaactgaaagtaaaac

SEQ ID NO: 71963 - DNA, 3134 bp, Zea Mays
gaaattgcagcttttctcggagagctgaaaaagagaggaagaaaatagaaagggcatgttcattctgctaagcacacacggatggaattggcgcgggcggcgggaaggcagttgcgcagctggaggctgctgcaacagtggcaataactcccgctgcccaccggctcacctgtccttcatccgccccgatccgaacccattcaattccaaattcacaaccctgccagtggttggcccgccgctgccaaatcgaatcggactccgatccgtgcagcccaccggcgagacggcgagacgccgaagctagcacacttcatgccatctgtctgacgtgatgcgtgtggcctctctgcttttactggatccctagccagctcaggagaaactcagaatagtactatagccaagtccatccagtcctttcgcggcgtcttccttgctcaccgcggctccggcgatgtcggccgccggctcggcggctctacctctccgtctacaactgggtcgtcttctccgtctacaacagccgccatcatggagattcttcatgggcttgtagggttggtgaggtctccagtctctgcaactcttccacaaattggatccagattattcctcacgtgaggtgtcttgtggagttttcccgagacccagtcacatcttcttgctactgccctgatcataagctggtctgtcactgagatcatcaggtactctttctttgcaatgaaggaggcatttggatctgcaccttcctggttatcatggctttggtaaatttggatttttcctccgaatctggagagtaatcctaccacctttgccaaggaaatttcccttgaacgtgtttttgcgtactgatcgtctgcacgtacagcagctttatgctgttctatcctacttgtatctctagtgaagttggtctgatctacatggctttgccttacatgaaggtacaccgatcctactagaaaaccgaagaggtatagtatgcatgctgttcacatctcataactaccatttttaaccgttttttcttgtgggaccacaatttcaagcatcggtcttaggccctgtttgggagggcttcacttcaattattacagctttgattttgcagcttcacaatgaaagcctcaacagattagtcagcggtgttcaagagtgtttggtttgcacatacactctaccttttataatacagtaaatttgtgtgatttttccttaaatatccttgatgattagcgggtgaagaaagagatctaaatcgataagtcatgtaatcaatgtcatgttttttttttaaactatagccggtggaggtaaaatagacttgaaattcttgaagtgaagctctccgagccataagatgcgcaacacatggaacttgtcatacgactacttgtacccatctgttcttgccctcctggtttatgttccaggtaagcctttcccttctctcggctgctgctgtaccgctttacttagatctagcaaacaatgtatgattatcctgtgtccaggaacattttttattatggcagttcatcatgtatgattcttatattgaacttgttttctcttgaaaagatgagatgtgtctcattttattttctctttttttttgtggaaaacgaacatcatctgaggagttggattgcaaaagaccccttcgctaatcggaacaaaaaaaaatcccgttcgccggctcctcccgtcgtgccctcggatatatggccatcgattctgagttctggccacatcaatccccgggatttagaggctgtttgttcgtggctaaatatgtcacactttgattaaggccgtcaaagccaccaccttaaagccatgggcagcagcatctcagggtcttcgtcttcctccctgcagcgcttcaatggcggcgggtgacgacgggtcggcggttcggcggctctacctctccgtgtacaactgggttagcttcttcggatggttgcaggtgctgtaccacgtgaccttggcgctgttgggtagcggccatcaggccgtctacgctgctgtcaaactgccactcctgttctcacaaactgctgccctagcagagattcttcattctattacagggctcgtgagatctccaatcagcgcaactcttccacaagttggtgcgaggatatttgttacctggtgcatcgtctggagttttcctgagacacagtcccatgtcctcgttacttccttggtcctaagctggtctatcactgaggtcatcagataccctttctttggcttgagggaggcatttgggatcacaccttcctggctcctatggctcaggtacagcacgttcactgtactctaccctgttgggctgatcagtgagctcggcttaatcttcactgccatgcctcacatgaagggaaggtccttctacatctgcgctgcactgaccactatctacattccagcgttcccgcacatgtacggtcacatgctcgcccagaggaagaagaacctgtccaaggcgaaagccgcatgacgctccagacgagcctaggcctcactgtcccagacggagagtaaccactgtctctaaccacgggatgtcagagtgcactactcttatcaggtggcaataacaccggggttgtaccaaggaatatactggatagctcttccatgggcaaatcaataataaataaaatcaccatttatataagtggatactcttttttttaaaaaaaaatacacatatatcgttggagttcttggtccaagtctatttaccttataattgatccaacccgctctttatagtaatataatagtatggtgcaaaatgtaaataatagaagtggaagaaaaccaatttaaatcgcttaccttttgccactgtatgaaactatgaatagagtcgtaagaagagagtaagctatagttacacgtacgcgcgcgcgcatattattgtgatcggtgatttttctgtctctattttttttgtcaaaattttactttaatttcaacaatatcttgctcattaagttcaggaacgttttatggttgagtaatatcataagatactgttagaatctatactgtataggatcgatttctaagtccctagaataccaatccgtaactgaaagtaaaac

SEQ ID NO: 71964 - DNA, 4143 bp, Zea Mays
cgcagctggaggctgctgcaacagtggcaataactcccgctgcccaccggctcacctgtccttcatccgccccgatccgaacccattcaattccaaattcacaaccctgccagtggttggcccgccgctgccaaatcgaatcggactccgatccgtgcagcccaccggcgagacggcgagacgccgaagctagcacacttcatgccatctgtctgacgtgatgcgtgtggcctctctgcttttactggatccctagccagctcaggagaaactcagaatagtactatagccaagtccatccagtcctttcgcggcgtcttccttgctcaccgcggctccggcgatgtcggccgccggctcggcggctctacctctccgtctacaactgggtcgtcttctccgtctacaacagccgccatcatggagattcttcatgggcttgtagggttggtgaggtctccagtctctgcaactcttccacaaattggatccagattattcctcacgtgaggtgtcttgtggagttttcccgagacccagtcacatcttcttgctactgccctgatcataagctggtctgtcactgagatcatcaggtactctttctttgcaatgaaggaggcatttggatctgcaccttcctggttatcatggctttggtaaatttggatttttcctccgaatctggagagtaatcctaccacctttgccaaggaaatttcccttgaacgtgtttttgcgtactgatcgtctgcacgtacagcagctttatgctgttctatcctacttgtatctctagtgaagttggtctgatctacatggctttgccttacatgaaggtacaccgatcctactagaaaaccgaagaggtatagtatgcatgctgttcacatctcataactaccatttttaaccgttttttcttgtgggaccacaatttcaagcatcggtcttaggccctgtttgggagggcttcacttcaattattacagctttgattttgcagcttcacaatgaaagcctcaacagattagtcagcggtgttcaagagtgtttggtttgcacatacactctaccttttataatacagtaaatttgtgtgatttttccttaaatatccttgatgattagcgggtgaagaaagagatctaaatcgataagtcatgtaatcaatgtcatgttttttttttaaactatagccggtggaggtaaaatagacttgaaattcttgaagtgaagctctccgagccataagatgcgcaacacatggaacttgtcatacgactacttgtacccatctgttcttgccctcctggtttatgttccagttggattgcaaaagaccccttcgctaatcggaacaaaaaaaaatcccgttcgccggctcctcccgtcgtgccctcggatatatggccatcgattctgagttctggccacatcaatccccgggatttagaggctgtttgttcgtggctaaatatgtcacactttgattaagaaaggagaatttgctggccatatacttggatttagcgtgggtgcctgggtggtgtactggtgtctggtaaccagtagcggctagcaacagccgtcaaagccaccaccttaaagccatgggcagcagcatctcagggtcttcgtcttcctccctgcagcgcttcaatggcggcgggtgacgacgggtcggcggttcggcggctctacctctccgtgtacaactgggttagcttcttcggatggttgcaggtgctgtaccacgtgaccttggcgctgttgggtagcggccatcaggccgtctacgctgctgtcaaactgccactcctgttctcacaaactgctgccctagcagaggtaaactggtcttaagcctagtcgcatgttttatcgaacgtattaatgtgataattttagcgaagatcacaggtctaggactctaggatttgaaactctctcgtctcgtcgattgttttgaaatggatgtagaggtgtttggtttatcgagactaaattttagtttctctattttatttattttaattcctaaattataaacaaacgtttttgccccgcatcaccctcttgcatgtgcggcagcaggccgtcggctagtagaagacgctacggattaaaatcaagcgaacaggttagacaataatatataggcagttgtgtttcctttatctccacataaacaatggatctaaacattaaatactaaacacagacaaaatccaataaaagcactatgcaaatatttttactggatcagctacataattttgctagaaagattatatgtgtccaaaggggcacacttagaccccaggccatgttcagttattcctacgccacaggggttaaatgagtttggaagattttagtagaacttttaacctaatgtggatttaaacccactcaattccctcccatctatatctattgagatgaaaacgaacaagttctcaatgaaaatccatctgtttgagttattaatacatgtgataacacttttagaaaaaaaaggaaacattgcatctaatatgtgatgatcatcgacatgaccaggcatgtattggtaaaataggtactaagatagacaagtttccatccgagaccaagccattaaatttaatttttatcaatataatgtatgtatgtttaatgacagtgttggaagagagtttattaacaaataggaagacagtttgtatccaatctttcaatttagttgttattattacacgtagtacccctgtgtggtcctacaagaaactttgtggaattccttgtatcatcctagccgtggattatcagtgtttatatttctttgcacatgtactaatttactaagtaattgagtttcactggtgatgctgtctcgctggtagcacagattcttcattctattacaggtaaaagaggttcttctttcttcccaatttatgtttttcgatctttatcaggactgagactttctaaacaatgaaaatatatcctcaaagattccaacttgaaaaatatatatattttttaaaaaaaattgactctcttgcattggttttcttttaatttaaaaaaaaactacgcaacgatgatatgttgaactgctaaaagggctcgtgagatctccaatcagcgcaactcttccacaagttggtgcgaggatatttgttacctggtgcatcgtctggagttttcctgagacacagtcccatgtcctcgttacttccttggtcctaagctggtctatcactgaggtcatcagataccctttctttggcttgagggaggcatttgggatcacaccttcctggctcctatggctcaggtacagcacgttcactgtactctaccctgttgggctgatcagtgagctcggcttaatcttcactgccatgcctcacatgaagggaaggtccttctacatctgcgctgcactgaccactatctacattccagcgttcccgcacatgtacggtcacatgctcgcccagaggaagaagaacctgtccaaggcgaaagccgcatgacgctccagacgagcctaggcctcactgtcccagacggagagtaaccactgtctctaaccacgggatgtcagagtgcactactcttatcaggtggcaataacaccggggttgtaccaaggaatatactggatagctcttccatgggcaaatcaataataaataaaatcaccatttatataagtggatactcttttttttaaaaaaaaatacacatatatcgttggagttcttggtccaagtctatttaccttataattgatccaacccgctctttatagtaatataatagtatggtgcaaaatgtaaataatagaagtggaagaaaaccaatttaaatcgcttaccttttgccactgtatgaaactatgaatagagtcgtaagaagagagtaagctatagttacacgtacgcgcgcgcgcatattattgtgatcggtgatttttctgtctctattttttttgtcaaaattttactttaatttcaacaatatcttgctcattaagttcaggaacgttttatggttgagtaatatcataagatactgttagaatctatactgtataggatcgatttctaagtccctagaataccaatccgtaactgaaagtaaaac

SEQ ID NO: 71965 - DNA, 3313 bp, Zea Mays
ctcccgctgcccaccggctcacctgtccttcatccgccccgatccgaacccattcaattccaaattcacaaccctgccagtggttggcccgccgctgccaaatcgaatcggactccgatccgtgcagcccaccggcgagacggcgagacgccgaagctagcacacttcatgccatctgtctgacgtgatgcgtgtggcctctctgcttttactggatccctagccagctcaggagaaactcagaatagtactatagccaagtccatccagtcctttcgcggcgtcttccttgctcaccgcggctccggcgatgtcggccgccggctcggcggctctacctctccgtctacaactgggtcgtcttctccgtctacaacagccgccatcatggagattcttcatgggcttgtagggttggtgaggtctccagtctctgcaactcttccacaaattggatccagattattcctcacgtgaggtgtcttgtggagttttcccgagacccagtcacatcttcttgctactgccctgatcataagctggtctgtcactgagatcatcaggtactctttctttgcaatgaaggaggcatttggatctgcaccttcctggttatcatggctttggtaaatttggatttttcctccgaatctggagagtaatcctaccacctttgccaaggaaatttcccttgaacgtgtttttgcgtactgatcgtctgcacgtacagcagctttatgctgttctatcctacttgtatctctagtgaagttggtctgatctacatggctttgccttacatgaaggtacaccgatcctactagaaaaccgaagagcttcacaatgaaagcctcaacagattagtcagcggtgttcaagagtgtttggtttgcacatacactctaccttttataatacagtaaatttgtgtgatttttccttaaatatccttgatgattagcgggtgaagaaagagatctaaatcgataagtcatgtaatcaatgtcatgttttttttttaaactatagccggtggaggtaaaatagacttgaaattcttgaagtgaagctctccgagccataagatgcgcaacacatggaacttgtcatacgactacttgtacccatctgttcttgccctcctggtttatgttccaggtaagcctttcccttctctcggctgctgctgtaccgctttacttagatctagcaaacaatgtatgattatcctgtgtccaggaacattttttattatggcagttcatcatgtatgattcttatattgaacttgttttctcttgaaaagatgagatgtgtctcattttattttctctttttttttgtggaaaacgaacatcatctgaggagttggattgcaaaagaccccttcgctaatcggaacaaaaaaaaatcccgttcgccggctcctcccgtcgtgccctcggatatatggccatcgattctgagttctggccacatcaatccccgggatttagaggctgtttgttcgtggctaaatatgtcacactttgattaagaaaggagaatttgctggccatatacttggatttagcgtgggtgcctgggtggtgtactggtgtctggtaaccagtagcggctagcaacagccgtcaaagccaccaccttaaagccatgggcagcagcatctcagggtcttcgtcttcctccctgcagcgcttcaatggcggcgggtgacgacgggtcggcggttcggcggctctacctctccgtgtacaactgggttagcttcttcggatggttgcaggtgctgtaccacgtgaccttggcgctgttgggtagcggccatcaggccgtctacgctgctgtcaaactgccactcctgttctcacaaactgctgccctagcagaggccgtcggctagtagaagacgctacggattaaaatcaagcgaacaggttagacaataatatataggcagttgtgtttcctttatctccacataaacaatggatctaaacattaaatactaaacacagacaaaatccaataaaagcactatgcaaatatttttactggatcagctacataattttgctagaaagattatatgtgtccaaaggggcacacttagaccccaggccatgttcagttattcctacgccacaggggttaaatgagtttggaagattttagtagaacttttaacctaatgtggatttaaacccactcaattccctcccatctatatctattgagatgaaaacgaacaagttctcaatgaaaatccatctgtttgagttattaatacatgtgataacacttttagaaaaaaaaggaaacattgcatctaatatgtgatgatcatcgacatgaccaggcatgtattggtaaaataggtactaagatagacaagtttccatccgagaccaagccattaaatttaatttttatcaatataatgtatgtatgtttaatgacagtgttggaagagagtttattaacaaataggaagacagtttgtatccaatctttcaatttagttgttattattacacgtagtacccctgtgtggtcctacaagaaactttgtggaattccttgtatcatcctagccgtggattatcagtgtttatatttctttgcacatgtactaatttactaagtaattgagtttcactggtgatgctgtctcgctggtagcacagattcttcattctattacaggtaaaagaggttcttctttcttcccaatttatgtttttcgatctttatcaggactgagactttctaaacaatgaaaatatatcctcaaagattccaacttgaaaaatatatatattttttaaaaaaaattgactctcttgcattggttttcttttaatttaaaaaaaaactacgcaacgatgatatgttgaactgctaaaagggctcgtgagatctccaatcagcgcaactcttccacaagttggtgcgaggatatttgttacctggtgcatcgtctggagttttcctgagacacagtcccatgtcctcgttacttccttggtcctaagctggtctatcactgaggtcatcagataccctttctttggcttgagggaggcatttgggatcacaccttcctggctcctatggctcaggtacagcacgttcactgtactctaccctgttgggctgatcagtgagctcggcttaatcttcactgccatgcctcacatgaagggaaggtccttctacatctgcgctgcactgaccactatctacattccaggatcaggatctgacatgacatggcgcgctctgctgcatgctgcttctttttggctctcag

SEQ ID NO: 71966 - DNA, 4026 bp, Zea Mays
ctcccgctgcccaccggctcacctgtccttcatccgccccgatccgaacccattcaattccaaattcacaaccctgccagtggttggcccgccgctgccaaatcgaatcggactccgatccgtgcagcccaccggcgagacggcgagacgccgaagctagcacacttcatgccatctgtctgacgtgatgcgtgtggcctctctgcttttactggatccctagccagctcaggagaaactcagaatagtactatagccaagtccatccagtcctttcgcggcgtcttccttgctcaccgcggctccggcgatgtcggccgccggctcggcggctctacctctccgtctacaactgggtcgtcttctccgtctacaacagccgccatcatggagattcttcatgggcttgtagggttggtgaggtctccagtctctgcaactcttccacaaattggatccagattattcctcacgtgaggtgtcttgtggagttttcccgagacccagtcacatcttcttgctactgccctgatcataagctggtctgtcactgagatcatcaggtactctttctttgcaatgaaggaggcatttggatctgcaccttcctggttatcatggctttggtaaatttggatttttcctccgaatctggagagtaatcctaccacctttgccaaggaaatttcccttgaacgtgtttttgcgtactgatcgtctgcacgtacagcagctttatgctgttctatcctacttgtatctctagtgaagttggtctgatctacatggctttgccttacatgaaggtacaccgatcctactagaaaaccgaagagcttcacaatgaaagcctcaacagattagtcagcggtgttcaagagtgtttggtttgcacatacactctaccttttataatacagtaaatttgtgtgatttttccttaaatatccttgatgattagcgggtgaagaaagagatctaaatcgataagtcatgtaatcaatgtcatgttttttttttaaactatagccggtggaggtaaaatagacttgaaattcttgaagtgaagctctccgagccataagatgcgcaacacatggaacttgtcatacgactacttgtacccatctgttcttgccctcctggtttatgttccaggtaagcctttcccttctctcggctgctgctgtaccgctttacttagatctagcaaacaatgtatgattatcctgtgtccaggaacattttttattatggcagttcatcatgtatgattcttatattgaacttgttttctcttgaaaagatgagatgtgtctcattttattttctctttttttttgtggaaaacgaacatcatctgaggagttggattgcaaaagaccccttcgctaatcggaacaaaaaaaaatcccgttcgccggctcctcccgtcgtgccctcggatatatggccatcgattctgagttctggccacatcaatccccgggatttagaggctgtttgttcgtggctaaatatgtcacactttgattaagcgcttcaatggcggcgggtgacgacgggtcggcggttcggcggctctacctctccgtgtacaactgggttagcttcttcggatggttgcaggtgctgtaccacgtgaccttggcgctgttgggtagcggccatcaggccgtctacgctgctgtcaaactgccactcctgttctcacaaactgctgccctagcagaggtaaactggtcttaagcctagtcgcatgttttatcgaacgtattaatgtgataattttagcgaagatcacaggtctaggactctaggatttgaaactctctcgtctcgtcgattgttttgaaatggatgtagaggtgtttggtttatcgagactaaattttagtttctctattttatttattttaattcctaaattataaacaaacgtttttgccccgcatcaccctcttgcatgtgcggcagcaggccgtcggctagtagaagacgctacggattaaaatcaagcgaacaggttagacaataatatataggcagttgtgtttcctttatctccacataaacaatggatctaaacattaaatactaaacacagacaaaatccaataaaagcactatgcaaatatttttactggatcagctacataattttgctagaaagattatatgtgtccaaaggggcacacttagaccccaggccatgttcagttattcctacgccacaggggttaaatgagtttggaagattttagtagaacttttaacctaatgtggatttaaacccactcaattccctcccatctatatctattgagatgaaaacgaacaagttctcaatgaaaatccatctgtttgagttattaatacatgtgataacacttttagaaaaaaaaggaaacattgcatctaatatgtgatgatcatcgacatgaccaggcatgtattggtaaaataggtactaagatagacaagtttccatccgagaccaagccattaaatttaatttttatcaatataatgtatgtatgtttaatgacagtgttggaagagagtttattaacaaataggaagacagtttgtatccaatctttcaatttagttgttattattacacgtagtacccctgtgtggtcctacaagaaactttgtggaattccttgtatcatcctagccgtggattatcagtgtttatatttctttgcacatgtactaatttactaagtaattgagtttcactggtgatgctgtctcgctggtagcacagattcttcattctattacaggtaaaagaggttcttctttcttcccaatttatgtttttcgatctttatcaggactgagactttctaaacaatgaaaatatatcctcaaagattccaacttgaaaaatatatatattttttaaaaaaaattgactctcttgcattggttttcttttaatttaaaaaaaaactacgcaacgatgatatgttgaactgctaaaagggctcgtgagatctccaatcagcgcaactcttccacaagttggtgcgaggatatttgttacctggtgcatcgtctggagttttcctgagacacagtcccatgtcctcgttacttccttggtcctaagctggtctatcactgaggtcatcagataccctttctttggcttgagggaggcatttgggatcacaccttcctggctcctatggctcaggtacagcacgttcactgtactctaccctgttgggctgatcagtgagctcggcttaatcttcactgccatgcctcacatgaagggaaggtccttctacatctgcgctgcactgaccactatctacattccagcgttcccgcacatgtacggtcacatgctcgcccagaggaagaagaacctgtccaaggcgaaagccgcatgacgctccagacgagcctaggcctcactgtcccagacggagagtaaccactgtctctaaccacgggatgtcagagtgcactactcttatcaggtggcaataacaccggggttgtaccaaggaatatactggatagctcttccatgggcaaatcaataataaataaaatcaccatttatataagtggatactcttttttttaaaaaaaaatacacatatatcgttggagttcttggtccaagtctatttaccttataattgatccaacccgctctttatagtaatataatagtatggtgcaaaatgtaaataatagaagtggaagaaaaccaatttaaatcgcttaccttttgccactgtatgaaactatgaatagagtcgtaagaagagagtaagctatagttacacgtacgcgcgcgcgcatattattgtgatcggtgatttttctgtctctattttttttgtcaaaattttactttaatttcaacaatatcttgctcattaagttcaggaacgttttatggttgagtaatatcataagatactgttagaatctatactgtataggatcgatttctaagtccctagaataccaatccgtaactgaaagtaaaac

SEQ ID NO: 71967 - DNA, 2919 bp, Zea Mays
ctcccgctgcccaccggctcacctgtccttcatccgccccgatccgaacccattcaattccaaattcacaaccctgccagtggttggcccgccgctgccaaatcgaatcggactccgatccgtgcagcccaccggcgagacggcgagacgccgaagctagcacacttcatgccatctgtctgacgtgatgcgtgtggcctctctgcttttactggatccctagccagctcaggagaaactcagaatagtactatagccaagtccatccagtcctttcgcggcgtcttccttgctcaccgcggctccggcgatgtcggccgccggctcggcggctctacctctccgtctacaactgggtcgtcttctccgtctacaacagccgccatcatggagattcttcatgggcttgtagggttggtgaggtctccagtctctgcaactcttccacaaattggatccagattattcctcacgtgaggtgtcttgtggagttttcccgagacccagtcacatcttcttgctactgccctgatcataagctggtctgtcactgagatcatcaggtactctttctttgcaatgaaggaggcatttggatctgcaccttcctggttatcatggctttggtaaatttggatttttcctccgaatctggagagtaatcctaccacctttgccaaggaaatttcccttgaacgtgtttttgcgtactgatcgtctgcacgtacagcagctttatgctgttctatcctacttgtatctctagtgaagttggtctgatctacatggctttgccttacatgaaggtacaccgatcctactagaaaaccgaagaggtatagtatgcatgctgttcacatctcataactaccatttttaaccgttttttcttgtgggaccacaatttcaagcatcggtcttaggccctgtttgggagggcttcacttcaattattacagctttgattttgcagcttcacaatgaaagcctcaacagattagtcagcggtgttcaagagtgtttggtttgcacatacactctaccttttataatacagtaaatttgtgtgatttttccttaaatatccttgatgattagcgggtgaagaaagagatctaaatcgataagtcatgtaatcaatgtcatgttttttttttaaactatagccggtggaggtaaaatagacttgaaattcttgaagtgaagctctccgagccataagatgcgcaacacatggaacttgtcatacgactacttgtacccatctgttcttgccctcctggtttatgttccaggtaagcctttcccttctctcggctgctgctgtaccgctttacttagatctagcaaacaatgtatgattatcctgtgtccaggaacattttttattatggcagttcatcatgtatgattcttatattgaacttgttttctcttgaaaagatgagatgtgtctcattttattttctctttttttttgtggaaaacgaacatcatctgaggagttggattgcaaaagaccccttcgctaatcggaacaaaaaaaaatcccgttcgccggctcctcccgtcgtgccctcggatatatggccatcgattctgagttctggccacatcaatccccgggatttagaggctgtttgttcgtggctaaatatgtcacactttgattaagcgcttcaatggcggcgggtgacgacgggtcggcggttcggcggctctacctctccgtgtacaactgggttagcttcttcggatggttgcaggtgctgtaccacgtgaccttggcgctgttgggtagcggccatcaggccgtctacgctgctgtcaaactgccactcctgttctcacaaactgctgccctagcagagattcttcattctattacagggctcgtgagatctccaatcagcgcaactcttccacaagttggtgcgaggatatttgttacctggtgcatcgtctggagttttcctgagacacagtcccatgtcctcgttacttccttggtcctaagctggtctatcactgaggtcatcagataccctttctttggcttgagggaggcatttgggatcacaccttcctggctcctatggctcaggtacagcacgttcactgtactctaccctgttgggctgatcagtgagctcggcttaatcttcactgccatgcctcacatgaagggaaggtccttctacatctgcgctgcactgaccactatctacattccagcgttcccgcacatgtacggtcacatgctcgcccagaggaagaagaacctgtccaaggcgaaagccgcatgacgctccagacgagcctaggcctcactgtcccagacggagagtaaccactgtctctaaccacgggatgtcagagtgcactactcttatcaggtggcaataacaccggggttgtaccaaggaatatactggatagctcttccatgggcaaatcaataataaataaaatcaccatttatataagtggatactcttttttttaaaaaaaaatacacatatatcgttggagttcttggtccaagtctatttaccttataattgatccaacccgctctttatagtaatataatagtatggtgcaaaatgtaaataatagaagtggaagaaaaccaatttaaatcgcttaccttttgccactgtatgaaactatgaatagagtcgtaagaagagagtaagctatagttacacgtacgcgcgcgcgcatattattgtgatcggtgatttttctgtctctattttttttgtcaaaattttactttaatttcaacaatatcttgctcattaagttcaggaacgttttatggttgagtaatatcataagatactgttagaatctatactgtataggatcgatttctaagtccctagaataccaatccgtaactgaaagtaaaac

SEQ ID NO: 71968 - DNA, 3032 bp, Zea Mays
cacaaccctgccagtggttggcccgccgctgccaaatcgaatcggactccgatccgtgcagcccaccggcgagacggcgagacgccgaagctagcacacttcatgccatctgtctgacgtgatgcgtgtggcctctctgcttttactggatccctagccagctcaggagaaactcagaatagtactatagccaagtccatccagtcctttcgcggcgtcttccttgctcaccgcggctccggcgatgtcggccgccggctcggcggctctacctctccgtctacaactgggtcgtcttctccgtctacaacagccgccatcatggagattcttcatgggcttgtagggttggtgaggtctccagtctctgcaactcttccacaaattggatccagattattcctcacgtgaggtgtcttgtggagttttcccgagacccagtcacatcttcttgctactgccctgatcataagctggtctgtcactgagatcatcaggtactctttctttgcaatgaaggaggcatttggatctgcaccttcctggttatcatggctttggtaaatttggatttttcctccgaatctggagagtaatcctaccacctttgccaaggaaatttcccttgaacgtgtttttgcgtactgatcgtctgcacgtacagcagctttatgctgttctatcctacttgtatctctagtgaagttggtctgatctacatggctttgccttacatgaaggtacaccgatcctactagaaaaccgaagaggtatagtatgcatgctgttcacatctcataactaccatttttaaccgttttttcttgtgggaccacaatttcaagcatcggtcttaggccctgtttgggagggcttcacttcaattattacagctttgattttgcagcttcacaatgaaagcctcaacagattagtcagcggtgttcaagagtgtttggtttgcacatacactctaccttttataatacagtaaatttgtgtgatttttccttaaatatccttgatgattagcgggtgaagaaagagatctaaatcgataagtcatgtaatcaatgtcatggtaggtaatttttgtgcaacttcatgagaaagtatgaaaacggtgtttttaaagcacccttcgagaagctttaaaaattttatgaaattggtctctggtttcagttttttttttaaactatagccggtggaggtaaaatagacttgaaattcttgaagtgaagctctccgagccataagatgcgcaacacatggaacttgtcatacgactacttgtacccatctgttcttgccctcctggtttatgttccaggtaagcctttcccttctctcggctgctgctgtaccgctttacttagatctagcaaacaatgtatgattatcctgtgtccaggaacattttttattatggcagttcatcatgtatgattcttatattgaacttgttttctcttgaaaagatgagatgtgtctcattttattttctctttttttttgtggaaaacgaacatcatctgaggagttggattgcaaaagaccccttcgctaatcggaacaaaaaaaaatcccgttcgccggctcctcccgtcgtgccctcggatatatggccatcgattctgagttctggccacatcaatccccgggatttagaggctgtttgttcgtggctaaatatgtcacactttgattaagaaaggagaatttgctggccatatacttggatttagcgtgggtgcctgggtggtgtactggtgtctggtaaccagtagcggctagcaacagccgtcaaagccaccaccttaaagccatgggcagcagcatctcagggtcttcgtcttcctccctgcagcgcttcaatggcggcgggtgacgacgggtcggcggttcggcggctctacctctccgtgtacaactgggttagcttcttcggatggttgcaggtgctgtaccacgtgaccttggcgctgttgggtagcggccatcaggccgtctacgctgctgtcaaactgccactcctgttctcacaaactgctgccctagcagagattcttcattctattacagggctcgtgagatctccaatcagcgcaactcttccacaagttggtgcgaggatatttgttacctggtgcatcgtctggagttttcctgagacacagtcccatgtcctcgttacttccttggtcctaagctggtctatcactgaggtcatcagataccctttctttggcttgagggaggcatttgggatcacaccttcctggctcctatggctcagggaaggtccttctacatctgcgctgcactgaccactatctacattccagcgttcccgcacatgtacggtcacatgctcgcccagaggaagaagaacctgtccaaggcgaaagccgcatgacgctccagacgagcctaggcctcactgtcccagacggagagtaaccactgtctctaaccacgggatgtcagagtgcactactcttatcaggtggcaataacaccggggttgtaccaaggaatatactggatagctcttccatgggcaaatcaataataaataaaatcaccatttatataagtggatactcttttttttaaaaaaaaatacacatatatcgttggagttcttggtccaagtctatttaccttataattgatccaacccgctctttatagtaatataatagtatggtgcaaaatgtaaataatagaagtggaagaaaaccaatttaaatcgcttaccttttgccactgtatgaaactatgaatagagtcgtaagaagagagtaagctatagttacacgtacgcgcgcgcgcatattattgtgatcggtgatttttctgtctctattttttttgtcaaaattttactttaatttcaacaatatcttgctcattaagttcaggaacgttttatggttgagtaatatcataagatactgttagaatctatactgtataggatcgatttctaagtccctagaataccaatccgtaactgaaagtaaaac

SEQ ID NO: 71969 - DNA, 3194 bp, Zea Mays
ggttggcccgccgctgccaaatcgaatcggactccgatccgtgcagcccaccggcgagacggcgagacgccgaagctagcacacttcatgccatctgtctgacgtgatgcgtgtggcctctctgcttttactggatccctagccagctcaggagaaactcagaatagtactatagccaagtccatccagtcctttcgcggcgtcttccttgctcaccgcggctccggcgatgtcggccgccggctcggcggctctacctctccgtctacaactgggtcgtcttctccgtctacaacagccgccatcatggagattcttcatgggcttgtagggttggtgaggtctccagtctctgcaactcttccacaaattggatccagattattcctcacgtgaggtgtcttgtggagttttcccgaggtatcatcactagccaaccttcatgttttcatatatgacatctattttttaggaatacatcttaatttgttcatgaactttagagtttccattttataatttcgtattttagactagctagatacatatctatgcgttgcttttttgccgggaccttgaattatgacacggctctaggtctaaaagcatttgctagaactagagaacatgcagtagatggctatgtgactttcaggacgttaagattagtcaattattcaatttttaagtccgataatggagtaagcaactacgagtgggcattgtaacaagtttctacagcaggcatattagaaaaggataaatagggcttttaccttttgcatcctatttcaacttttttctgttgcgagtaaacacttgtattatttctcgacaatgtgaaccttgttttgcagacccagtcacatcttcttgctactgccctgatcataagctggtctgtcactgaggtacaaatcacttgatgtgattctctaaatcactcacttgtaaccactactgaatccagtactttattatatgtcactataaaacctagagtaaattttgttatgatctgaattgctggtttcttccagatcatcaggtactctttctttgcaatgaaggaggcatttggatctgcaccttcctggttatcatggctttggtaaatttggatttttcctccgaatctggagagtaatcctaccacctttgccaaggaaatttcccttgaacgtgtttttgcgtactgatcgtctgcacgtacagcagctttatgctgttctatcctacttgtatctctagtgaagttggtctgatctacatggctttgccttacatgaaggtacaccgatcctactagaaaaccgaagaggtatagtatgcatgctgttcacatctcataactaccatttttaaccgttttttcttgtgggaccacaatttcaagcatcggtcttaggccctgtttgggagggcttcacttcaattattacagctttgattttgcagcttcacaatgaaagcctcaacagattagtcagcggtgttcaagagtgtttggtttgcacatacactctaccttttataatacagtaaatttgtgtgatttttccttaaatatccttgatgattagcgggtgaagaaagagatctaaatcgataagtcatgtaatcaatgtcatgttttttttttaaactatagccggtggaggtaaaatagacttgaaattcttgaagtgaagctctccgagccataagatgcgcaacacatggaacttgtcatacgactacttgtacccatctgttcttgccctcctggtttatgttccagttggattgcaaaagaccccttcgctaatcggaacaaaaaaaaatcccgttcgccggctcctcccgtcgtgccctcggatatatggccatcgattctgagttctggccacatcaatccccgggatttagaggctgtttgttcgtggctaaatatgtcacactttgattaagcgcttcaatggcggcgggtgacgacgggtcggcggttcggcggctctacctctccgtgtacaactgggttagcttcttcggatggttgcaggtgctgtaccacgtgaccttggcgctgttgggtagcggccatcaggccgtctacgctgctgtcaaactgccactcctgttctcacaaactgctgccctagcagagattcttcattctattacagggctcgtgagatctccaatcagcgcaactcttccacaagttggtgcgaggatatttgttacctggtgcatcgtctggagttttcctgagacacagtcccatgtcctcgttacttccttggtcctaagctggtctatcactgaggtcatcagataccctttctttggcttgagggaggcatttgggatcacaccttcctggctcctatggctcaggtacagcacgttcactgtactctaccctgttgggctgatcagtgagctcggcttaatcttcactgccatgcctcacatgaagggaaggtccttctacatctgcgctgcactgaccactatctacattccagcgttcccgcacatgtacggtcacatgctcgcccagaggaagaagaacctgtccaaggcgaaagccgcatgacgctccagacgagcctaggcctcactgtcccagacggagagtaaccactgtctctaaccacgggatgtcagagtgcactactcttatcaggtggcaataacaccggggttgtaccaaggaatatactggatagctcttccatgggcaaatcaataataaataaaatcaccatttatataagtggatactcttttttttaaaaaaaaatacacatatatcgttggagttcttggtccaagtctatttaccttataattgatccaacccgctctttatagtaatataatagtatggtgcaaaatgtaaataatagaagtggaagaaaaccaatttaaatcgcttaccttttgccactgtatgaaactatgaatagagtcgtaagaagagagtaagctatagttacacgtacgcgcgcgcgcatattattgtgatcggtgatttttctgtctctattttttttgtcaaaattttactttaatttcaacaatatcttgctcattaagttcaggaacgttttatggttgagtaatatcataagatactgttagaatctatactgtataggatcgatttctaagtccctagaataccaatccgtaactgaaagtaaaac

SEQ ID NO: 71970 - DNA, 2301 bp, Zea Mays
ggcccgccgctgccaaatcgaatcggactccgatccgtgcagcccaccggcgagacggcgagacgccgaagctagcacacttcatgccatctgtctgacgtgatgcgtgtggcctctctgcttttactggatccctagccagctcaggagaaactcagaatagtactatagccaagtccatccagtcctttcgcggcgtcttccttgctcaccgcggctccggcgatgtcggccgccggctcggcggctctacctctccgtctacaactgggtcgtcttctccgtctacaacagccgccatcatggagattcttcatgggcttgtagggttggtgaggtctccagtctctgcaactcttccacaaattggatccagattattcctcacgtgaggtgtcttgtggagttttcccgagacccagtcacatcttcttgctactgccctgatcataagctggtctgtcactgagatcatcaggtactctttctttgcaatgaaggaggcatttggatctgcaccttcctggttatcatggctttggtaaatttggatttttcctccgaatctggagagtaatcctaccacctttgccaaggaaatttcccttgaacgtgtttttgcgtactgatcgtctgcacgtacagcagctttatgctgttctatcctacttgtatctctagtgaagttggtctgatctacatggctttgccttacatgaaggtacaccgatcctactagaaaaccgaagaggtatagtatgcatgctgttcacatctcataactaccatttttaaccgttttttcttgtgggaccacaatttcaagcatcggtcttaggccctgtttgggagggcttcacttcaattattacagctttgattttgcagcttcacaatgaaagcctcaacagattagtcagcggtgttcaagagtgtttggtttgcacatacactctaccttttataatacagtaaatttgtgtgatttttccttaaatatccttgatgattagcgggtgaagaaagagatctaaatcgataagtcatgtaatcaatgtcatgttttttttttaaactatagccggtggaggtaaaatagacttgaaattcttgaagtgaagctctccgagccataagatgcgcaacacatggaacttgtcatacgactacttgtacccatctgttcttgccctcctggtttatgttccagttggattgcaaaagaccccttcgctaatcggaacaaaaaaaaatcccgttcgccggctcctcccgtcgtgccctcggatatatggccatcgattctgagttctggccacatcaatccccgggatttagaggctgtttgttcgtggctaaatatgtcacactttgattaagcgcttcaatggcggcgggtgacgacgggtcggcggttcggcggctctacctctccgtgtacaactgggttagcttcttcggatggttgcaggtgctgtaccacgtgaccttggcgctgttgggtagcggccatcaggccgtctacgctgctgtcaaactgccactcctgttctcacaaactgctgccctagcagaggtaaactggtcttaagcctagtcgcatgttttatcgaacgtattaatgtgataattttagcgaagatcacaggtctaggactctaggatttgaaactctctcgtctcgtcgattgttttgaaatggatgtagaggtgtttggtttatcgagactaaattttagtttctctattttatttattttaattcctaaattataaacaaacgtttttgccccgcatcaccctcttgcatgtgcggcagcaggccgtcggctagtagaagacgctacggattaaaatcaagcgaacaggttagacaataatatataggcagttgtgtttcctttatctccacataaacaatggatctaaacattaaatactaaacacagacaaaatccaataaaagcactatgcaaatatttttactggatcagctacataattttgctagaaagattatatgtgtccaaaggggcacacttagaccccaggccatgttcagttattcctacgccacaggggttaaatgagtttggaagattttagtagaacttttaacctaatgtggatttaaacccactcaattccctcccatctatatctattgagatgaaaacgaacaagttctcaatgaaaatccatctgtttgagttattaatacatgtgataacacttttagaaaaaaaaggaaacattgcatctaatatgtgatgatcatcgacatgaccaggcatgtattgg

SEQ ID NO: 71971 - DNA, 2174 bp, Zea Mays
ggcccgccgctgccaaatcgaatcggactccgatccgtgcagcccaccggcgagacggcgagacgccgaagctagcacacttcatgccatctgtctgacgtgatgcgtgtggcctctctgcttttactggatccctagccagctcaggagaaactcagaatagtactatagccaagtccatccagtcctttcgcggcgtcttccttgctcaccgcggctccggcgatgtcggccgccggctcggcggctctacctctccgtctacaactgggtcgtcttctccgtctacaacagccgccatcatggagattcttcatgggcttgtagggttggtgaggtctccagtctctgcaactcttccacaaattggatccagattattcctcacgtgaggtgtcttgtggagttttcccgagacccagtcacatcttcttgctactgccctgatcataagctggtctgtcactgagatcatcaggtactctttctttgcaatgaaggaggcatttggatctgcaccttcctggttatcatggctttggtaaatttggatttttcctccgaatctggagagtaatcctaccacctttgccaaggaaatttcccttgaacgtgtttttgcgtactgatcgtctgcacgtacagcagctttatgctgttctatcctacttgtatctctagtgaagttggtctgatctacatggctttgccttacatgaaggtacaccgatcctactagaaaaccgaagaggtatagtatgcatgctgttcacatctcataactaccatttttaaccgttttttcttgtgggaccacaatttcaagcatcggtcttaggccctgtttgggagggcttcacttcaattattacagctttgattttgcagcttcacaatgaaagcctcaacagattagtcagcggtgttcaagagtgtttggtttgcacatacactctaccttttataatacagtaaatttgtgtgatttttccttaaatatccttgatgattagcgggtgaagaaagagatctaaatcgataagtcatgtaatcaatgtcatgttttttttttaaactatagccggtggaggtaaaatagacttgaaattcttgaagtgaagctctccgagccataagatgcgcaacacatggaacttgtcatacgactacttgtacccatctgttcttgccctcctggtttatgttccagttggattgcaaaagaccccttcgctaatcggaacaaaaaaaaatcccgttcgccggctcctcccgtcgtgccctcggatatatggccatcgattctgagttctggccacatcaatccccgggatttagaggctgtttgttcgtggctaaatatgtcacactttgattaaggccgtcaaagccaccaccttaaagccatgggcagcagcatctcagggtcttcgtcttcctccctgcagcgcttcaatggcggcgggtgacgacgggtcggcggttcggcggctctacctctccgtgtacaactgggttagcttcttcggatggttgcaggtgctgtaccacgtgaccttggcgctgttgggtagcggccatcaggccgtctacgctgctgtcaaactgccactcctgttctcacaaactgctgccctagcagagattcttcattctattacagggctcgtgagatctccaatcagcgcaactcttccacaagttggtgcgaggatatttgttacctggtgcatcgtctggagttttcctgagacacagtcccatgtcctcgttacttccttggtcctaagctggtctatcactgaggtcatcagataccctttctttggcttgagggaggcatttgggatcacaccttcctggctcctatggctcaggtacagcacgttcactgtactctaccctgttgggctgatcagtgagctcggcttaatcttcactgccatgcctcacatgaaggtgagtgagctgaagaaacctgcaggagcccatgcatgctgctcatcagtgtgaggctcatcagctgggcagcgagtttgacctagtcttggcaacaactttgcagggaaggtccttctacatctgcgctgcactgaccactatctacattccaggatcaggatctgacatgacatggcgcgctctgctgcatgctgcttctttttggctctcag

SEQ ID NO: 71972 - DNA, 2263 bp, Zea Mays
ccctcctcgtcattcccgcttttcccatctactacaccttccctttttagcactcccgtgagaatttctggggctgctgccgctggattgggctgaaagatctcggttctatttccgaaagaaggatttctcgtcgcgaatccggatctgtcggtggtgggaagttgcctcttttatgtggcgaggctgtgagaaacccgtgtgcctcccatggacgtgctgagccctgattggcgcaccaggcgagaaaggggcagcaggcagtaggtggtgacagagcaggaagacgagggagaggagacagactgtcggtatagaagacatcaagacaagcaggcgacaataggaaggacaaaggagaaggagaggagggagctctccatgggggagcccctcctcacctccctctccatggaaaacagcaacagccacccctgcacgctcctctccatggaccctgccggttcacgcccggcctctgctgagtcttcgggtggtggcggcgctgccaccaatggggttggcagtggtggtgatagggaactcttcatcgttccacggcgtgagtcggcgcacccaggcccgccagacatcaacctcccgctctctgcagatcccttaccgccacctccgtcgtggagcctcgacacgtttgacatacttgatgtcactcttggaacacacaattatgagtccgaggtcgcgcttacgcttccaaagtcgaccggcaacggcaatggcagtgctactgctactgtcagtgtcggcacgaggaagtgtgctaagagaggagacagcatctggggtgcatggttcttcttcaatcactacttcaagcctgctcttgtggagaagccaaaggggaaggtgacgcgagacgcgtctgggagcatctcgggcttcgacaagtccgatctacgccttgatgtcttcctggtgcagcatgacatggagaacatgtacatgtgggttttcaaggagcggcccgacaatgcccttgggaagatgcagctcaggagcttcatgaatgggcattccaagcacggggagccgtctttcccattcagtgccgataagggcttttccaggtcacaccgcatgcagcgaaagcaataccgggggctttcgaacccgcagtgccttcatgggattgagatcgtgggctcaccgaatttgtcagcagttcctgatgcagacttgaagaggtgggctgaactgacaggcagggaacttaatttttcaataccatctgaagccagcgacttcgaggcatggagaaatcttcccagcactgattttgaacttgacaggccacatccaccggcagcaaagagtgccactcatggatctcatagccataagaagggattgaatggttcaggtcttaacctttcaactccaccatcatcagacgatgggatggacctttcaccaaaatgtgccaaacgccgcaagggtttctttggccatggcgtagaggaggactgtgtgatggcaaacaattcttgttctgacagagagcaagaggtagaagctcacgcgggcgagccatcatggatgcacgagttcaccggtgttgccaagcacgcaagcgggcctgtcactgctgccaagacaatatacgaggacgaggaagggtacctaatcgtggtgagcatgcttttctccgacccgcatagcgtcaaggtgtcctggaggaacacgctcacgcatggcatcgtgaagataacgtgcgtgagcactgcccggatgccctacatcaagagacacgacaggacgttcaagctgacggacccttcccccgagcactgccctcccggcgagtttgtgagggagatacctctggccacaaggattccagaagacgcgaagatcgaggcgtattacgacgagacgggaactggactggaaatcatggtcccaaagcaccgggttggaccggaggagcatgaagttcgggtgtgcatgaggcccccgcatcttggcgacagcgatcttgtgctatcctagaacgaggaaaacaggtagctttcggattttccagtgccatgtttattgccatgagatactcgaacgtaacaggtggtgccatggatcagtgagagccatcatatttgctgctaaacatgtagcttataagttgagaaattcttttcctccataaggccccgttcggttaggctggaataagactaggaactattccaggtgaccaattgttatactgcaaattatacagttattcctgctgggatcctttctg

SEQ ID NO: 71973 - DNA, 2214 bp, Zea Mays
aaatccctagtgataaaaaggaggctgctgccgctggattgggctgaaagatctcggttctatttccgaaagaaggatttctcgtcgcgaatccggatctgtcggtggtgggaagttgcctcttttatgtggcgaggctgtgagaaacccgtgtgcctcccatggacgtgctgagccctgattggcgcaccaggcgagaaaggggcagcaggcagtaggtggtgacagagcaggaagacgagggagaggagacagactgtcggtatagaagacatcaagacaagcaggcgacaataggaaggacaaaggagaaggagaggagggagctctccatgggggagcccctcctcacctccctctccatggaaaacagcaacagccacccctgcacgctcctctccatggaccctgccggttcacgcccggcctctgctgagtcttcgggtggtggcggcgctgccaccaatggggttggcagtggtggtgatagggaactcttcatcgttccacggcgtgagtcggcgcacccaggcccgccagacatcaacctcccgctctctgcagatcccttaccgccacctccgtcgtggagcctcgacacgtttgacatacttgatgtcactcttggaacacacaattatgagtccgaggtcgcgcttacgcttccaaagtcgaccggcaacggcaatggcagtgctactgctactgtcagtgtcggcacgaggaagtgtgctaagagaggagacagcatctggggtgcatggttcttcttcaatcactacttcaagcctgctcttgtggagaagccaaaggggaaggtgacgcgagacgcgtctgggagcatctcgggcttcgacaagtccgatctacgccttgatgtcttcctggtgcagcatgacatggagaacatgtacatgtgggttttcaaggagcggcccgacaatgcccttgggaagatgcagctcaggagcttcatgaatgggcattccaagcacggggagccgtctttcccattcagtgccgataagggcttttccaggtcacaccgcatgcagcgaaagcaataccgggggctttcgaacccgcagtgccttcatgggattgagatcgtgggctcaccgaatttgtcagcagttcctgatgcagacttgaagaggtgggctgaactgacaggcagggaacttaatttttcaataccatctgaagccagcgacttcgaggcatggagaaatcttcccagcactgattttgaacttgacaggccacatccaccggcagcaaagagtgccactcatggatctcatagccataagaagggattgaatggttcaggtcttaacctttcaactccaccatcatcagacgatgggatggacctttcaccaaaatgtgccaaacgccgcaagggtttctttggccatggcgtagaggaggactgtgtgatggcaaacaattcttgttctgacagagagcaagaggtagaagctcacgcgggcgagccatcatggatgcacgagttcaccggtgttgccaagcacgcaagcgggcctgtcactgctgccaagacaatatacgaggacgaggaagggtacctaatcgtggtgagcatgcttttctccgacccgcatagcgtcaaggtgtcctggaggaacacgctcacgcatggcatcgtgaagataacgtgcgtgagcactgcccggatgccctacatcaagagacacgacaggacgttcaagctgacggacccttcccccgagcactgccctcccggcgagtttgtgagggagatacctctggccacaaggattccagaagacgcgaagatcgaggcgtattacgacgagacgggaactggactggaaatcatggtcccaaagcaccgggttggaccggaggagcatgaagttcgggtgtgcatgaggcccccgcatcttggcgacagcgatcttgtgctatcctagaacgaggaaaacaggtagctttcggattttccagtgccatgtttattgccatgagatactcgaacgtaacaggtggtgccatggatcagtgagagccatcatatttgctgctaaacatgtagcttataagttgagaaattcttttcctccataaggccccgttcggttaggctggaataagactaggaactattccaggtgaccaattgttatactgcaaattatacagttattcctgctgggatcctttctg

SEQ ID NO: 71974 - DNA, 1971 bp, Zea Mays
cccacctccacctcctcctccaacgacaacctccacctcgccttcaactcctccacgctcccgtcctctccacctctcgctcccacctcccccgccgtcaccaccaccaccacagcctctcccccgcaacgcgttccttcccggtgcatgaaaccctaaacctataccccactcccctccccgagccatcctctccccccgcggcgatggccaaggcgctgctctactcctccctcctccccgggctgccccgcgctgtcgggagcagccggagcgctgccgcgaggctgctgctgctcccgcctctccggctgcggcgctctacacgctcgccgacgcagcggtagccgcggcggacgccgccgcgggcgcgggggacgacgccggccaagctgcggcggcggtccagaagaacggcggctggttcggcttcatctccgaggccctcgaggtcgttctcaaggtgctcaaggatggtctctcagcagttcatgtgccgtactcctacggatttgccatcattcttcttactatcattgttaaggctgcgacattgcctttaaccaaaaagcaggtggaatcaactatggcaatgcagaatttacagccgcagcttaaagcaatccagcagagatatgcgggcaaccaggaaaggatacagctagagactgctcggttatacaggcaagctggtgtcaaccctttagcaggatgttttccaacattggcaacaatacctgtatggattggtctttaccaggcactttcaaatgtagcaaatgagaaggatttttctggattccatcactgggtggtcctacaacaattgcagctcggcaaagtggtgctgggatttcgtggctcttcccatttgtggatggccatcctccgctaggctggtatgacacgatatgctaccttgtattgcctgtgctacttgttgcttctcaatatgtctctatggagatcatgaagccacctcagagtgatgacccgtcacagaagaacacactcctcgttttgaaatttcttccatttatgattggctatttctctttgtcagtgccatcaggattgtctatttattggttcacaaacaatgtcctcagcacagcacagcaggtttggttgcggaaaatgggaggagccaagcctgtagtgagtgagggggataggaggataattacagcaggacgagcaaaacgctctaatgctcaaccagctggagaaaggtttaggcagctaaaagaagaggagagcatgagaaaagtcaacaaagcactcgctgcaggagactcaaatgcatcgtcatcaacgtatgacatggaggatgaagagtcggatgacgagaccacagaagagggagggcccgtggaggaagcatccagtactggcagtgacaagaagcctccaagttactcagggaagaagggcaaaagatccaagaggaagcgcatggtgcagtgatcgtcacagctcaatcggatgcgattttcgccacaactggttgattcagttgaccagttaggtgccgcagtggatcacggagacagttttggcggtctgctggagccctatatttggggtgcagacaaaatgaacagcttccggggtcacaggtatttgctgctaagcttatgcaaatggaggtagctgagtatatatgctaggcctgagggtgagtgatggaccggagaacaggagtcgggtacgcgtgcaagcagagagacagggtctgtagaagtagataaggtgtaatctctcgtcaagctgggttccagaatctggattgtcctcaccattcgtatgcattgcattgtatttgctttcctcttgtaacctaatgaaccactgttttggagggtatgatcgcgcaagctgacaaccatccagtcgtatacaaatgagttcgaattcgtcttgtcagaactcgttaagagaatgaacttgcgcgagattttttgcatcgca

SEQ ID NO: 71975 - DNA, 1937 bp, Zea Mays
aacgacaacctccacctcgccttcaactcctccacgctcccgtcctctccacctctcgctcccacctcccccgccgtcaccaccaccaccacagcctctcccccgcaacgcgttccttcccggtgcatgaaaccctaaacctataccccactcccctccccgagccatcctctccccccgcggcgatggccaaggcgctgctctactcctccctcctccccgggctgccccgcgctgtcgggagcagccggagcgctgccgcgaggctgctgctgctcccgcctctccggctgcggcgctctacacgctcgccgacgcagcggtagccgcggcggacgccgccgcgggcgcgggggacgacgccggccaagctgcggcggcggtccagaagaacggcggctggttcggcttcatctccgaggccctcgaggtcgttctcaaggtgctcaaggatggtctctcagcagttcatgtgccgtactcctacggatttgccatcattcttcttactatcattgttaaggctgcgacattgcctttaaccaaaaagcaggtggaatcaactatggcaatgcagaatttacagccgcagcttaaagcaatccagcagagatatgcgggcaaccaggaaaggatacagctagagactgctcggttatacaggatgttttccaacattggcaacaatacctgtatggattggtctttaccaggcactttcaaatgtagcaaatgaggggctattgacagaaggatttttctggattccatcactgggtggtcctacaacaattgcagctcggcaaagtggtgctgggatttcgtggctcttcccatttgtggatggccatcctccgctaggctggtatgacacgatatgctaccttgtattgcctgtgctacttgttgcttctcaatatgtctctatggagatcatgaagccacctcagagtgatgacccgtcacagaagaacacactcctcgttttgaaatttcttccatttatgattggctatttctctttgtcagtgccatcaggattgtctatttattggttcacaaacaatgtcctcagcacagcacagcaggtttggttgcggaaaatgggaggagccaagcctgtagtgagtgagggggataggaggataattacagcaggacgagcaaaacgctctaatgctcaaccagctggagaaaggtttaggcagctaaaagaagaggagagcatgagaaaagtcaacaaagcactcgctgcaggagactcaaatgcatcgtcatcaacgtatgacatggaggatgaagagtcggatgacgagaccacagaagagggagggcccgtggaggaagcatccagtactggcagtgacaagaagcctccaagttactcagggaagaagggcaaaagatccaagaggaagcgcatggtgcagtgatcgtcacagctcaatcggatgcgattttcgccacaactggttgattcagttgaccagttaggtgccgcagtggatcacggagacagttttggcggtctgctggagccctatatttggggtgcagacaaaatgaacagcttccggggtcacaggtatttgctgctaagcttatgcaaatggaggtagctgagtatatatgctaggcctgagggtgagtgatggaccggagaacaggagtcgggtacgcgtgcaagcagagagacagggtctgtagaagtagataaggtgtaatctctcgtcaagctgggttccagaatctggattgtcctcaccattcgtatgcattgcattgtatttgctttcctcttgtaacctaatgaaccactgttttggagggtatgatcgcgcaagctgacaaccatccagtcgtatacaaatgagttcgaattcgtcttgtcagaactcgttaagagaatgaacttgcgcgagattttttgcatcgca

SEQ ID NO: 71976 - DNA, 6041 bp, Zea Mays
cttctctggacgtctggtgggctatgtacggaacacttcagcatgcgacctctcctgcagcgggccggcccatttctacacaccagtccatcccgctttctgttcagagatctcggacgttggacctgaggcccgagccgggtagccgagcaaagcgagagctcccctctccctgtctcctcgtctgtgactgtgcgccgccatcgcccgtcgaccagcgccgtccgcccgctcgaaaactgagacgcacgctgcccgcgcatcgccgtggcctgctccagtctgtggaaaagtgacgaaccaactcggggaattctactctcgaggccgccacctccgcctccgcctccagccctccaccgactactgtctggaactggaagtgtaccactactattcaattggccctagccctcgcatagcacgatgccgccgccgctgcttgagttcgcgatcctcgccactgcctgcaggttcagcaagccccttaccgttctcaggaggcttggcgttcttggcccaccaaccgttcgacgcaatgccgcagaggcgttcgtgccttcaccgtttcgccaggttgtcgttcagagtggaaagcttcttgggacaccaaggttctgccacaccactgccggcatgtcagaatgtctcccggacgtctacgccagtcaggtactgaaggttctcaagtccaccagtgctgacaacacggatctcagcggtgctcttcatcagttcgcggtccacatggatgaggatattatcctcatggtcctccagaagcagcggtccaactggcaggtcgccctggcattcttcaactgggcggcaaccctgccggggtatgcccacgggtcaagggcctacaccgagatgctggacattcttgggcggatgaagaaggtcagacacatgaggcagctgtttgacgagattcctgaggagcgacgtcaggtggtcgtgacgaataagatgtttgccgtgctgttgaaccggtacgctggtgcgcacaaggtgcaggaggcgatagaggtgttctacttgaggaaggattacgggtttgagcttgacttggtcgggttccagatactactgatgtcgctgtgcaggtataagcatgtcgaggaggcggaggcgctgttccgtgagaagaaagatgagttcccgcatgtcacaaagagctggaacattatactaaatggttggtgtgtcaagggaagcctgagggacgctcaaaggatttggaatgatatcattgcatctaaggttgaacgagacctattcacctttggtacgttcataaacgcattggccaaaaatggcagaattagtgccgcggtgaagctgttcaaacagatgtgggagaaagggatcaatcctgatgttgcgatttgcaattgtatcatcgaccagctgtgcttcaagaaaaagattccagaagcacttgagatttttggtgagatgaatgaccggctttgtcaagccgatgtggctacctacaacactttgataaaatacatgtgtaagataaaaaggatggagaaagtttatgaacttttggatgacatggaagcaaagggctgccctccaaacaataggacatactcctacattctgaagacgactgagaaacccaaagatgtcattgccttgatgcagaggatggagcgaaccggctgcaaattggattctgatatatacaacttgatattgaacctttatatcaaatggaaatatgagaaggggatgcaacagatatgggatgagatggagagaagagggtcaggcccagatcagcggtcgtttactattatggttcatggtcttcattcccaaggcaagctcgatgaggctctgcagtattacacaacaatgaagtctagagggatgattccagaacctaggaccaagatactggtgaaagctatgcacatgaagaaggacggggctgccactgaagatgactcggcaagtttatgggttgaaagaaagaaaaacagttcttttttctatgggtgtctaaatcacaatggctgcaccttgggctaaaaagaatcatcagcatagattcattggcaatatgatttctcagtaacttttgctcagactttcagtgccaggatcatcagtcagctgtgaaaacgttttcctagcaggtgaaattgggagttcaaggtgcgtaccgatatccaaatttatttaatgtgttgcgcaagaaacaaacaaatgtggtgggagcacttaaattctacaccttttaatgtggaatggcaaagttttatttattagattaaacaaggatatggatatttttatctagaacctaaataaaaacggcttgttctctatgaggtccatgtgttactgtttttgctacttcaaacactcgtttgccagtgcgctgaaatgtgattctgtagggctacaaaattggaacactatgttcgtacacacatttccacttttgggtactctagtattcactctcagtacatatagattagagtaccaaaacaaagccgtatacacggtctcaggcttcttacacagttacctagatgcagtaggtttaggcatcatttgcggtgtggaagtttaagaatgcggaagaagccgtgatttatcgactccggcatggacattgttgttttgctattccggtgcttcaaatgtaaacatatgcagactgttaaaggagtgacaatgattttgagtcactcatctaacttaatgaacaatctccacagaaaggagtgatgtattatgtttttcacttagattccttcataataatttgcgtagcaactaactgaactactaagcacaagatttattaactaacagtaagatgattcagctgaagcgtattttaagcaagagatgtttctgctactcgagttctgtgacaagagatctggcaaacttgcagtaggaatctctgatatcatgcatttggatggctgcgacctgtatcggcgtcctctctcttggctgcttctttgagcaagaaactccgagagcgacgacagaaaccaagcagttctcagtttcagctgtggcgacatggttggtgtttgtgtgcaaccacatttttgcatcggctatctcccagattctctctgggagagcatcctctgaaaacctgtgcaagtccaatgatcctctgaacatctcatcagttgggctccttcccgtgaacatctcaagcaacagtatgcccacgctataaacatctccaagagtcgaaacacaagacccttcaccgtactctgttatatatattacggaaaaaagaatcgatcaaaaaccaaccagttttatacaagaaacaaggaacaatgaatagaaacccaaacacacgtatagtttcagtcacctggagcaacgtagccgatggagcctcttattccagctgtgctgcttgaattctgcagggtgttacttcttgcaatctctggaaggatccttgatatgccaaagtctccgacccgggcactcatgtcctgtgcgagaaggatgttgcttggcttgagatcgcagtgaacgattggtggctgacagtggttgtgaaggtaatccagaccgtccatgacatctacagcaacgttgagcctctgtacgatgctaagagtgttactcactgtgggcatgctgctagtgctaggttttggatgaagccagtcacctaggctaccatttggcatgaactcaaaaaccagagccttgaactcccggccctggcggtcgatgctcgagcaacacgtgatgatcttcatgaggcaacggtgacgcacccttcgcagcgcctcgcactcggccacaaagcttctactagatccagattgctcgaggtcgaaaaccttgaccgcggcaagagtagtcccctcctcgtcttgaaaggagcatctatagactgtcccaaagcttcctctaccgagcaagttggtctctgaaaacccgccggttccgttttctaatgcatggtaagaaaccttttcgtactgttcctcgatcattggtggccggaacgagctctgcttgaccctttgtcgtctgcgcttccagtagatcaacccaaagacaagtgccataaaggccagaaacaggaacgctgatgttgttgctagagctatcgtaagagacttgacccgcctcttcttgcttcctttcttcagagagttcttgcggcatggctgtaaacgaagctgaggtatgccgccacaaagcccactgttcccggcgactgaaaagtttcgggaaatcctgaatattcctccctctggcacttggccttgtagactgttgaaggacagatctaactctgacagtgatgtcaagttctgcaacgacgttgggatcggccctgacaagttgttgtgtgctagatccagttgctgaaggttgcgaatggcaccgatgccttctggaatagtgccggatagcttgttcatggacaggttgagtgcgagtagatccgtcatattcttgagagactggggtatctccccctccaatgagttatcctccaaccaaagcccctgcagcatgatgcactccccgatgctgtcaggtagctcgccggatagctggtttccagatagatccatgctgttaaggttcaccaagctaccgacttgaggaggaagagggcctgacagcgagttagacgacaagtccaagtacttggagaggagtggcagttcgaaaacctctgcggggatcgaactgttgagacggttattagctagatcaagggatattaggttcttcagctgtccgaagctcgttggaattgcgccctccaggttggcatgctgcgcgtacagctcaatcaacctcgagaggtttccgatggatgtcggtatgaggcctgacacctgagtgttgtacagacctaaccgagccaagtttcctagcttgcccatgctgtccggaagcacgccggagacggacgtgaaccccagaccgaggagttcaaggctggccaggttgccgatggctgaggggatgcttccggatatcccgtcgttgtattctaaacggaggatctgcagggccgtcgtcgagaggttgcctaccgaacctggcagccgccctgtgaagctgttgtcggcgatgtttagatcctggagctgggtacagtttgacagggaagccatgaattcccacccgtttctgtcgtctgcttccagctcgttttggaacaagtacaggagctgcagacctctgagtctccccagcgccggaggcacgcgcccgtggagcatgtttacagagagctcgacccgctggagcgtcgtgaggttagtgagcgaagcggggatggatcccgtgaactggttccaagagaggctaaggatcgacatgctgggaaatctgctgccgatctcggcggggatggtaccattgagcttgttcgcttggatctgcagtctttccagcgacgacaggttgtacagagagcgtgggggctcgccggagaggtagttgaaggcgaggtcaagtctcgtgaggcctacgatgctgccgaggctacgagggatggcgccctgtagctggttgaatgcgagggacatgacacgaagcgacgacaggttgcctatggactccggtacggtgccagtgaggttgtttcgaaacagtatgagctcctcgaggcgtgcgagcttgttgccgagctcagagggcaggcctccgcggaggtggttggactggaggcgcaagtccaccaggctggtgcatgagcttaggttggcggcggagagcttaccggagaaggcgttgtagcttaggtcaagcgcacggaggtggcgcaggcggccgaggctcgcggggatggcgccgctgagggcgttggagctcaggttgagaagcctcagggacgaaaggttaccaaccgccggggagaggacgccggtgagcccgcgagagggtaggaacagcgccaccactcgacgccgcctgccgctgcctcggcacctcaccccttcccagctgcagtacccgccgccgccgcctgcgctaccgttccacgaggcaag

SEQ ID NO: 71977 - DNA, 5796 bp, Zea Mays
cttctctggacgtctggtgggctatgtacggaacacttcagcatgcgacctctcctgcagcgggccggcccatttctacacaccagtccatcccgctttctgttcagagatctcggacgttggacctgaggcccgagccgggtagccgagcaaagcgagagctcccctctccctgtctcctcgtctgtgactgtgcgccgccatcgcccgtcgaccagcgccgtccgcccgctcgaaaactgagacgcacgctgcccgcgcatcgccgtggcctgctccagtctgtggaaaagtgacgaaccaactcggggaattctactctcgaggccgccacctccgcctccgcctccagccctccaccgactactgtctggaactggaagtgtaccactactattcaattggccctagccctcgcatagcacgatgccgccgccgctgcttgagttcgcgatcctcgccactgcctgcaggttcagcaagccccttaccgttctcaggaggcttggcgttcttggcccaccaaccgttcgacgcaatgccgcagaggcgttcgtgccttcaccgtttcgccaggttgtcgttcagagtggaaagcttcttgggacaccaaggttctgccacaccactgccggcatgtcagaatgtctcccggacgtctacgccagtcaggtactgaaggttctcaagtccaccagtgctgacaacacggatctcagcggtgctcttcatcagttcgcggtccacatggatgaggatattatcctcatggtcctccagaagcagcggtccaactggcaggtcgccctggcattcttcaactgggcggcaaccctgccggggtatgcccacgggtcaagggcctacaccgagatgctggacattcttgggcggatgaagaaggtcagacacatgaggcagctgtttgacgagattcctgaggagcgacgtcaggtggtcgtgacgaataagatgtttgccgtgctgttgaaccggtacgctggtgcgcacaaggtgcaggaggcgatagaggtgttctacttgaggaaggattacgggtttgagcttgacttggtcgggttccagatactactgatgtcgctgtgcaggtataagcatgtcgaggaggcggaggcgctgttccgtgagaagaaagatgagttcccgcatgtcacaaagagctggaacattatactaaatggttggtgtgtcaagggaagcctgagggacgctcaaaggatttggaatgatatcattgcatctaaggttgaacgagacctattcacctttggtacgttcataaacgcattggccaaaaatggcagaattagtgccgcggtgaagctgttcaaacagatgtgggagaaagggatcaatcctgatgttgcgatttgcaattgtatcatcgaccagctgtgcttcaagaaaaagattccagaagcacttgagatttttggtgagatgaatgaccggctttgtcaagccgatgtggctacctacaacactttgataaaatacatgtgtaagataaaaaggatggagaaagtttatgaacttttggatgacatggaagcaaagggctgccctccaaacaataggacatactcctacattctgaagacgactgagaaacccaaagatgtcattgccttgatgcagaggatggagcgaaccggctgcaaattggattctgatatatacaacttgatattgaacctttatatcaaatggaaatatgagaaggggatgcaacagatatgggatgagatggagagaagagggtcaggcccagatcagcggtcgtttactattatggttcatggtcttcattcccaaggcaagctcgatgaggctctgcagtattacacaacaatgaagtctagagggatgattccagaacctaggaccaagatactggtgaaagctatgcacatgaagaaggacggggctgccactgaagatgactcggcaagtttatgggttgaaagaaagaaaaacagttcttttttctatgggtgtctaaatcacaatggctgcaccttgggctaaaaagaatcatcagcatagattcattggcaatatgatttctcagtaacttttgctcagactttcagtgccaggatcatcagtcagctgtgaaaacgttttcctagcaggtgaaattgggagttcaagggctacaaaattggaacactatgttcgtacacacatttccacttttgggtactctagtattcactctcagtacatatagattagagtaccaaaacaaagccgtatacacggtctcaggcttcttacacagttacctagatgcagtaggtttaggcatcatttgcggtgtggaagtttaagaatgcggaagaagccgtgatttatcgactccggcatggacattgttgttttgctattccggtgcttcaaatgtaaacatatgcagactgttaaaggagtgacaatgattttgagtcactcatctaacttaatgaacaatctccacagaaaggagtgatgtattatgtttttcacttagattccttcataataatttgcgtagcaactaactgaactactaagcacaagatttattaactaacagtaagatgattcagctgaagcgtattttaagcaagagatgtttctgctactcgagttctgtgacaagagatctggcaaacttgcagtaggaatctctgatatcatgcatttggatggctgcgacctgtatcggcgtcctctctcttggctgcttctttgagcaagaaactccgagagcgacgacagaaaccaagcagttctcagtttcagctgtggcgacatggttggtgtttgtgtgcaaccacatttttgcatcggctatctcccagattctctctgggagagcatcctctgaaaacctgtgcaagtccaatgatcctctgaacatctcatcagttgggctccttcccgtgaacatctcaagcaacagtatgcccacgctataaacatctccaagagtcgaaacacaagacccttcaccgtactctgttatatatattacggaaaaaagaatcgatcaaaaaccaaccagttttatacaagaaacaaggaacaatgaatagaaacccaaacacacgtatagtttcagtcacctggagcaacgtagccgatggagcctcttattccagctgtgctgcttgaattctgcagggtgttacttcttgcaatctctggaaggatccttgatatgccaaagtctccgacccgggcactcatgtcctgtgcgagaaggatgttgcttggcttgagatcgcagtgaacgattggtggctgacagtggttgtgaaggtaatccagaccgtccatgacatctacagcaacgttgagcctctgtacgatgctaagagtgttactcactgtgggcatgctgctagtgctaggttttggatgaagccagtcacctaggctaccatttggcatgaactcaaaaaccagagccttgaactcccggccctggcggtcgatgctcgagcaacacgtgatgatcttcatgaggcaacggtgacgcacccttcgcagcgcctcgcactcggccacaaagcttctactagatccagattgctcgaggtcgaaaaccttgaccgcggcaagagtagtcccctcctcgtcttgaaaggagcatctatagactgtcccaaagcttcctctaccgagcaagttggtctctgaaaacccgccggttccgttttctaatgcatggtaagaaaccttttcgtactgttcctcgatcattggtggccggaacgagctctgcttgaccctttgtcgtctgcgcttccagtagatcaacccaaagacaagtgccataaaggccagaaacaggaacgctgatgttgttgctagagctatcgtaagagacttgacccgcctcttcttgcttcctttcttcagagagttcttgcggcatggctgtaaacgaagctgaggtatgccgccacaaagcccactgttcccggcgactgaaaagtttcgggaaatcctgaatattcctccctctggcacttggccttgtagactgttgaaggacagatctaactctgacagtgatgtcaagttctgcaacgacgttgggatcggccctgacaagttgttgtgtgctagatccagttgctgaaggttgcgaatggcaccgatgccttctggaatagtgccggatagcttgttcatggacaggttgagtgcgagtagatccgtcatattcttgagagactggggtatctccccctccaatgagttatcctccaaccaaagcccctgcagcatgatgcactccccgatgctgtcaggtagctcgccggatagctggtttccagatagatccatgctgttaaggttcaccaagctaccgacttgaggaggaagagggcctgacagcgagttagacgacaagtccaagtacttggagaggagtggcagttcgaaaacctctgcggggatcgaactgttgagacggttattagctagatcaagggatattaggttcttcagctgtccgaagctcgttggaattgcgccctccaggttggcatgctgcgcgtacagctcaatcaacctcgagaggtttccgatggatgtcggtatgaggcctgacacctgagtgttgtacagacctaaccgagccaagtttcctagcttgcccatgctgtccggaagcacgccggagacggacgtgaaccccagaccgaggagttcaaggctggccaggttgccgatggctgaggggatgcttccggatatcccgtcgttgtattctaaacggaggatctgcagggccgtcgtcgagaggttgcctaccgaacctggcagccgccctgtgaagctgttgtcggcgatgtttagatcctggagctgggtacagtttgacagggaagccatgaattcccacccgtttctgtcgtctgcttccagctcgttttggaacaagtacaggagctgcagacctctgagtctccccagcgccggaggcacgcgcccgtggagcatgtttacagagagctcgacccgctggagcgtcgtgaggttagtgagcgaagcggggatggatcccgtgaactggttccaagagaggctaaggatcgacatgctgggaaatctgctgccgatctcggcggggatggtaccattgagcttgttcgcttggatctgcagtctttccagcgacgacaggttgtacagagagcgtgggggctcgccggagaggtagttgaaggcgaggtcaagtctcgtgaggcctacgatgctgccgaggctacgagggatggcgccctgtagctggttgaatgcgagggacatgacacgaagcgacgacaggttgcctatggactccggtacggtgccagtgaggttgtttcgaaacagtatgagctcctcgaggcgtgcgagcttgttgccgagctcagagggcaggcctccgcggaggtggttggactggaggcgcaagtccaccaggctggtgcatgagcttaggttggcggcggagagcttaccggagaaggcgttgtagcttaggtcaagcgcacggaggtggcgcaggcggccgaggctcgcggggatggcgccgctgagggcgttggagctcaggttgagaagcctcagggacgaaaggttaccaaccgccggggagaggacgccggtgagcccgcgagagggtaggaacagcgccaccactcgacgccgcctgccgctgcctcggcacctcaccccttcccagctgcagtacccgccgccgccgcctgcgctaccgttccacgaggcaag

SEQ ID NO: 71978 - DNA, 2422 bp, Zea Mays
cttctctggacgtctggtgggctatgtacggaacacttcagcatgcgacctctcctgcagcgggccggcccatttctacacaccagtccatcccgctttctgttcagagatctcggacgttggacctgaggcccgagccgggtagccgagcaaagcgagagctcccctctccctgtctcctcgtctgtgactgtgcgccgccatcgcccgtcgaccagcgccgtccgcccgctcgaaaactgagacgcacgctgcccgcgcatcgccgtggcctgctccagtctgtggaaaagtgacgaaccaactcggggaattctactctcgaggccgccacctccgcctccgcctccagccctccaccgactactgtctggaactggaagtgtaccactactattcaattggccctagccctcgcatagcacgatgccgccgccgctgcttgagttcgcgatcctcgccactgcctgcaggttcagcaagccccttaccgttctcaggaggcttggcgttcttggcccaccaaccgttcgacgcaatgccgcagaggcgttcgtgccttcaccgtttcgccaggttgtcgttcagagtggaaagcttcttgggacaccaaggttctgccacaccactgccggcatgtcagaatgtctcccggacgtctacgccagtcaggtactgaaggttctcaagtccaccagtgctgacaacacggatctcagcggtgctcttcatcagttcgcggtccacatggatgaggatattatcctcatggtcctccagaagcagcggtccaactggcaggtcgccctggcattcttcaactgggcggcaaccctgccggggtatgcccacgggtcaagggcctacaccgagatgctggacattcttgggcggatgaagaaggtcagacacatgaggcagctgtttgacgagattcctgaggagcgacgtcaggtggtcgtgacgaataagatgtttgccgtgctgttgaaccggtacgctggtgcgcacaaggtgcaggaggcgatagaggtgttctacttgaggaaggattacgggtttgagcttgacttggtcgggttccagatactactgatgtcgctgtgcaggtataagcatgtcgaggaggcggaggcgctgttccgtgagaagaaagatgagttcccgcatgtcacaaagagctggaacattatactaaatggttggtgtgtcaagggaagcctgagggacgctcaaaggatttggaatgatatcattgcatctaaggttgaacgagacctattcacctttggtacgttcataaacgcattggccaaaaatggcagaattagtgccgcggtgaagctgttcaaacagatgtgggagaaagggatcaatcctgatgttgcgatttgcaattgtatcatcgaccagctgtgcttcaagaaaaagattccagaagcacttgagatttttggtgagatgaatgaccggctttgtcaagccgatgtggctacctacaacactttgataaaatacatgtgtaagataaaaaggatggagaaagtttatgaacttttggatgacatggaagcaaagggctgccctccaaacaataggacatactcctacattctgaagacgactgagaaacccaaagatgtcattgccttgatgcagaggatggagcgaaccggctgcaaattggattctgatatatacaacttgatattgaacctttatatcaaatggaaatatgagaaggggatgcaacagatatgggatgagatggagagaagagggtcaggcccagatcagcggtcgtttactattatggttcatggtcttcattcccaaggcaagctcgatgaggctctgcagtattacacaacaatgaagtctagagggatgattccagaacctaggaccaagatactggtgaaagctatgcacatgaagaaggacggggctgccactgaagatgactcggcaagtttatgggttgaaagaaagaaaaacagttcttttttctatgggtgtctaaatcacaatggctgcaccttgggctaaaaagaatcatcagcatagattcattggcaatatgatttctcagtaacttttgctcagactttcagtgccaggatcatcagtcagctgtgaaaacgttttcctagcaggtgaaattgggagttcaagaccaacaagactggacaggatatcatgcatggccactaatgaattatcgatgaagctcttgatcgacaccaaagaggctcagaaagtctgctttgctgaggctgggaacgacgttgtcgtgttcctctccacgctcttgtgcctccctgtgactgtgagcaccataatcagcttggttaccaaggagcgaatggtagttacctattaaagctactgaacggatcaagggcaaatcagctataatctc

SEQ ID NO: 71979 - DNA, 909 bp, Zea Mays
gtagatttttttttatatatatagcgggtctaaaatgtattttttcttatagcgggcctagaacgtgttgacccacaatagagaaaggcaccactgccgtttccgtcccgtttgcttacgtcaccaagccgccgagaaccagagacagacagagaagaaaaactgcagccgccgagctcagcctcagccgccgcgacggggacagggaaagatggccgacggcagtgcctccgcctcgccgccttccgtttctccgcaccagtaccaccgcgacgccatcaagtcctcagtgcgtaatacagctgctaataggaggagggaacatgccattgcaatagggaaagaaagaagggaagccttgatgcgtgcaaagcgtgtatgccgagctcctctttctggcagtgatgaggctgcaggagaagagggtgacatggttgttgatgaggagaaagcagatcttgagactagaacgactcaggctgttgaggagctgaaatctgctttgtcaagccagggaaaaggtgcacagaataggaagacagaagtgcttcgtgctttaaggcgtttgttgtcccagtctgaagtacctccagttgatgcagcaattaaagctggagcagtccctctattagtgcagtctctgtcatttggatcgccagatgaacaattgctagaggcagcttggtgccttacaaacatagcggcagggaaacctgaggaaactaaatccttacttcctgctctaccattgctcattgctcaccttggtgagaacagctctacacttgtcgcggaacaatgtgcatgggccattggtaatgttgctggtgaaggagcagagctgagaaacacattacttgctcaagttgtctctttaccaagagcattctagtagttagaagagataag

SEQ ID NO: 71980 - DNA, 3047 bp, Zea Mays
ccctcctgagctggcgtggcggttctgttgctcccggaaccaggagcgtgcgtaatacagctgctaataggaggagggaacatgccattgcaatagggaaagaaagaagggaagccttgatgcgtgcaaagcgtgtatgccgagctcctctttctggcagtgatgaggctgcaggagaagagggtgacatggttgttgatgaggagaaagcagatcttgagactagaacgactcaggctgttgaggagctgaaatctgctttgtcaagccagggaaaaggtgcacagaataggaagacagaagtgcttcgtgctttaaggcgtttgttgtcccagtctgaagtacctccagttgatgcagcaattaaagctggagcagtccctctattagtgcagtctctgtcatttggatcgccagatgaacaattgctagaggcagcttggtgccttacaaacatagcggcagggaaacctgaggaaactaaatccttacttcctgctctaccattgctcattgctcaccttggtgagaacagctctacacttgtcgcggaacaatgtgcatgggccattggtaatgttgctggtgaaggagcagagctgagaaacacattacttgctcaaggtgctttgtggcctcttgcccgtttaatgctgtcaaataagggttccacaacaaggactgctgcttgggcattgtcaaatctcatcaaggggcctgattccaaggctgcgaatgaacttattggtatcgacggcatactgaatgcaatcattcggaacttggaaaaggcggatgaagaacttgtaactgaggtggcatgggtggttgtctatctttcagcactttcagaaaaagctaccagcctaatagtacttcgcggtttaggaaatcttgtagccggtgatggttacatggttgattcagtccttattgttggaaacagtgtaacagatcaagccttatcaagtcttatcaagtgtttgaagagcgaccatagggttctcaagaaggaggcatcatgggccatgtcaaatatagcagcgggcagttttgagcataagaaactgatatttggtagtgaggcgactcctttgctgatgcacctcctcaggactgcacagtttgacatccgcagggaagcagcatacacgctgggcaacctgtgtgttgtcccagcaggcagtggtaaccccccaactataatcgttgagcatttagttgccatcgtagatggtggagcccttccaggatttataaatttggtgaggtcggccgatatagagagtgcgagacttgggcttcagttcctggaactggtgatgagaggataccctgacagccagggcccaaagctcgtggagacagaggacggcattgaggccatggagaggttccagttccatgagaacgagatgatgaggaatatggcgaatggtttggttgataaatactttggcgaagactatggcctgtgagttgtgccgccgatacatctgggtaaacgtggagctatttgtgggtttgaaatgtaacgatcctggaacagaaggatgcgccgttcatcatggtttccatgtaatttagcccctaatatatagctggaaatgtgaatgtgttgaaactgaccgtgagctggagatgttaagtgtggataccttagatagacatagactgacatcttgcacagtgcttcctctatctcaaaatattttttcgtctcgtattttaagtgtggaaatgttggagatgctcttagagtacaaatatatgactgattaatctgatgatgtttataatgtaccataaaaactagtgttttttggtatatatttggtctaaattgagattgtttaaactcctcgaaatatgatatggagacttattttgggattgagggagtatgaaataaataaccctgctgttctctttctatagcaaccatttgacaatccaaatttgaaatttgaacagattgcggcaacacctagttgtaagggtgtatgtcctgcaattgcgatggtcaaccgctaaaacactttctgttagtggcctaatggccgtatgatttctaaagaagacgtatcagtatcaccgttgttgcagtagcatgacaaattctagcaccaaccaaacccatttatcagctaaaaaaaccctggtgggctataggactaggaggcagcagcagtggttttgatctcgtctcttgctcgcatttcgtcgagcacgtccctggcgggcggtgagaccgtggtctcccattccgcgaagtcctcctccacctccgccgcctcctcctggaagcccagccgcttcatcccccgcgccatcaccctgtacacgtacgcgtccacgttgaggcctcccttcctgacggccgcctcgtacaccctccacgccgcgcggcccctgcccttggccaccagcgcgcgcagcagcctcgtgagcttgtacacgtcctcctccccgtccacgaacccgccgccgctcgccttctcctccaggaacgcctccacgagcgcgtcaacggcggcctcggcgtctccctcgccgccggagggcgagtgcggcgcggaggacacgaaggtggcgtacagcgccgggtctgggcggtaccagggctcggcgcgggcgatgtggagcgcggcgagggcgagggaccagtggccctgccgctggagctcggccatggcggccacgaggtcggccttgaggaggcggcccagggcggtggctgctgcggccgaggcagccgccggcgagcggtcggcggaggtgaggcgcttcagggattggatcgccaggatggcctccgtggagagggagcggccgcgctggaggggcccgcggttgtcgcgcggcccgcaggtgatggacacgggcctaggcttgtgaccggcactgggtcctgggttggaacatgggctccgggtgaggcgcgggaccaagaggagagacgccattggagcggaagcagggaagccacgaagcggtaggagaaagagaacagaggaagtcagtggatgctgcggattttgggttcc

SEQ ID NO: 71981 - DNA, 2743 bp, Zea Mays
cttattgttccatatctctaccagtacaactaaactgagtaaagtttggttgctagaggcagcttggtgccttacaaacatagcggcagggaaacctgaggaaactaaatccttacttcctgctctaccattgctcattgctcaccttggtgagaacagctctacacttgtcgcggaacaatgtgcatgggccattggtaatgttgctggtgaaggagcagagctgagaaacacattacttgctcaaggtgctttgtggcctcttgcccgtttaatgctgtcaaataagggttccacaacaaggactgctgcttgggcattgtcaaatctcatcaaggggcctgattccaaggctgcgaatgaacttattggtatcgacggcatactgaatgcaatcattcggaacttggaaaaggcggatgaagaacttgtaactgaggtggcatgggtggttgtctatctttcagcactttcagaaaaagctaccagcctaatagtaagaagttcgatgccacagttgctgatcgggcgccttctagcatctgaaaacttgcagttgctcattccggtacttcgcggtttaggaaatcttgtagccggtgatggttacatggttgattcagtccttattgttggaaacagtgtaacagatcaagccttatcaagtcttatcaagtgtttgaagagcgaccatagggttctcaagaaggaggcatcatgggccatgtcaaatatagcagcgggcagttttgagcataagaaactgatatttggtagtgaggcgactcctttgctgatgcacctcctcaggactgcacagtttgacatccgcagggaagcagcatacacgctgggcaacctgtgtgttgtcccagcaggcagtggtaaccccccaactataatcgttgagcatttagttgccatcgtagatggtggagcccttccaggatttataaatttggtgaggtcggccgatatagagagtgcgagacttgggcttcagttcctggaactggtgatgagaggataccctgacagccagggcccaaagctcgtggagacagaggacggcattgaggccatggagaggttccagttccatgagaacgagatgatgaggaatatggcgaatggtttggttgataaatactttggcgaagactatggcctgtgagttgtgccgccgatacatctgggtaaacgtggagctatttgtgggtttgaaatgtaacgatcctggaacagaaggatgcgccgttcatcatggtttccatgtaatttagcccctaatatatagctggaaatgtgaatgtgttgaaactgaccgtgagctggagatgttaagtgtggataccttagatagacatagactgacatcttgcacagtgcttcctctatctcaaaatattttttcgtctcgtattttaagtgtggaaatgttggagatgctcttagagtacaaatatatgactgattaatctgatgatgtttataatgtaccataaaaactagtgttttttggtatatatttggtctaaattgagattgtttaaactcctcgaaatatgatatggagacttattttgggattgagggagtatgaaataaataaccctgctgttctctttctatagcaaccatttgacaatccaaatttgaaatttgaacagattgcggcaacacctagttgtaagggtgtatgtcctgcaattgcgatggtcaaccgctaaaacactttctgttagtggcctaatggccgtatgatttctaaagaagacgtatcagtatcaccgttgttgcagtagcatgacaaattctagcaccaaccaaacccatttatcagctaaaaaaaccctggtgggctataggactaggaggcagcagcagtggttttgatctcgtctcttgctcgcatttcgtcgagcacgtccctggcgggcggtgagaccgtggtctcccattccgcgaagtcctcctccacctccgccgcctcctcctggaagcccagccgcttcatcccccgcgccatcaccctgtacacgtacgcgtccacgttgaggcctcccttcctgacggccgcctcgtacaccctccacgccgcgcggcccctgcccttggccaccagcgcgcgcagcagcctcgtgagcttgtacacgtcctcctccccgtccacgaacccgccgccgctcgccttctcctccaggaacgcctccacgagcgcgtcaacggcggcctcggcgtctccctcgccgccggagggcgagtgcggcgcggaggacacgaaggtggcgtacagcgccgggtctgggcggtaccagggctcggcgcgggcgatgtggagcgcggcgagggcgagggaccagtggccctgccgctggagctcggccatggcggccacgaggtcggccttgaggaggcggcccagggcggtggctgctgcggccgaggcagccgccggcgagcggtcggcggaggtgaggcgcttcagggattggatcgccaggatggcctccgtggagagggagcggccgcgctggaggggcccgcggttgtcgcgcggcccgcaggtgatggacacgggcctaggcttgtgaccggcactgggtcctgggttggaacatgggctccgggtgaggcgcgggaccaagaggagagacgccattggagcggaagcagggaagccacgaagcggtaggagaaagagaacagaggaagtcagtggatgctgcggattttgggttcc

SEQ ID NO: 71982 - DNA, 2474 bp, Zea Mays
gtcaaaccatcatccaatgtttcaccaagtttgttgaaaagaacatgaatgtttacaataccaaagaggggcctgattccaaggctgcgaatgaacttattggtatcgacggcatactgaatgcaatcattcggaacttggaaaaggcggatgaagaacttgtaactgaggtggcatgggtggttgtctatctttcagcactttcagaaaaagctaccagcctaatagtaagaagttcgatgccacagttgctgatcgggcgccttctagcatctgaaaacttgcagttgctcattccggtacttcgcggtttaggaaatcttgtagccggtgatggttacatggttgattcagtccttattgttggaaacagtgtaacagatcaagccttatcaagtcttatcaagtgtttgaagagcgaccatagggttctcaagaaggaggcatcatgggccatgtcaaatatagcagcgggcagttttgagcataagaaactgatatttggtagtgaggcgactcctttgctgatgcacctcctcaggactgcacagtttgacatccgcagggaagcagcatacacgctgggcaacctgtgtgttgtcccagcaggcagtggtaaccccccaactataatcgttgagcatttagttgccatcgtagatggtggagcccttccaggatttataaatttggtgaggtcggccgatatagagagtgcgagacttgggcttcagttcctggaactggtgatgagaggataccctgacagccagggcccaaagctcgtggagacagaggacggcattgaggccatggagaggttccagttccatgagaacgagatgatgaggaatatggcgaatggtttggttgataaatactttggcgaagactatggcctgtgagttgtgccgccgatacatctgggtaaacgtggagctatttgtgggtttgaaatgtaacgatcctggaacagaaggatgcgccgttcatcatggtttccatgtaatttagcccctaatatatagctggaaatgtgaatgtgttgaaactgaccgtgagctggagatgttaagtgtggataccttagatagacatagactgacatcttgcacagtgcttcctctatctcaaaatattttttcgtctcgtattttaagtgtggaaatgttggagatgctcttagagtacaaatatatgactgattaatctgatgatgtttataatgtaccataaaaactagtgttttttggtatatatttggtctaaattgagattgtttaaactcctcgaaatatgatatggagacttattttgggattgagggagtatgaaataaataaccctgctgttctctttctatagcaaccatttgacaatccaaatttgaaatttgaacagattgcggcaacacctagttgtaagggtgtatgtcctgcaattgcgatggtcaaccgctaaaacactttctgttagtggcctaatggccgtatgatttctaaagaagacgtatcagtatcaccgttgttgcagtagcatgacaaattctagcaccaaccaaacccatttatcagctaaaaaaaccctggtgggctataggactaggaggcagcagcagtggttttgatctcgtctcttgctcgcatttcgtcgagcacgtccctggcgggcggtgagaccgtggtctcccattccgcgaagtcctcctccacctccgccgcctcctcctggaagcccagccgcttcatcccccgcgccatcaccctgtacacgtacgcgtccacgttgaggcctcccttcctgacggccgcctcgtacaccctccacgccgcgcggcccctgcccttggccaccagcgcgcgcagcagcctcgtgagcttgtacacgtcctcctccccgtccacgaacccgccgccgctcgccttctcctccaggaacgcctccacgagcgcgtcaacggcggcctcggcgtctccctcgccgccggagggcgagtgcggcgcggaggacacgaaggtggcgtacagcgccgggtctgggcggtaccagggctcggcgcgggcgatgtggagcgcggcgagggcgagggaccagtggccctgccgctggagctcggccatggcggccacgaggtcggccttgaggaggcggcccagggcggtggctgctgcggccgaggcagccgccggcgagcggtcggcggaggtgaggcgcttcagggattggatcgccaggatggcctccgtggagagggagcggccgcgctggaggggcccgcggttgtcgcgcggcccgcaggtgatggacacgggcctaggcttgtgaccggcactgggtcctgggttggaacatgggctccgggtgaggcgcgggaccaagaggagagacgccattggagcggaagcagggaagccacgaagcggtaggagaaagagaacagaggaagtcagtggatgctgcggattttgggttcc

SEQ ID NO: 71983 - DNA, 2133 bp, Zea Mays
ctccccaaaattctcatctagtcaccggccattcggttgtgtccattggctgtcagtcacttccagtcctagccaactcctccgatgctccaatcatcaacactctctacctgtgtccgtgtgctctgctactctgcaccaccaaccaaccagtgctgccctccgccgatccactgacctaccgcgagcgccaatggcgaccgccgcggtcctggccgccacattagcgctgttcctccgcgccgccgccgcaacggccgcgacggctgcggcggaggcggaccggatcggcaggctgcctggccagccgccggtcaacttctccatgtactccggctacgtcaccgtggacgcggcggcggggcgggccctcttctactggttcatcgaggcggccggcgtgcccgcggagtccgcgccgctcgtgctgtggctcaacggcgggcccgggtgctcctccgtcggctacggcgcgtcagaggagctcggcgccttccggatcaacgccgacggcaggacgctctacttgaacccctacccctggaataaagtggcgaacatgctgttcttggactcgccggccggcgtcggctactcatactccaactccacctccgatctgtacactgctggtgacaacaagacagcccatgactcgtacaatttcttggtgaactggctggagcggttcccacaatacaagcatcgcgatttctacatcacaggagagagctacgcaggccactacgtgcctcagttgtctcagctagtctaccggaacaacaaaggcatcgagaagccgatcctaaacttcaaaggcttcatggttggaaatgcggtaattgacgattaccacgacttcatcggcacattcgagtacttgtggacgcacgggctgatctctgacgaaacctacgagaagctgcggcttgcctgccagttcgacgtatctgagcatgcgtccaaggagtgcaacaaggtcttcgacatcgccgaggccgaggaaggcaatatcgatgcgtacagcatctacacgccgacttgcaagaagacttcactccacaagcgcaggctaatcagaggaagaacgccctggttgcccagagggtacgatccctgcacggagaagtactccacgaagtactacaacttacctgaggtgcagagagctctgcatgccaatgtcaccggaataccgtatccctggtgacccagtgtatgatttttggaaagattcaccgaggtccatgcttcctatctaccgtgaactcatcgccgcgggcataaggatatgggttttcagtggcgacgctgattccgttgtcccgctcaccgcgacaaggtactccattgacgccctctttctaccgactatcacgaactggtatccttggtacgacgacgaagaggtcggtgggtggtgccaggtgtacgaggggctgacactggtgacggtccgaggcgcagggcacgaggttcccctgcaccggccgcggcagggcctgaagctgttcgagcacttcctgcggggtgagcccatgcccaggcctgtagatagcgtccagtcgttttagaactggttgctgtctccccgcttggtgaaggaggagacctggctgcgctgcgcattcttgttgctgtaaactcatccgttgccacattttactggccaacgtggtttgcttgttcaataatcaacattaggccagccgtcacactccgctgttaggatagactttgctgaaaatcagaacgtaatgttgctcgtttcagtgagcagattgggtatttagcaatgtctcgttttgacagtaaaccatgcttcagtttttgtgattttttttttccggtagaaggacgtttttttttgtttctgattctgtttttttttttggtttttttgggagagagataagatgagatcctgtacagtcagctccgtcactgacgtgtgggtccaaccccacacgttagtaacgaagttacggtgctgcggtcaacgtcatgtcgaaatttactgcaaacaggatagaccatgatcttaggtgtaaacgagtcttttatttatctttagaccatgatctaactatagatttgttaggttttttataaagttgcatgagctggtttaac

SEQ ID NO: 71984 - DNA, 1602 bp, Zea Mays
ggagaatctactagccagcggctgagggtggccagcgggatggcgtgcagagttgcaccgatgctgcacgaaattgcactgccgagttgcacagagagccagcaggagctccacagccgcctcttctagagcgacatgtccaacgccgagtactgtggtcgcctcaaacgccttgcctacaccctctacgactgcggcgccgccgtcaccgattcagcgcccgttatcagcatgcttcctggcctaaacagcaagttcgctcaagctatcgcagtgatctccactgtgacgccgctgtccaccttcctctaccacaaatggcattcccttcgggtcttcctctgttattcccagtccatgtggattggagaataaactaccggatgtttaggccacgaaggttggtctaaacatcagatattttttgcggatataaggtttgatccacctgttcgttttttgctgaaactcacctagaaatcgttccagttgatcagaccttatatgaattattagataaacaatccggttaggaattgtttcgggtgaccaattctcaggaaccaaacaggccttaggtgagattataaggaattatgacttgctagttcaatccacatgaattgagattaacaggtggacaattttgatacgcttcgatcgagcctgtcttgtattagctcattatccgaagcatcctcaaagctctacaccagttgccaggtcttgcttgctatctctgctagctgtccacatcacctcacgtttctgggacttctcccacttcttcaccagatgtttagatcacctgaattctttgtccggcggcgacggcaatcgtgactgacgcggcagtgtttcagtctgctgggcatcacaccaatctacaagctataaaaactcacaatttgcatggcgccttgttgctgttattggtctggtaacatatatagcctctctctccacagaaagaattagtaaattctattaaaaagaaggatgtaaagagttccaaccccaaaaaaaaaaattagattgtaataaagctactattcatgttacgtgctacagtaatcgctcgatgtaaatataacatttttccttttcgtatatggtccatctattctgcttgtgcttatcctttggtatcgcgtacatatgtttattctgcgggacagtcaattcactgatcgaccgttagataaaacaacagaaacacttcacagttttttttagttctgagaggcggctgtaggtaggtaggtagctagacgaaacttacttacctcagttcctacacaattcaagttggtcagtaaaggctgcagccatccttatcagaaggggtgctccttcccgtcccatgaaactgaacgatttaacatttgaaatttgtcacacagagaggtgggtggtgctgacctgagaccccgggcctgttgtcaatcagaagcgcagcagatgtcatcattcttctcgtaggggcacgcaggtcttttgtcctcaacattgatctgcgtgataaattatgtatgatggagtacatgttactgtaagaggggaaaaaaagattccatatattcgacaaaacatgagttcctc

SEQ ID NO: 71985 - DNA, 6064 bp, Zea Mays
attttttctattttttattagtcaagattttaatctatatctctttcaaatgaacatagggtaaaatcaccctagatcatcaccctagatcgtaggagtgtccacttaaattgatcatatagatacattgatttttattggttcgtttaattgagccacttgcaaaaacgataataccatttcaaaagctcaatggactcaaaaggaatataggaaaagtttaaaacccttttttcgcacggacactagtgtcaatgtttcgtgggccggctgatcgtctttcggcctggtgggagcgttcgtttcgttggcccgtgccggcgtgccctccggtcctcttctcgttctcccccgagcggctctcgatctggtttgctccgcgtcgtcgctccctggacgtcgccgccctagtggttcgcttcgccgcttctcgcgctctccggcttctacgctggtggtcggttgttcgagagcggctccggcgggcggcgtagatcggcggtccaggtggtgtattagacatgtctttcaggaagcgccaaccttccagtaacggagcttccattaatttagctcccctgggttttccaagtcaggaacttgagaaggttaatcctgtaaattcagtgatgtcaaccgattttgaatccatggatggtgttgatattgatatgagggaagtttactttctcattatgcattttttatctcatggtccattcaaacggacctttggagaattgtgcaatgaactcctagaacatcaactgctacctagaagataccatgcttggtattcacgtggtggtttccatagtggcgaagaaaatgatgatggcatatcactccctttggattatgtaaagctagctgagaggtacccccacattggtaaagaccacttggtgaagctattaaagcaactgatggctagttcttatcacccacacaacttgattggaagagtttctccaaatgctgctgatgtcccaacacttcttggctccaactccttttcacttcttccatctgacaggcaagataagggaactcccaggctgccaagttatcttcgttggcctcacattcagactgatcaagttcatggtctaagtttgagagagataggtggtttcactaagcattgtcgagctccctctgtacgtgcatcttgctatgccatcgcgaagccatccacccttgttgaaaagatgcaaatcataaagagattgagggggcatcaaaatgctgtgtattgtgctacctttgatcgcacagggcgttatgttattactggttctgatgaccgccttgttaaaatatgggcgatggaaacagcgttctgcctggctagctgccggggccatgaaggtgatattaccgatcttgcagtgagttccaataattctgtggtagcatcttcatctaatgatttcattattagagtgtggcgtatgcctgatggaatgccagtctcagtgctcaaggggcatacaggggcagttactgctattgcatttagtccaaggccaggtgctgctttccagctgttgtcgtcatcagatgatgggacatgcaggatttgggatgccagatactctcaacaacctccaagactgtatacaccaaagcccccagatgttgcccctggtaagagtggtgatgcatcttccagcgccgctcaagttcagccaacaaatcaccagatcttatgttgtgcatttaatgctaatggaaccgtgtttgtcactggcagctcggacacttatgcaagggtctggaatgcttgcaagagttcttctgatgaacatgagcaaccgattcatgagatggatctattatgtgggcatgaaaatgatgtaaactatgtgcagtttagtggatgtgcagttgcatcaagatctttttcatctgattccagtcatacctctaaggaagaaaatagcctgaagttaagaaattcttggttcacgcataatattgttacctgctcccgtgatggcagtgcaattatatgggttccacgatctcggaggtcacatggaaagattggacgttggacgcgtgcttaccatcttaaagttcccccacctccaatggctcctcaaccacctcgaggtggtcctcgtcaaagataccagccaactcctcgtggtgtcaatatgatagtttggagtctggacaaccgctttgtgcttgctgctatcatggattgcagaatttgcgtatggaatgcttctgatgggagcttggtgcattcactgattggccataaggaatcaacgtttgtgctagatgtgcatccgttcaatcctcgtatagcaatgagtgctggatatgatgggaagacgatcatctgggatatatgggaagggaaacctgttcagatctatgaaacaggacaatttaaactagttgatgggaagttctctccggatggtacatcacttattttatcagatgaagttgggcgagtattcattattggaactgggcaaggagagtcccagaaagatgcaaaatatgatcagttcttccttggagactatcggcctctcattcgtgataccaatggaagtgtcattgatcaggaaacacagcttgcaccatacaggagaaatatgcaagaccttttgtgcgacgctggtatgataccatatccagagcccttccagagtatgtaccagaaacgccggttgggtacccttggtctcgagtggcggcctccctctgtaaattttgctgttggccccacttacaatgcaacaactggtgaataccaaactatcccaattattgatccggataggtgggaaccgcttccagagataacagatttcattgagcttgaacctgaaaatgaagttatctctgacgatactgattctgagtacaatggcatggatgagtattcaagtgaaggagaacaggatattatgagtggtgattcttcaggtacttcatattcgagtggagaaattgatgcagataaccctgatagtgctcatctccgccgatcaagaagaaagaagaaaaaatctgaggctgatcttgttacttcatctggtcggcgagtcattaggaaaagatttttggatgatcctggtgtagccacagtgtcaaggccacatagaggaaggaaatctaggaatggatgttctagtaaaaagaaaagatcccctaaatccaggggtttgcgacctcggagacgtgctgctgaaaccgcattaattactttcccaaagaaaggagtttcaacagaagaggatgaagatgactccgagagtttctcagatagtgaattgaacacggatagcactgaagctgaacagttagaatggagtggtcagttaagaactagaagagagattaactccccatttgacatcgatgatgttacagatccttctcagtttactgataataaggaaaattctggaactggtaagaaactagttctcagaataccacgacgtgatttaagaactcaatttcctttaggaagcggaaaagcagaatgctccatacaggataaagcagtgaagtctctttctctagctaatcatgaaccagttgagcacgaactgactattgaaccaggacattcccctgcctccaaggctgaattaacaattgatggtgatctgcatgatagttctgctgtttgcagtaataactcaattaggtggggtgaggttaagatgcgatcctcaaagcgttgcaagtacagtgagccagctggaggtttgtggtcctcttcaaataacgttgctttgcaggatatcgagggatcgagcagtcagcagatacctcatgaatatggcgatggcatccagccaagtgttgtgcaaaacgtacaagaagtgcaacatggaacaattctagataacattccggaaaacaacagtactgatgaacacactagagaaaattttggggatttagaaaagatagctaacaatattaatgctcatgcagacggagtgaatgacactgtacaagttcccaatacttctcagcctcaactaaaagttaagtttaagtcaagaggctctgcagatgcagtaggaaatatcatgaactccaagcatgtcaaagattcagtgcagtgtggcgatgattcttccatcaatcaaccaagaaatgctgacttctatattgtgcccaaaagttctcaggaatgcctagataaaagcactagtttgcatgattcaaaaaaaccgtacttggatgcttcaaagaagtacactgcagtgtacaaaaggtcaaagcgaaagaacaagaaaaaaatggattcagatgaatgtccgaacgaggatagcacttctatctccaatgacgatggtggataccaacctgcagaatacagtcctgttgcagctgcaagcagtagattgagaagaagtgctaggaagtcatttgcatacaatatcaatggtacaacacaggatgatatctcggaagtgaaagtttcttacggttcccatgaagcatcaactagtggaagacgagttgtcacagatgtgcgtgaagggatgtggcgacaaaactcaagaagtgttggtttaaggtctgctaggaacaaaagagaaagtaacagcttccttgatacacatccattgggtagaaggcaccaggtttcttttaagtattcatggttaatgttgcttgagcatgaagatagctaccgttatattcctcaactcgatgatgaggttatgtacttggggcagggccatgaggaatatcttaaacaagtgcaatcatctgaattttgcccttggaaccggataaaaggacttaaagctgtagaactttgcaaaatacagggtcttgattatgccacctacagaggatctggtgaaagctgctgtaaattaaccattgaatttgttgattgcacgtccagtggatttggcaaaacatttatgatcacgttgcgtgagctggtcaactttccagattttcttgtggagagaacaaggtacgaagctgctatggagcggaactggacccacagagacaagtgcaaagtctggtggagggacgaagaaggacaggtaggaggaacttggtgggagggacgggtgatggcagtaacacctaaatcacctgattttcctgagagtccatgggaaaaatatgtcatacagtataaggaggatggttctgatcacgctcatagcccctgggaacttcatgagacaggcagtttatgggatccatggaaacatccacatatggatctcacggttcgagataaattgttatcagaaatggaaaatttacaggaaatgtcacacagggatcaggatcattatggtgtttttaaactggacaaggttgcagaaaagtcagatttcatcaacaggtttcctgttcaattttctattgaggtgatcaaggcaagattagcgaacaaatattacagaactctgggggctgtcagacatgataccactgtgatgctttcaaatgcagaatcttacttttcaaagagcagtgaaatgaccaaaaagatccgcaagctctctgagttgctcgaccagatcttttcatcactgtagggaacattgcttgatgcctgattgacaatttcccttttcgtttctgcaaaaaaaatttggccttaggcatcgagatgatttttactggtcctactgaggcattagagaattagccaaagtagttctcaggacagaaagggtttccggtgtagctccaaccagttaaactagttgctgatacaaagtgctcgttgctaacacatttgaccgtttgatctgttgtcaagatacaatggttcatcctattggacatgaaatattggggttttgttagagaagatgccaaggtgtaaatctggtggaggaaatgcattaactgataatttcattttgtacagacaccctcagcaataaaaggaaaaaaagaaatgtgcaacgttgtctattacattttggggtgacacatggtaactataatataggaaattagtggcacttttttcagcgtgcccaggcacgtattttatgttttttttatgacatcttttttggtcgca

SEQ ID NO: 71986 - DNA, 5930 bp, Zea Mays
gcaaaaacgataataccatttcaaaagctcaatggactcaaaaggaatataggaaaagtttaaaacccttttttcgcacggacactagtgtcaatgtttcgtgggccggctgatcgtctttcggcctggtgggagcgttcgtttcgttggcccgtgccggcgtgccctccggtcctcttctcgttctcccccgagcggctctcgatctggtttgctccgcgtcgtcgctccctggacgtcgccgccctagtggttcgcttcgccgcttctcgcgctctccggcttctacgctggtggtcggttgttcgagagcggctccggcgggcggcgtagatcggcggtccaggtggtgtattagacatgtctttcaggaagcgccaaccttccagtaacggagcttccattaatttagctcccctgggttttccaagtcaggaacttgagaaggttaatcctgtaaattcagtgatgtcaaccgattttgaatccatggatggtgttgatattgatatgagggaagtttactttctcattatgcattttttatctcatggtccattcaaacggacctttggagaattgtgcaatgaactcctagaacatcaactgctacctagaagataccatgcttggtattcacgtggtggtttccatagtggcgaagaaaatgatgatggcatatcactccctttggattatgtaaagctagctgagaggtacccccacattggtaaagaccacttggtgaagctattaaagcaactgatggctagttcttatcacccacacaacttgattggaagagtttctccaaatgctgctgatgtcccaacacttcttggctccaactccttttcacttcttccatctgacaggcaagataagggaactcccaggctgccaagttatcttcgttggcctcacattcagactgatcaagttcatggtctaagtttgagagagataggtggtttcactaagcattgtcgagctccctctgtacgtgcatcttgctatgccatcgcgaagccatccacccttgttgaaaagatgcaaatcataaagagattgagggggcatcaaaatgctgtgtattgtgctacctttgatcgcacagggcgttatgttattactggttctgatgaccgccttgttaaaatatgggcgatggaaacagcgttctgcctggctagctgccggggccatgaaggtgatattaccgatcttgcagtgagttccaataattctgtggtagcatcttcatctaatgatttcattattagagtgtggcgtatgcctgatggaatgccagtctcagtgctcaaggggcatacaggggcagttactgctattgcatttagtccaaggccaggtgctgctttccagctgttgtcgtcatcagatgatgggacatgcaggatttgggatgccagatactctcaacaacctccaagactgtatacaccaaagcccccagatgttgcccctggtaagagtggtgatgcatcttccagcgccgctcaagttcagccaacaaatcaccagatcttatgttgtgcatttaatgctaatggaaccgtgtttgtcactggcagctcggacacttatgcaagggtctggaatgcttgcaagagttcttctgatgaacatgagcaaccgattcatgagatggatctattatgtgggcatgaaaatgatgtaaactatgtgcagtttagtggatgtgcagttgcatcaagatctttttcatctgattccagtcatacctctaaggaagaaaatagcctgaagttaagaaattcttggttcacgcataatattgttacctgctcccgtgatggcagtgcaattatatgggttccacgatctcggaggtcacatggaaagattggacgttggacgcgtgcttaccatcttaaagttcccccacctccaatggctcctcaaccacctcgaggtggtcctcgtcaaagataccagccaactcctcgtggtgtcaatatgatagtttggagtctggacaaccgctttgtgcttgctgctatcatggattgcagaatttgcgtatggaatgcttctgatgggagcttggtgcattcactgattggccataaggaatcaacgtttgtgctagatgtgcatccgttcaatcctcgtatagcaatgagtgctggatatgatgggaagacgatcatctgggatatatgggaagggaaacctgttcagatctatgaaacaggacaatttaaactagttgatgggaagttctctccggatggtacatcacttattttatcagatgaagttgggcgagtattcattattggaactgggcaaggagagtcccagaaagatgcaaaatatgatcagttcttccttggagactatcggcctctcattcgtgataccaatggaagtgtcattgatcagctgttcccttctgcttcatatatgtaggaaacacagcttgcaccatacaggagaaatatgcaagaccttttgtgcgacgctggtatgataccatatccagagcccttccagagtatgtaccagaaacgccggttgggtacccttggtctcgagtggcggcctccctctgtaaattttgctgttggccccacttacaatgcaacaactggtgaataccaaactatcccaattattgatccggataggtgggaaccgcttccagagataacagatttcattgagcttgaacctgaaaatgaagttatctctgacgatactgattctgagtacaatggcatggatgagtattcaagtgaaggagaacaggatattatgagtggtgattcttcaggtacttcatattcgagtggagaaattgatgcagataaccctgatagtgctcatctccgccgatcaagaagaaagaagaaaaaatctgaggctgatcttgttacttcatctggtcggcgagtcattaggaaaagatttttggatgatcctggtgtagccacagtgtcaaggccacatagaggaaggaaatctaggaatggatgttctagtaaaaagaaaagatcccctaaatccaggggtttgcgacctcggagacgtgctgctgaaaccgcattaattactttcccaaagaaaggagtttcaacagaagaggatgaagatgactccgagagtttctcagatagtgaattgaacacggatagcactgaagctgaacagttagaatggagtggtcagttaagaactagaagagagattaactccccatttgacatcgatgatgttacagatccttctcagtttactgataataaggaaaattctggaactggtaagaaactagttctcagaataccacgacgtgatttaagaactcaatttcctttaggaagcggaaaagcagaatgctccatacaggataaagcagtgaagtctctttctctagctaatcatgaaccagttgagcacgaactgactattgaaccaggacattcccctgcctccaaggctgaattaacaattgatggtgatctgcatgatagttctgctgtttgcagtaataactcaattaggtggggtgaggttaagatgcgatcctcaaagcgttgcaagtacagtgagccagctggaggtttgtggtcctcttcaaataacgttgctttgcaggatatcgagggatcgagcagtcagcagatacctcatgaatatggcgatggcatccagccaagtgttgtgcaaaacgtacaagaagtgcaacatggaacaattctagataacattccggaaaacaacagtactgatgaacacactagagaaaattttggggatttagaaaagatagctaacaatattaatgctcatgcagacggagtgaatgacactgtacaagttcccaatacttctcagcctcaactaaaagttaagtttaagtcaagaggctctgcagatgcagtaggaaatatcatgaactccaagcatgtcaaagattcagtgcagtgtggcgatgattcttccatcaatcaaccaagaaatgctgacttctatattgtgcccaaaagttctcaggaatgcctagataaaagcactagtttgcatgattcaaaaaaaccgtacttggatgcttcaaagaagtacactgcagtgtacaaaaggtcaaagcgaaagaacaagaaaaaaatggattcagatgaatgtccgaacgaggatagcacttctatctccaatgacgatggtggataccaacctgcagaatacagtcctgttgcagctgcaagcagtagattgagaagaagtgctaggaagtcatttgcatacaatatcaatggtacaacacaggatgatatctcggaagtgaaagtttcttacggttcccatgaagcatcaactagtggaagacgagttgtcacagatgtgcgtgaagggatgtggcgacaaaactcaagaagtgttggtttaaggtctgctaggaacaaaagagaaagtaacagcttccttgatacacatccattgggtagaaggcaccaggtttcttttaagtattcatggttaatgttgcttgagcatgaagatagctaccgttatattcctcaactcgatgatgaggttatgtacttggggcagggccatgaggaatatcttaaacaagtgcaatcatctgaattttgcccttggaaccggataaaaggacttaaagctgtagaactttgcaaaatacagggtcttgattatgccacctacagaggatctggtgaaagctgctgtaaattaaccattgaatttgttgattgcacgtccagtggatttggcaaaacatttatgatcacgttgcgtgagctggtcaactttccagattttcttgtggagagaacaaggtacgaagctgctatggagcggaactggacccacagagacaagtgcaaagtctggtggagggacgaagaaggacaggtaggaggaacttggtgggagggacgggtgatggcagtaacacctaaatcacctgattttcctgagagtccatgggaaaaatatgtcatacagtataaggaggatggttctgatcacgctcatagcccctgggaacttcatgagacaggcagtttatgggatccatggaaacatccacatatggatctcacggttcgagataaattgttatcagaaatggaaaatttacaggaaatgtcacacagggatcaggatcattatggtgtttttaaactggacaaggttgcagaaaagtcagatttcatcaacaggtttcctgttcaattttctattgaggtgatcaaggcaagattagcgaacaaatattacagaactctgggggctgtcagacatgataccactgtgatgctttcaaatgcagaatcttacttttcaaagagcagtgaaatgaccaaaaagatccgcaagctctctgagttgctcgaccagatcttttcatcactgtagggaacattgcttgatgcctgattgacaatttcccttttcgtttctgcaaaaaaaatttggccttaggcatcgagatgatttttactggtcctactgaggcattagagaattagccaaagtagttctcaggacagaaagggtttccggtgtagctccaaccagttaaactagttgctgatacaaagtgctcgttgctaacacatttgaccgtttgatctgttgtcaagatacaatggttcatcctattggacatgaaatattggggttttgttagagaagatgccaaggtgtaaatctggtggaggaaatgcattaactgataatttcattttgtacagacaccctcagcaataaaaggaaaaaaagaaatgtgcaacgttgtctattacattttggggtgacacatggtaactataatataggaaattagtggcacttttttcagcgtgcccaggcacgtattttatgttttttttatgacatcttttttggtcgca

SEQ ID NO: 71987 - DNA, 5765 bp, Zea Mays
ggctgatcgtctttcggcctggtgggagcgttcgtttcgttggcccgtgccggcgtgccctccggtcctcttctcgttctcccccgagcggctctcgatctggtttgctccgcgtcgtcgctccctggacgtcgccgccctagtggttcgcttcgccgcttctcgcgctctccggcttctacgctggtggtcggttgttcgagagcggctccggcgggcggcgtagatcggcggtccaggtggtgtattagacatgtctttcaggaagcgccaaccttccagtaacggagcttccattaatttagctcccctgggttttccaagtcaggaacttgagaaggttaatcctgtaaattcagtgatgtcaaccgattttgaatccatggatggtgttgatattgatatgagggaagtttactttctcattatgcattttttatctcatggtccattcaaacggacctttggagaattgtgcaatgaactcctagaacatcaactgctacctagaagataccatgcttggtattcacgtggtggtttccatagtggcgaagaaaatgatgatggcatatcactccctttggattatgtaaagctagctgagaggtacccccacattggtaaagaccacttggtgaagctattaaagcaactgatggctagttcttatcacccacacaacttgattggaagagtttctccaaatgctgctgatgtcccaacacttcttggctccaactccttttcacttcttccatctgacaggcaagataagggaactcccaggctgccaagttatcttcgttggcctcacattcagactgatcaagttcatggtctaagtttgagagagataggtggtttcactaagcattgtcgagctccctctgtacgtgcatcttgctatgccatcgcgaagccatccacccttgttgaaaagatgcaaatcataaagagattgagggggcatcaaaatgctgtgtattgtgctacctttgatcgcacagggcgttatgttattactggttctgatgaccgccttgttaaaatatgggcgatggaaacagcgttctgcctggctagctgccggggccatgaaggtgatattaccgatcttgcagtgagttccaataattctgtggtagcatcttcatctaatgatttcattattagagtgtgctcaaggggcatacaggggcagttactgctattgcatttagtccaaggccaggtgctgctttccagctgttgtcgtcatcagatgatgggacatgcaggatttgggatgccagatactctcaacaacctccaagactgtatacaccaaagcccccagatgttgcccctggtaagagtggtgatgcatcttccagcgccgctcaagttcagccaacaaatcaccagatcttatgttgtgcatttaatgctaatggaaccgtgtttgtcactggcagctcggacacttatgcaagggtctggaatgcttgcaagagttcttctgatgaacatgagcaaccgattcatgagatggatctattatgtgggcatgaaaatgatgtaaactatgtgcagtttagtggatgtgcagttgcatcaagatctttttcatctgattccagtcatacctctaaggaagaaaatagcctgaagttaagaaattcttggttcacgcataatattgttacctgctcccgtgatggcagtgcaattatatgggttccacgatctcggaggtcacatggaaagattggacgttggacgcgtgcttaccatcttaaagttcccccacctccaatggctcctcaaccacctcgaggtggtcctcgtcaaagataccagccaactcctcgtggtgtcaatatgatagtttggagtctggacaaccgctttgtgcttgctgctatcatggattgcagaatttgcgtatggaatgcttctgatgggagcttggtgcattcactgattggccataaggaatcaacgtttgtgctagatgtgcatccgttcaatcctcgtatagcaatgagtgctggatatgatgggaagacgatcatctgggatatatgggaagggaaacctgttcagatctatgaaacaggacaatttaaactagttgatgggaagttctctccggatggtacatcacttattttatcagatgaagttgggcgagtattcattattggaactgggcaaggagagtcccagaaagatgcaaaatatgatcagttcttccttggagactatcggcctctcattcgtgataccaatggaagtgtcattgatcaggaaacacagcttgcaccatacaggagaaatatgcaagaccttttgtgcgacgctggtatgataccatatccagagcccttccagagtatgtaccagaaacgccggttgggtacccttggtctcgagtggcggcctccctctgtaaattttgctgttggccccacttacaatgcaacaactggtgaataccaaactatcccaattattgatccggataggtgggaaccgcttccagagataacagatttcattgagcttgaacctgaaaatgaagttatctctgacgatactgattctgagtacaatggcatggatgagtattcaagtgaaggagaacaggatattatgagtggtgattcttcaggtacttcatattcgagtggagaaattgatgcagataaccctgatagtgctcatctccgccgatcaagaagaaagaagaaaaaatctgaggctgatcttgttacttcatctggtcggcgagtcattaggaaaagatttttggatgatcctggtgtagccacagtgtcaaggccacatagaggaaggaaatctaggaatggatgttctagtaaaaagaaaagatcccctaaatccaggggtttgcgacctcggagacgtgctgctgaaaccgcattaattactttcccaaagaaaggagtttcaacagaagaggatgaagatgactccgagagtttctcagatagtgaattgaacacggatagcactgaagctgaacagttagaatggagtggtcagttaagaactagaagagagattaactccccatttgacatcgatgatgttacagatccttctcagtttactgataataaggaaaattctggaactggtaagaaactagttctcagaataccacgacgtgatttaagaactcaatttcctttaggaagcggaaaagcagaatgctccatacaggataaagcagtgaagtctctttctctagctaatcatgaaccagttgagcacgaactgactattgaaccaggacattcccctgcctccaaggctgaattaacaattgatggtgatctgcatgatagttctgctgtttgcagtaataactcaattaggtggggtgaggttaagatgcgatcctcaaagcgttgcaagtacagtgagccagctggaggtttgtggtcctcttcaaataacgttgctttgcaggatatcgagggatcgagcagtcagcagatacctcatgaatatggcgatggcatccagccaagtgttgtgcaaaacgtacaagaagtgcaacatggaacaattctagataacattccggaaaacaacagtactgatgaacacactagagaaaattttggggatttagaaaagatagctaacaatattaatgctcatgcagacggagtgaatgacactgtacaagttcccaatacttctcagcctcaactaaaagttaagtttaagtcaagaggctctgcagatgcagtaggaaatatcatgaactccaagcatgtcaaagattcagtgcagtgtggcgatgattcttccatcaatcaaccaagaaatgctgacttctatattgtgcccaaaagttctcaggaatgcctagataaaagcactagtttgcatgattcaaaaaaaccgtacttggatgcttcaaagaagtacactgcagtgtacaaaaggtcaaagcgaaagaacaagaaaaaaatggattcagatgaatgtccgaacgaggatagcacttctatctccaatgacgatggtggataccaacctgcagaatacagtcctgttgcagctgcaagcagtagattgagaagaagtgctaggaagtcatttgcatacaatatcaatggtacaacacaggatgatatctcggaagtgaaagtttcttacggttcccatgaagcatcaactagtggaagacgagttgtcacagatgtgcgtgaagggatgtggcgacaaaactcaagaagtgttggtttaaggtctgctaggaacaaaagagaaagtaacagcttccttgatacacatccattgggtagaaggcaccaggtttcttttaagtattcatggttaatgttgcttgagcatgaagatagctaccgttatattcctcaactcgatgatgaggttatgtacttggggcagggccatgaggaatatcttaaacaagtgcaatcatctgaattttgcccttggaaccggataaaaggacttaaagctgtagaactttgcaaaatacagggtcttgattatgccacctacagaggatctggtgaaagctgctgtaaattaaccattgaatttgttgattgcacgtccagtggatttggcaaaacatttatgatcacgttgcgtgagctggtcaactttccagattttcttgtggagagaacaaggtacgaagctgctatggagcggaactggacccacagagacaagtgcaaagtctggtggagggacgaagaaggacaggtaggaggaacttggtgggagggacgggtgatggcagtaacacctaaatcacctgattttcctgagagtccatgggaaaaatatgtcatacagtataaggaggatggttctgatcacgctcatagcccctgggaacttcatgagacaggcagtttatgggatccatggaaacatccacatatggatctcacggttcgagataaattgttatcagaaatggaaaatttacaggaaatgtcacacagggatcaggatcattatggtgtttttaaactggacaaggttgcagaaaagtcagatttcatcaacaggtttcctgttcaattttctattgaggtgatcaaggcaagattagcgaacaaatattacagaactctgggggctgtcagacatgataccactgtgatgctttcaaatgcagaatcttacttttcaaagagcagtgaaatgaccaaaaagatccgcaagctctctgagttgctcgaccagatcttttcatcactgtagggaacattgcttgatgcctgattgacaatttcccttttcgtttctgcaaaaaaaatttggccttaggcatcgagatgatttttactggtcctactgaggcattagagaattagccaaagtagttctcaggacagaaagggtttccggtgtagctccaaccagttaaactagttgctgatacaaagtgctcgttgctaacacatttgaccgtttgatctgttgtcaagatacaatggttcatcctattggacatgaaatattggggttttgttagagaagatgccaaggtgtaaatctggtggaggaaatgcattaactgataatttcattttgtacagacaccctcagcaataaaaggaaaaaaagaaatgtgcaacgttgtctattacattttggggtgacacatggtaactataatataggaaattagtggcacttttttcagcgtgcccaggcacgtattttatgttttttttatgacatcttttttggtcgca

SEQ ID NO: 71988 - DNA, 5741 bp, Zea Mays
gttcgtttcgttggcccgtgccggcgtgccctccggtcctcttctcgttctcccccgagcggctctcgatctggtttgctccgcgtcgtcgctccctggacgtcgccgccctagtggttcgcttcgccgcttctcgcgctctccggcttctacgctggtggtcggttgttcgagagcggctccggcgggcggcgtagatcggcggtccaggtggtgtattagacatgtctttcaggaagcgccaaccttccagtaacggagcttccattaatttagctcccctgggttttccaagtcaggaacttgagaaggttaatcctgtaaattcagtgatgtcaaccgattttgaatccatggatggtgttgatattgatatgagggaagtttactttctcattatgcattttttatctcatggtccattcaaacggacctttggagaattgtgcaatgaactcctagaacatcaactgctacctagaagataccatgcttggtattcacgtggtggtttccatagtggcgaagaaaatgatgatggcatatcactccctttggattatgtaaagctagctgagaggtacccccacattggtaaagaccacttggtgaagctattaaagcaactgatggctagttcttatcacccacacaacttgattggaagagtttctccaaatgctgctgatgtcccaacacttcttggctccaactccttttcacttcttccatctgacaggcaagataagggaactcccaggctgccaagttatcttcgttggcctcacattcagactgatcaagttcatggtctaagtttgagagagataggtggtttcactaagcattgtcgagctccctctgtacgtgcatcttgctatgccatcgcgaagccatccacccttgttgaaaagatgcaaatcataaagagattgagggggcatcaaaatgctgtgtattgtgctacctttgatcgcacagggcgttatgttattactggttctgatgaccgccttgttaaaatatgggcgatggaaacagcgttctgcctggctagctgccggggccatgaaggtgatattaccgatcttgcagtgagttccaataattctgtggtagcatcttcatctaatgatttcattattagagtgtggcgtatgcctgatggaatgccagtctcagtgctcaaggggcatacaggggcagttactgctattgcatttagtccaaggccaggtgctgctttccagctgttgtcgtcatcagatgatgggacatgcaggatttgggatgccagatactctcaacaacctccaagactgtatacaccaaagcccccagatgttgcccctggtaagagtggtgatgcatcttccagcgccgctcaagttcagccaacaaatcaccagatcttatgttgtgcatttaatgctaatggaaccgtgtttgtcactggcagctcggacacttatgcaagggtctggaatgcttgcaagagttcttctgatgaacatgagcaaccgattcatgagatggatctattatgtgggcatgaaaatgatgtaaactatgtgcagtttagtggatgtgcagttgcatcaagatctttttcatctgattccagtcatacctctaaggaagaaaatagcctgaagttaagaaattcttggttcacgcataatattgttacctgctcccgtgatggcagtgcaattatatgggttccacgatctcggaggtcacatggaaagattggacgttggacgcgtgcttaccatcttaaagttcccccacctccaatggctcctcaaccacctcgaggtggtcctcgtcaaagataccagccaactcctcgtggtgtcaatatgatagtttggagtctggacaaccgctttgtgcttgctgctatcatggattgcagaatttgcgtatggaatgcttctgatgggagcttggtgcattcactgattggccataaggaatcaacgtttgtgctagatgtgcatccgttcaatcctcgtatagcaatgagtgctggatatgatgggaagacgatcatctgggatatatgggaagggaaacctgttcagatctatgaaacaggacaatttaaactagttgatgggaagttctctccatgaagttgggcgagtattcattattggaactgggcaaggagagtcccagaaagatgcaaaatatgatcagttcttccttggagactatcggcctctcattcgtgataccaatggaagtgtcattgatcaggaaacacagcttgcaccatacaggagaaatatgcaagaccttttgtgcgacgctggtatgataccatatccagagcccttccagagtatgtaccagaaacgccggttgggtacccttggtctcgagtggcggcctccctctgtaaattttgctgttggccccacttacaatgcaacaactggtgaataccaaactatcccaattattgatccggataggtgggaaccgcttccagagataacagatttcattgagcttgaacctgaaaatgaagttatctctgacgatactgattctgagtacaatggcatggatgagtattcaagtgaaggagaacaggatattatgagtggtgattcttcaggtacttcatattcgagtggagaaattgatgcagataaccctgatagtgctcatctccgccgatcaagaagaaagaagaaaaaatctgaggctgatcttgttacttcatctggtcggcgagtcattaggaaaagatttttggatgatcctggtgtagccacagtgtcaaggccacatagaggaaggaaatctaggaatggatgttctagtaaaaagaaaagatcccctaaatccaggggtttgcgacctcggagacgtgctgctgaaaccgcattaattactttcccaaagaaaggagtttcaacagaagaggatgaagatgactccgagagtttctcagatagtgaattgaacacggatagcactgaagctgaacagttagaatggagtggtcagttaagaactagaagagagattaactccccatttgacatcgatgatgttacagatccttctcagtttactgataataaggaaaattctggaactggtaagaaactagttctcagaataccacgacgtgatttaagaactcaatttcctttaggaagcggaaaagcagaatgctccatacaggataaagcagtgaagtctctttctctagctaatcatgaaccagttgagcacgaactgactattgaaccaggacattcccctgcctccaaggctgaattaacaattgatggtgatctgcatgatagttctgctgtttgcagtaataactcaattaggtggggtgaggttaagatgcgatcctcaaagcgttgcaagtacagtgagccagctggaggtttgtggtcctcttcaaataacgttgctttgcaggatatcgagggatcgagcagtcagcagatacctcatgaatatggcgatggcatccagccaagtgttgtgcaaaacgtacaagaagtgcaacatggaacaattctagataacattccggaaaacaacagtactgatgaacacactagagaaaattttggggatttagaaaagatagctaacaatattaatgctcatgcagacggagtgaatgacactgtacaagttcccaatacttctcagcctcaactaaaagttaagtttaagtcaagaggctctgcagatgcagtaggaaatatcatgaactccaagcatgtcaaagattcagtgcagtgtggcgatgattcttccatcaatcaaccaagaaatgctgacttctatattgtgcccaaaagttctcaggaatgcctagataaaagcactagtttgcatgattcaaaaaaaccgtacttggatgcttcaaagaagtacactgcagtgtacaaaaggtcaaagcgaaagaacaagaaaaaaatggattcagatgaatgtccgaacgaggatagcacttctatctccaatgacgatggtggataccaacctgcagaatacagtcctgttgcagctgcaagcagtagattgagaagaagtgctaggaagtcatttgcatacaatatcaatggtacaacacaggatgatatctcggaagtgaaagtttcttacggttcccatgaagcatcaactagtggaagacgagttgtcacagatgtgcgtgaagggatgtggcgacaaaactcaagaagtgttggtttaaggtctgctaggaacaaaagagaaagtaacagcttccttgatacacatccattgggtagaaggcaccaggtttcttttaagtattcatggttaatgttgcttgagcatgaagatagctaccgttatattcctcaactcgatgatgaggttatgtacttggggcagggccatgaggaatatcttaaacaagtgcaatcatctgaattttgcccttggaaccggataaaaggacttaaagctgtagaactttgcaaaatacagggtcttgattatgccacctacagaggatctggtgaaagctgctgtaaattaaccattgaatttgttgattgcacgtccagtggatttggcaaaacatttatgatcacgttgcgtgagctggtcaactttccagattttcttgtggagagaacaaggtacgaagctgctatggagcggaactggacccacagagacaagtgcaaagtctggtggagggacgaagaaggacaggtaggaggaacttggtgggagggacgggtgatggcagtaacacctaaatcacctgattttcctgagagtccatgggaaaaatatgtcatacagtataaggaggatggttctgatcacgctcatagcccctgggaacttcatgagacaggcagtttatgggatccatggaaacatccacatatggatctcacggttcgagataaattgttatcagaaatggaaaatttacaggaaatgtcacacagggatcaggatcattatggtgtttttaaactggacaaggttgcagaaaagtcagatttcatcaacaggtttcctgttcaattttctattgaggtgatcaaggcaagattagcgaacaaatattacagaactctgggggctgtcagacatgataccactgtgatgctttcaaatgcagaatcttacttttcaaagagcagtgaaatgaccaaaaagatccgcaagctctctgagttgctcgaccagatcttttcatcactgtagggaacattgcttgatgcctgattgacaatttcccttttcgtttctgcaaaaaaaatttggccttaggcatcgagatgatttttactggtcctactgaggcattagagaattagccaaagtagttctcaggacagaaagggtttccggtgtagctccaaccagttaaactagttgctgatacaaagtgctcgttgctaacacatttgaccgtttgatctgttgtcaagatacaatggttcatcctattggacatgaaatattggggttttgttagagaagatgccaaggtgtaaatctggtggaggaaatgcattaactgataatttcattttgtacagacaccctcagcaataaaaggaaaaaaagaaatgtgcaacgttgtctattacattttggggtgacacatggtaactataatataggaaattagtggcacttttttcagcgtgcccaggcacgtattttatgttttttttatgacatcttttttggtcgca

SEQ ID NO: 71989 - DNA, 5696 bp, Zea Mays
gttcgtttcgttggcccgtgccggcgtgccctccggtcctcttctcgttctcccccgagcggctctcgatctggtttgctccgcgtcgtcgctccctggacgtcgccgccctagtggttcgcttcgccgcttctcgcgctctccggcttctacgctggtggtcggttgttcgagagcggctccggcgggcggcgtagatcggcggtccaggtggtgtattagacatgtctttcaggaagcgccaaccttccagtaacggagcttccattaatttagctcccctgggttttccaagtcaggaacttgagaaggttaatcctgtaaattcagtgatgtcaaccgattttgaatccatggatggtgttgatattgatatgagggaagtttactttctcattatgcattttttatctcatggtccattcaaacggacctttggagaattgtgcaatgaactcctagaacatcaactgctacctagaagataccatgcttggtattcacgtggtggtttccatagtggcgaagaaaatgatgatggcatatcactccctttggattatgtaaagctagctgagaggtacccccacattggtaaagaccacttggtgaagctattaaagcaactgatggctagttcttatcacccacacaacttgattggaagagtttctccaaatgctgctgatgtcccaacacttcttggctccaactccttttcacttcttccatctgacaggcaagataagggaactcccaggctgccaagttatcttcgttggcctcacattcagactgatcaagttcatggtctaagtttgagagagataggtggtttcactaagcattgtcgagctccctctgtacgtgcatcttgctatgccatcgcgaagccatccacccttgttgaaaagatgcaaatcataaagagattgagggggcatcaaaatgctgtgtattgtgctacctttgatcgcacagggcgttatgttattactggttctgatgaccgccttgttaaaatatgggcgatggaaacagcgttctgcctggctagctgccggggccatgaaggtgatattaccgatcttgcagtgagttccaataattctgtggtagcatcttcatctaatgatttcattattagagtgtggcgtatgcctgatggaatgccagtctcagtgctcaaggggcatacaggggcagttactgctattgcatttagtccaaggccaggtgctgctttccagctgttgtcgtcatcagatgatgggacatgcaggatttgggatgccagatactctcaacaacctccaagactgtatacaccaaagcccccagatgttgcccctggtaagagtggtgatgcatcttccagcgccgctcaagttcagccaacaaatcaccagatcttatgttgtgcatttaatgctaatggaaccgtgtttgtcactggcagctcggacacttatgcaagggtctggaatgcttgcaagagttcttctgatgaacatgagcaaccgattcatgagatggatctattatgtgggcatgaaaatgatgtaaactatgtgcagtttagtggatgtgcagttgcatcaagatctttttcatctgattccagtcatacctctaaggaagaaaatagcctgaagttaagaaattcttggttcacgcataatattgttacctgctcccgtgatggcagtgcaattatatgggttccacgatctcggaggtcacatggaaagattggacgttggacgcgtgcttaccatcttaaagttcccccacctccaatggctcctcaaccacctcgaggtggtcctcgtcaaagataccagccaactcctcgtggtgtcaatatgatagtttggagtctggacaaccgctttgtgcttgctgctatcatggacgtttgtgctagatgtgcatccgttcaatcctcgtatagcaatgagtgctggatatgatgggaagacgatcatctgggatatatgggaagggaaacctgttcagatctatgaaacaggacaatttaaactagttgatgggaagttctctccggatggtacatcacttattttatcagatgaagttgggcgagtattcattattggaactgggcaaggagagtcccagaaagatgcaaaatatgatcagttcttccttggagactatcggcctctcattcgtgataccaatggaagtgtcattgatcaggaaacacagcttgcaccatacaggagaaatatgcaagaccttttgtgcgacgctggtatgataccatatccagagcccttccagagtatgtaccagaaacgccggttgggtacccttggtctcgagtggcggcctccctctgtaaattttgctgttggccccacttacaatgcaacaactggtgaataccaaactatcccaattattgatccggataggtgggaaccgcttccagagataacagatttcattgagcttgaacctgaaaatgaagttatctctgacgatactgattctgagtacaatggcatggatgagtattcaagtgaaggagaacaggatattatgagtggtgattcttcaggtacttcatattcgagtggagaaattgatgcagataaccctgatagtgctcatctccgccgatcaagaagaaagaagaaaaaatctgaggctgatcttgttacttcatctggtcggcgagtcattaggaaaagatttttggatgatcctggtgtagccacagtgtcaaggccacatagaggaaggaaatctaggaatggatgttctagtaaaaagaaaagatcccctaaatccaggggtttgcgacctcggagacgtgctgctgaaaccgcattaattactttcccaaagaaaggagtttcaacagaagaggatgaagatgactccgagagtttctcagatagtgaattgaacacggatagcactgaagctgaacagttagaatggagtggtcagttaagaactagaagagagattaactccccatttgacatcgatgatgttacagatccttctcagtttactgataataaggaaaattctggaactggtaagaaactagttctcagaataccacgacgtgatttaagaactcaatttcctttaggaagcggaaaagcagaatgctccatacaggataaagcagtgaagtctctttctctagctaatcatgaaccagttgagcacgaactgactattgaaccaggacattcccctgcctccaaggctgaattaacaattgatggtgatctgcatgatagttctgctgtttgcagtaataactcaattaggtggggtgaggttaagatgcgatcctcaaagcgttgcaagtacagtgagccagctggaggtttgtggtcctcttcaaataacgttgctttgcaggatatcgagggatcgagcagtcagcagatacctcatgaatatggcgatggcatccagccaagtgttgtgcaaaacgtacaagaagtgcaacatggaacaattctagataacattccggaaaacaacagtactgatgaacacactagagaaaattttggggatttagaaaagatagctaacaatattaatgctcatgcagacggagtgaatgacactgtacaagttcccaatacttctcagcctcaactaaaagttaagtttaagtcaagaggctctgcagatgcagtaggaaatatcatgaactccaagcatgtcaaagattcagtgcagtgtggcgatgattcttccatcaatcaaccaagaaatgctgacttctatattgtgcccaaaagttctcaggaatgcctagataaaagcactagtttgcatgattcaaaaaaaccgtacttggatgcttcaaagaagtacactgcagtgtacaaaaggtcaaagcgaaagaacaagaaaaaaatggattcagatgaatgtccgaacgaggatagcacttctatctccaatgacgatggtggataccaacctgcagaatacagtcctgttgcagctgcaagcagtagattgagaagaagtgctaggaagtcatttgcatacaatatcaatggtacaacacaggatgatatctcggaagtgaaagtttcttacggttcccatgaagcatcaactagtggaagacgagttgtcacagatgtgcgtgaagggatgtggcgacaaaactcaagaagtgttggtttaaggtctgctaggaacaaaagagaaagtaacagcttccttgatacacatccattgggtagaaggcaccaggtttcttttaagtattcatggttaatgttgcttgagcatgaagatagctaccgttatattcctcaactcgatgatgaggttatgtacttggggcagggccatgaggaatatcttaaacaagtgcaatcatctgaattttgcccttggaaccggataaaaggacttaaagctgtagaactttgcaaaatacagggtcttgattatgccacctacagaggatctggtgaaagctgctgtaaattaaccattgaatttgttgattgcacgtccagtggatttggcaaaacatttatgatcacgttgcgtgagctggtcaactttccagattttcttgtggagagaacaaggtacgaagctgctatggagcggaactggacccacagagacaagtgcaaagtctggtggagggacgaagaaggacaggtaggaggaacttggtgggagggacgggtgatggcagtaacacctaaatcacctgattttcctgagagtccatgggaaaaatatgtcatacagtataaggaggatggttctgatcacgctcatagcccctgggaacttcatgagacaggcagtttatgggatccatggaaacatccacatatggatctcacggttcgagataaattgttatcagaaatggaaaatttacaggaaatgtcacacagggatcaggatcattatggtgtttttaaactggacaaggttgcagaaaagtcagatttcatcaacaggtttcctgttcaattttctattgaggtgatcaaggcaagattagcgaacaaatattacagaactctgggggctgtcagacatgataccactgtgatgctttcaaatgcagaatcttacttttcaaagagcagtgaaatgaccaaaaagatccgcaagctctctgagttgctcgaccagatcttttcatcactgtagggaacattgcttgatgcctgattgacaatttcccttttcgtttctgcaaaaaaaatttggccttaggcatcgagatgatttttactggtcctactgaggcattagagaattagccaaagtagttctcaggacagaaagggtttccggtgtagctccaaccagttaaactagttgctgatacaaagtgctcgttgctaacacatttgaccgtttgatctgttgtcaagatacaatggttcatcctattggacatgaaatattggggttttgttagagaagatgccaaggtgtaaatctggtggaggaaatgcattaactgataatttcattttgtacagacaccctcagcaataaaaggaaaaaaagaaatgtgcaacgttgtctattacattttggggtgacacatggtaactataatataggaaattagtggcacttttttcagcgtgcccaggcacgtattttatgttttttttatgacatcttttttggtcgca

SEQ ID NO: 71990 - DNA, 5784 bp, Zea Mays
gcgaaccaacagccccgtctctctcagcctcctccggtcctcccccaccactgtgcgtctgtgcctagggttcgtacggggacgacaggacagcggcctccgccgtccctccgccgccgtaggtgccctgttcgtgccgcacgggcgctgccaaagcgccctccatatctggcatgcctctgagccgccgcagccgcgtcaccagagggttcgcagacaaggtccaggtggtgtattagacatgtctttcaggaagcgccaaccttccagtaacggagcttccattaatttagctcccctgggttttccaagtcaggaacttgagaaggttaatcctgtaaattcagtgatgtcaaccgattttgaatccatggatggtgttgatattgatatgagggaagtttactttctcattatgcattttttatctcatggtccattcaaacggacctttggagaattgtgcaatgaactcctagaacatcaactgctacctagaagataccatgcttggtattcacgtggtggtttccatagtggcgaagaaaatgatgatggcatatcactccctttggattatgtaaagctagctgagaggtacccccacattggtaaagaccacttggtgaagctattaaagcaactgatggctagttcttatcacccacacaacttgattggaagagtttctccaaatgctgctgatgtcccaacacttcttggctccaactccttttcacttcttccatctgacaggcaagataagggaactcccaggctgccaagttatcttcgttggcctcacattcagactgatcaagttcatggtctaagtttgagagagataggtggtttcactaagcattgtcgagctccctctgtacgtgcatcttgctatgccatcgcgaagccatccacccttgttgaaaagatgcaaatcataaagagattgagggggcatcaaaatgctgtgtattgtgctacctttgatcgcacagggcgttatgttattactggttctgatgaccgccttgttaaaatatgggcgatggaaacagcgttctgcctggctagctgccggggccatgaaggtgatattaccgatcttgcagtgagttccaataattctgtggtagcatcttcatctaatgatttcattattagagtgtggcgtatgcctgatggaatgccagtctcagtgctcaaggggcatacaggggcagttactgctattgcatttagtccaaggccaggtgctgctttccagctgttgtcgtcatcagatgatgggacatgcaggatttgggatgccagatactctcaacaacctccaagactgtatacaccaaagcccccagatgttgcccctggtaagagtggtgatgcatcttccagcgccgctcaagttcagccaacaaatcaccagatcttatgttgtgcatttaatgctaatggaaccgtgtttgtcactggcagctcggacacttatgcaagggtctggaatgcttgcaagagttcttctgatgaacatgagcaaccgattcatgagatggatctattatgtgggcatgaaaatgatgtaaactatgtgcagtttagtggatgtgcagttgcatcaagatctttttcatctgattccagtcatacctctaaggaagaaaatagcctgaagttaagaaattcttggttcacgcataatattgttacctgctcccgtgatggcagtgcaattatatgggttccacgatctcggaggtcacatggaaagattggacgttggacgcgtgcttaccatcttaaagttcccccacctccaatggctcctcaaccacctcgaggtggtcctcgtcaaagataccagccaactcctcgtggtgtcaatatgatagtttggagtctggacaaccgctttgtgcttgctgctatcatggattgcagaatttgcgtatggaatgcttctgatgggagcttggtgcattcactgattggccataaggaatcaacgtttgtgctagatgtgcatccgttcaatcctcgtatagcaatgagtgctggatatgatgggaagacgatcatctgggatatatgggaagggaaacctgttcagatctatgaaacaggacaatttaaactagttgatgggaagttctctccggatggtacatcacttattttatcagatgaagttgggcgagtattcattattggaactgggcaaggagagtcccagaaagatgcaaaatatgatcagttcttccttggagactatcggcctctcattcgtgataccaatggaagtgtcattgatcaggaaacacagcttgcaccatacaggagaaatatgcaagaccttttgtgcgacgctggtatgataccatatccagagcccttccagagtatgtaccagaaacgccggttgggtacccttggtctcgagtggcggcctccctctgtaaattttgctgttggccccacttacaatgcaacaactggtgaataccaaactatcccaattattgatccggataggtgggaaccgcttccagagataacagatttcattgagcttgaacctgaaaatgaagttatctctgacgatactgattctgagtacaatggcatggatgagtattcaagtgaaggagaacaggatattatgagtggtgattcttcaggtacttcatattcgagtggagaaattgatgcagataaccctgatagtgctcatctccgccgatcaagaagaaagaagaaaaaatctgaggctgatcttgttacttcatctggtcggcgagtcattaggaaaagatttttggatgatcctggtgtagccacagtgtcaaggccacatagaggaaggaaatctaggaatggatgttctagtaaaaagaaaagatcccctaaatccaggggtttgcgacctcggagacgtgctgctgaaaccgcattaattactttcccaaagaaaggagtttcaacagaagaggatgaagatgactccgagagtttctcagatagtgaattgaacacggatagcactgaagctgaacagttagaatggagtggtcagttaagaactagaagagagattaactccccatttgacatcgatgatgttacagatccttctcagtttactgataataaggaaaattctggaactggtaagaaactagttctcagaataccacgacgtgatttaagaactcaatttcctttaggaagcggaaaagcagaatgctccatacaggataaagcagtgaagtctctttctctagctaatcatgaaccagttgagcacgaactgactattgaaccaggacattcccctgcctccaaggctgaattaacaattgatggtgatctgcatgatagttctgctgtttgcagtaataactcaattaggtggggtgaggttaagatgcgatcctcaaagcgttgcaagtacagtgagccagctggaggtttgtggtcctcttcaaataacgttgctttgcaggatatcgagggatcgagcagtcagcagatacctcatgaatatggcgatggcatccagccaagtgttgtgcaaaacgtacaagaagtgcaacatggaacaattctagataacattccggaaaacaacagtactgatgaacacactagagaaaattttggggatttagaaaagatagctaacaatattaatgctcatgcagacggagtgaatgacactgtacaagttcccaatacttctcagcctcaactaaaagttaagtttaagtcaagaggctctgcagatgcagtaggaaatatcatgaactccaagcatgtcaaagattcagtgcagtgtggcgatgattcttccatcaatcaaccaagaaatgctgacttctatattgtgcccaaaagttctcaggaatgcctagataaaagcactagtttgcatgattcaaaaaaaccgtacttggatgcttcaaagaagtacactgcagtgtacaaaaggtcaaagcgaaagaacaagaaaaaaatggattcagatgaatgtccgaacgaggatagcacttctatctccaatgacgatggtggataccaacctgcagaatacagtcctgttgcagctgcaagcagtagattgagaagaagtgctaggaagtcatttgcatacaatatcaatggtacaacacaggatgatatctcggaagtgaaagtttcttacggttcccatgaagcatcaactagtggaagacgagttgtcacagatgtgcgtgaagggatgtggcgacaaaactcaagaagtgttggtttaaggtctgctaggaacaaaagagaaagtaacagcttccttgatacacatccattgggtagaaggcaccaggtttcttttaagtattcatggttaatgttgcttgagcatgaagatagctaccgttatattcctcaactcgatgatgaggttatgtacttggggcagggccatgaggaatatcttaaacaagtgcaatcatctgaattttgcccttggaaccggataaaaggacttaaagctgtagaactttgcaaaatacagggtcttgattatgccacctacagaggatctggtgaaagctgctgtaaattaaccattgaatttgttgattgcacgtccagtggatttggcaaaacatttatgatcacgttgcgtgagctggtcaactttccagattttcttgtggagagaacaaggtacgaagctgctatggagcggaactggacccacagagacaagtgcaaagtctggtggagggacgaagaaggacaggtaggaggaacttggtgggagggacgggtgatggcagtaacacctaaatcacctgattttcctgagagtccatgggaaaaatatgtcatacagtataaggaggatggttctgatcacgctcatagcccctgggaacttcatgagacaggcagtttatgggatccatggaaacatccacatatggatctcacggttcgagataaattgttatcagaaatggaaaatttacaggaaatgtcacacagggatcaggatcattatggtgtttttaaactggacaaggttgcagaaaagtcagatttcatcaacaggtttcctgttcaattttctattgaggtgatcaaggcaagattagcgaacaaatattacagaactctgggggctgtcagacatgataccactgtgatgctttcaaatgcagaatcttacttttcaaagagcagtgaaatgaccaaaaagatccgcaagctctctgagttgctcgaccagatcttttcatcactgtagggaacattgcttgatgcctgattgacaatttcccttttcgtttctgcaaaaaaaatttggccttaggcatcgagatgatttttactggtcctactgaggcattagagaattagccaaagtagttctcaggacagaaagggtttccggtgtagctccaaccagttaaactagttgctgatacaaagtgctcgttgctaacacatttgaccgtttgatctgttgtcaagatacaatggttcatcctattggacatgaaatattggggttttgttagagaagatgccaaggtgtaaatctggtggaggaaatgcattaactgataatttcattttgtacagacaccctcagcaataaaaggaaaaaaagaaatgtgcaacgttgtctattacattttggggtgacacatggtaactataatataggaaattagtggcacttttttcagcgtgcccaggcacgtattttatgttttttttatgacatcttttttggtcgca

SEQ ID NO: 71991 - DNA, 5735 bp, Zea Mays
cagcctcctccggtcctcccccaccactgtgcgtctgtgcctagggttcgtacggggacgacaggacagcggcctccgccgtccctccgccgccgtaggtgccctgttcgtgccgcacgggcgctgccaaagcgccctccatatctggcatgcctctgagccgccgcagccgcgtcaccagagggttcgcagacaaggtccaggtggtgtattagacatgtctttcaggaagcgccaaccttccagtaacggagcttccattaatttagctcccctgggttttccaagtcaggaacttgagaaggttaatcctgtaaattcagtgatgtcaaccgattttgaatccatggatggtgttgatattgatatgagggaagtttactttctcattatgcattttttatctcatggtccattcaaacggacctttggagaattgtgcaatgaactcctagaacatcaactgctacctagaagataccatgcttggtattcacgtggtggtttccatagtggcgaagaaaatgatgatggcatatcactccctttggattatgtaaagctagctgagaggtacccccacattggtaaagaccacttggtgaagctattaaagcaactgatggctagttcttatcacccacacaacttgattggaagagtttctccaaatgctgctgatgtcccaacacttcttggctccaactccttttcacttcttccatctgacaggcaagataagggaactcccaggctgccaagttatcttcgttggcctcacattcagactgatcaagttcatggtctaagtttgagagagataggtggtttcactaagcattgtcgagctccctctgtacgtgcatcttgctatgccatcgcgaagccatccacccttgttgaaaagatgcaaatcataaagagattgagggggcatcaaaatgctgtgtattgtgctacctttgatcgcacagggcgttatgttattactggttctgatgaccgccttgttaaaatatgggcgatggaaacagcgttctgcctggctagctgccggggccatgaaggtgatattaccgatcttgcagtgagttccaataattctgtggtagcatcttcatctaatgatttcattattagagtgtctcagtgctcaaggggcatacaggggcagttactgctattgcatttagtccaaggccaggtgctgctttccagctgttgtcgtcatcagatgatgggacatgcaggatttgggatgccagatactctcaacaacctccaagactgtatacaccaaagcccccagatgttgcccctggtaagagtggtgatgcatcttccagcgccgctcaagttcagccaacaaatcaccagatcttatgttgtgcatttaatgctaatggaaccgtgtttgtcactggcagctcggacacttatgcaagggtctggaatgcttgcaagagttcttctgatgaacatgagcaaccgattcatgagatggatctattatgtgggcatgaaaatgatgtaaactatgtgcagtttagtggatgtgcagttgcatcaagatctttttcatctgattccagtcatacctctaaggaagaaaatagcctgaagttaagaaattcttggttcacgcataatattgttacctgctcccgtgatggcagtgcaattatatgggttccacgatctcggaggtcacatggaaagattggacgttggacgcgtgcttaccatcttaaagttcccccacctccaatggctcctcaaccacctcgaggtggtcctcgtcaaagataccagccaactcctcgtggtgtcaatatgatagtttggagtctggacaaccgctttgtgcttgctgctatcatggattgcagaatttgcgtatggaatgcttctgatgggagcttggtgcattcactgattggccataaggaatcaacgtttgtgctagatgtgcatccgttcaatcctcgtatagcaatgagtgctggatatgatgggaagacgatcatctgggatatatgggaagggaaacctgttcagatctatgaaacaggacaatttaaactagttgatgggaagttctctccggatggtacatcacttattttatcagatgaagttgggcgagtattcattattggaactgggcaaggagagtcccagaaagatgcaaaatatgatcagttcttccttggagactatcggcctctcattcgtgataccaatggaagtgtcattgatcaggaaacacagcttgcaccatacaggagaaatatgcaagaccttttgtgcgacgctggtatgataccatatccagagcccttccagagtatgtaccagaaacgccggttgggtacccttggtctcgagtggcggcctccctctgtaaattttgctgttggccccacttacaatgcaacaactggtgaataccaaactatcccaattattgatccggataggtgggaaccgcttccagagataacagatttcattgagcttgaacctgaaaatgaagttatctctgacgatactgattctgagtacaatggcatggatgagtattcaagtgaaggagaacaggatattatgagtggtgattcttcaggtacttcatattcgagtggagaaattgatgcagataaccctgatagtgctcatctccgccgatcaagaagaaagaagaaaaaatctgaggctgatcttgttacttcatctggtcggcgagtcattaggaaaagatttttggatgatcctggtgtagccacagtgtcaaggccacatagaggaaggaaatctaggaatggatgttctagtaaaaagaaaagatcccctaaatccaggggtttgcgacctcggagacgtgctgctgaaaccgcattaattactttcccaaagaaaggagtttcaacagaagaggatgaagatgactccgagagtttctcagatagtgaattgaacacggatagcactgaagctgaacagttagaatggagtggtcagttaagaactagaagagagattaactccccatttgacatcgatgatgttacagatccttctcagtttactgataataaggaaaattctggaactggtaagaaactagttctcagaataccacgacgtgatttaagaactcaatttcctttaggaagcggaaaagcagaatgctccatacaggataaagcagtgaagtctctttctctagctaatcatgaaccagttgagcacgaactgactattgaaccaggacattcccctgcctccaaggctgaattaacaattgatggtgatctgcatgatagttctgctgtttgcagtaataactcaattaggtggggtgaggttaagatgcgatcctcaaagcgttgcaagtacagtgagccagctggaggtttgtggtcctcttcaaataacgttgctttgcaggatatcgagggatcgagcagtcagcagatacctcatgaatatggcgatggcatccagccaagtgttgtgcaaaacgtacaagaagtgcaacatggaacaattctagataacattccggaaaacaacagtactgatgaacacactagagaaaattttggggatttagaaaagatagctaacaatattaatgctcatgcagacggagtgaatgacactgtacaagttcccaatacttctcagcctcaactaaaagttaagtttaagtcaagaggctctgcagatgcagtaggaaatatcatgaactccaagcatgtcaaagattcagtgcagtgtggcgatgattcttccatcaatcaaccaagaaatgctgacttctatattgtgcccaaaagttctcaggaatgcctagataaaagcactagtttgcatgattcaaaaaaaccgtacttggatgcttcaaagaagtacactgcagtgtacaaaaggtcaaagcgaaagaacaagaaaaaaatggattcagatgaatgtccgaacgaggatagcacttctatctccaatgacgatggtggataccaacctgcagaatacagtcctgttgcagctgcaagcagtagattgagaagaagtgctaggaagtcatttgcatacaatatcaatggtacaacacaggatgatatctcggaagtgaaagtttcttacggttcccatgaagcatcaactagtggaagacgagttgtcacagatgtgcgtgaagggatgtggcgacaaaactcaagaagtgttggtttaaggtctgctaggaacaaaagagaaagtaacagcttccttgatacacatccattgggtagaaggcaccaggtttcttttaagtattcatggttaatgttgcttgagcatgaagatagctaccgttatattcctcaactcgatgatgaggttatgtacttggggcagggccatgaggaatatcttaaacaagtgcaatcatctgaattttgcccttggaaccggataaaaggacttaaagctgtagaactttgcaaaatacagggtcttgattatgccacctacagaggatctggtgaaagctgctgtaaattaaccattgaatttgttgattgcacgtccagtggatttggcaaaacatttatgatcacgttgcgtgagctggtcaactttccagattttcttgtggagagaacaaggtacgaagctgctatggagcggaactggacccacagagacaagtgcaaagtctggtggagggacgaagaaggacaggtaggaggaacttggtgggagggacgggtgatggcagtaacacctaaatcacctgattttcctgagagtccatgggaaaaatatgtcatacagtataaggaggatggttctgatcacgctcatagcccctgggaacttcatgagacaggcagtttatgggatccatggaaacatccacatatggatctcacggttcgagataaattgttatcagaaatggaaaatttacaggaaatgtcacacagggatcaggatcattatggtgtttttaaactggacaaggttgcagaaaagtcagatttcatcaacaggtttcctgttcaattttctattgaggtgatcaaggcaagattagcgaacaaatattacagaactctgggggctgtcagacatgataccactgtgatgctttcaaatgcagaatcttacttttcaaagagcagtgaaatgaccaaaaagatccgcaagctctctgagttgctcgaccagatcttttcatcactgtagggaacattgcttgatgcctgattgacaatttcccttttcgtttctgcaaaaaaaatttggccttaggcatcgagatgatttttactggtcctactgaggcattagagaattagccaaagtagttctcaggacagaaagggtttccggtgtagctccaaccagttaaactagttgctgatacaaagtgctcgttgctaacacatttgaccgtttgatctgttgtcaagatacaatggttcatcctattggacatgaaatattggggttttgttagagaagatgccaaggtgtaaatctggtggaggaaatgcattaactgataatttcattttgtacagacaccctcagcaataaaaggaaaaaaagaaatgtgcaacgttgtctattacattttggggtgacacatggtaactataatataggaaattagtggcacttttttcagcgtgcccaggcacgtattttatgttttttttatgacatcttttttggtcgca

SEQ ID NO: 71992 - DNA, 5702 bp, Zea Mays
cctcccccaccactgtgcgtctgtgcctagggttcgtacggggacgacaggacagcggcctccgccgtccctccgccgccgtaggtgccctgttcgtgccgcacgggcgctgccaaagcgccctccatatctggcatgcctctgagccgccgcagccgcgtcaccagagggttcgcagacaaggtccaggtggtgtattagacatgtctttcaggaagcgccaaccttccagtaacggagcttccattaatttagctcccctgggttttccaagtcaggaacttgagaaggttaatcctgtaaattcagtgatgtcaaccgattttgaatccatggatggtgttgatattgatatgagggaagtttactttctcattatgcattttttatctcatggtccattcaaacggacctttggagaattgtgcaatgaactcctagaacatcaactgctacctagaagataccatgcttggtattcacgtggtggtttccatagtggcgaagaaaatgatgatggcatatcactccctttggattatgtaaagctagctgagaggtacccccacattggtaaagaccacttggtgaagctattaaagcaactgatggctagttcttatcacccacacaacttgattggaagagtttctccaaatgctgctgatgtcccaacacttcttggctccaactccttttcacttcttccatctgacaggcaagataagggaactcccaggctgccaagttatcttcgttggcctcacattcagactgatcaagttcatggtctaagtttgagagagataggtggtttcactaagcattgtcgagctccctctgtacgtgcatcttgctatgccatcgcgaagccatccacccttgttgaaaagatgcaaatcataaagagattgagggggcatcaaaatgctgtgtattgtgctacctttgatcgcacagggcgttatgttattactggttctgatgaccgccttgttaaaatatgggcgatggaaacagcgttctgcctggctagctgccggggccatgaaggtgatattaccgatcttgcagtgagttccaataattctgtggtagcatcttcatctaatgatttcattattagagtgtggcgtatgcctgatggaatgccagtctcagtgctcaaggggcatacaggggcagttactgctattgcatttagtccaaggccaggtgctgctttccagctgttgtcgtcatcagatgatgggacatgcaggatttgggatgccagatactctcaacaacctccaagactgtatacaccaaagcccccagatgttgcccctggtaagagtggtgatgcatcttccagcgccgctcaagttcagccaacaaatcaccagatcttatgttgtgcatttaatgctaatggaaccgtgtttgtcactggcagctcggacacttatgcaagggtctggaatgcttgcaagagttcttctgatgaacatgagcaaccgattcatgagatggatctattatgtgggcatgaaaatgatgtaaactatgtgcagtttagtggatgtgcagttgcatcaagatctttttcatctgattccagtcatacctctaaggaagaaaatagcctgaagttaagaaattcttggttcacgcataatattgttacctgctcccgtgatggcagtgcaattatatgggttccacgatctcggaggtcacatggaaagattggacgttggacgcgtgcttaccatcttaaagttcccccacctccaatggctcctcaaccacctcgaggtggtcctcgtcaaagataccagccaactcctcgtggtgtcaatatgatagtttggagtctggacaaccgctttgtgcttgctgctatcatggattgcagaatttgcgtatggaatgcttctgatgggagcttggtgcattcactgattggccataaggaatcaacgtttgtgctagatgtgcatccgttcaatcctcgtatagcaatgagtgctggatatgatgggaagacgatcatctgggatatatgggaagggaaacctgttcagatctatgaaacaggacaatttaaactagttgatgggaagttctctccatgaagttgggcgagtattcattattggaactgggcaaggagagtcccagaaagatgcaaaatatgatcagttcttccttggagactatcggcctctcattcgtgataccaatggaagtgtcattgatcaggaaacacagcttgcaccatacaggagaaatatgcaagaccttttgtgcgacgctgagcccttccagagtatgtaccagaaacgccggttgggtacccttggtctcgagtggcggcctccctctgtaaattttgctgttggccccacttacaatgcaacaactggtgaataccaaactatcccaattattgatccggataggtgggaaccgcttccagagataacagatttcattgagcttgaacctgaaaatgaagttatctctgacgatactgattctgagtacaatggcatggatgagtattcaagtgaaggagaacaggatattatgagtggtgattcttcaggtacttcatattcgagtggagaaattgatgcagataaccctgatagtgctcatctccgccgatcaagaagaaagaagaaaaaatctgaggctgatcttgttacttcatctggtcggcgagtcattaggaaaagatttttggatgatcctggtgtagccacagtgtcaaggccacatagaggaaggaaatctaggaatggatgttctagtaaaaagaaaagatcccctaaatccaggggtttgcgacctcggagacgtgctgctgaaaccgcattaattactttcccaaagaaaggagtttcaacagaagaggatgaagatgactccgagagtttctcagatagtgaattgaacacggatagcactgaagctgaacagttagaatggagtggtcagttaagaactagaagagagattaactccccatttgacatcgatgatgttacagatccttctcagtttactgataataaggaaaattctggaactggtaagaaactagttctcagaataccacgacgtgatttaagaactcaatttcctttaggaagcggaaaagcagaatgctccatacaggataaagcagtgaagtctctttctctagctaatcatgaaccagttgagcacgaactgactattgaaccaggacattcccctgcctccaaggctgaattaacaattgatggtgatctgcatgatagttctgctgtttgcagtaataactcaattaggtggggtgaggttaagatgcgatcctcaaagcgttgcaagtacagtgagccagctggaggtttgtggtcctcttcaaataacgttgctttgcaggatatcgagggatcgagcagtcagcagatacctcatgaatatggcgatggcatccagccaagtgttgtgcaaaacgtacaagaagtgcaacatggaacaattctagataacattccggaaaacaacagtactgatgaacacactagagaaaattttggggatttagaaaagatagctaacaatattaatgctcatgcagacggagtgaatgacactgtacaagttcccaatacttctcagcctcaactaaaagttaagtttaagtcaagaggctctgcagatgcagtaggaaatatcatgaactccaagcatgtcaaagattcagtgcagtgtggcgatgattcttccatcaatcaaccaagaaatgctgacttctatattgtgcccaaaagttctcaggaatgcctagataaaagcactagtttgcatgattcaaaaaaaccgtacttggatgcttcaaagaagtacactgcagtgtacaaaaggtcaaagcgaaagaacaagaaaaaaatggattcagatgaatgtccgaacgaggatagcacttctatctccaatgacgatggtggataccaacctgcagaatacagtcctgttgcagctgcaagcagtagattgagaagaagtgctaggaagtcatttgcatacaatatcaatggtacaacacaggatgatatctcggaagtgaaagtttcttacggttcccatgaagcatcaactagtggaagacgagttgtcacagatgtgcgtgaagggatgtggcgacaaaactcaagaagtgttggtttaaggtctgctaggaacaaaagagaaagtaacagcttccttgatacacatccattgggtagaaggcaccaggtttcttttaagtattcatggttaatgttgcttgagcatgaagatagctaccgttatattcctcaactcgatgatgaggttatgtacttggggcagggccatgaggaatatcttaaacaagtgcaatcatctgaattttgcccttggaaccggataaaaggacttaaagctgtagaactttgcaaaatacagggtcttgattatgccacctacagaggatctggtgaaagctgctgtaaattaaccattgaatttgttgattgcacgtccagtggatttggcaaaacatttatgatcacgttgcgtgagctggtcaactttccagattttcttgtggagagaacaaggtacgaagctgctatggagcggaactggacccacagagacaagtgcaaagtctggtggagggacgaagaaggacaggtaggaggaacttggtgggagggacgggtgatggcagtaacacctaaatcacctgattttcctgagagtccatgggaaaaatatgtcatacagtataaggaggatggttctgatcacgctcatagcccctgggaacttcatgagacaggcagtttatgggatccatggaaacatccacatatggatctcacggttcgagataaattgttatcagaaatggaaaatttacaggaaatgtcacacagggatcaggatcattatggtgtttttaaactggacaaggttgcagaaaagtcagatttcatcaacaggtttcctgttcaattttctattgaggtgatcaaggcaagattagcgaacaaatattacagaactctgggggctgtcagacatgataccactgtgatgctttcaaatgcagaatcttacttttcaaagagcagtgaaatgaccaaaaagatccgcaagctctctgagttgctcgaccagatcttttcatcactgtagggaacattgcttgatgcctgattgacaatttcccttttcgtttctgcaaaaaaaatttggccttaggcatcgagatgatttttactggtcctactgaggcattagagaattagccaaagtagttctcaggacagaaagggtttccggtgtagctccaaccagttaaactagttgctgatacaaagtgctcgttgctaacacatttgaccgtttgatctgttgtcaagatacaatggttcatcctattggacatgaaatattggggttttgttagagaagatgccaaggtgtaaatctggtggaggaaatgcattaactgataatttcattttgtacagacaccctcagcaataaaaggaaaaaaagaaatgtgcaacgttgtctattacattttggggtgacacatggtaactataatataggaaattagtggcacttttttcagcgtgcccaggcacgtattttatgttttttttatgacatcttttttggtcgca

SEQ ID NO: 71993 - DNA, 5847 bp, Zea Mays
caccactgtgcgtctgtgcctagggttcgtacggggacgacaggacagcggcctccgccgtccctccgccgccgtaggtgccctgttcgtgccgcacgggcgctgccaaagcgccctccatatctggcatgcctctgagccgccgcagccgcgtcaccagagggttcgcagacaaggtcgcaggttcgtagcagcctcttctacatttgcaggggaaagacttgcctcggtttatcccttccctagaccccactcttgtgggagcctccgtcactactcactgggtccaggtggtgtattagacatgtctttcaggaagcgccaaccttccagtaacggagcttccattaatttagctcccctgggttttccaagtcaggaacttgagaaggttaatcctgtaaattcagtgatgtcaaccgattttgaatccatggatggtgttgatattgatatgagggaagtttactttctcattatgcattttttatctcatggtccattcaaacggacctttggagaattgtgcaatgaactcctagaacatcaactgctacctagaagataccatgcttggtattcacgtggtggtttccatagtggcgaagaaaatgatgatggcatatcactccctttggattatgtaaagctagctgagaggtacccccacattggtaaagaccacttggtgaagctattaaagcaactgatggctagttcttatcacccacacaacttgattggaagagtttctccaaatgctgctgatgtcccaacacttcttggctccaactccttttcacttcttccatctgacaggcaagataagggaactcccaggctgccaagttatcttcgttggcctcacattcagactgatcaagttcatggtctaagtttgagagagataggtggtttcactaagcattgtcgagctccctctgtacgtgcatcttgctatgccatcgcgaagccatccacccttgttgaaaagatgcaaatcataaagagattgagggggcatcaaaatgctgtgtattgtgctacctttgatcgcacagggcgttatgttattactggttctgatgaccgccttgttaaaatatgggcgatggaaacagcgttctgcctggctagctgccggggccatgaaggtgatattaccgatcttgcagtgagttccaataattctgtggtagcatcttcatctaatgatttcattattagagtgtggcgtatgcctgatggaatgccagtctcagtgctcaaggggcatacaggggcagttactgctattgcatttagtccaaggccaggtgctgctttccagctgttgtcgtcatcagatgatgggacatgcaggatttgggatgccagatactctcaacaacctccaagactgtatacaccaaagcccccagatgttgcccctggtaagagtggtgatgcatcttccagcgccgctcaagttcagccaacaaatcaccagatcttatgttgtgcatttaatgctaatggaaccgtgtttgtcactggcagctcggacacttatgcaagggtctggaatgcttgcaagagttcttctgatgaacatgagcaaccgattcatgagatggatctattatgtgggcatgaaaatgatgtaaactatgtgcagtttagtggatgtgcagttgcatcaagatctttttcatctgattccagtcatacctctaaggaagaaaatagcctgaagttaagaaattcttggttcacgcataatattgttacctgctcccgtgatggcagtgcaattatatgggttccacgatctcggaggtcacatggaaagattggacgttggacgcgtgcttaccatcttaaagttcccccacctccaatggctcctcaaccacctcgaggtggtcctcgtcaaagataccagccaactcctcgtggtgtcaatatgatagtttggagtctggacaaccgctttgtgcttgctgctatcatggattgcagaatttgcgtatggaatgcttctgatgggagcttggtgcattcactgattggccataaggaatcaacgtttgtgctagatgtgcatccgttcaatcctcgtatagcaatgagtgctggatatgatgggaagacgatcatctgggatatatgggaagggaaacctgttcagatctatgaaacaggacaatttaaactagttgatgggaagttctctccggatggtacatcacttattttatcagatgaagttgggcgagtattcattattggaactgggcaaggagagtcccagaaagatgcaaaatatgatcagttcttccttggagactatcggcctctcattcgtgataccaatggaagtgtcattgatcaggaaacacagcttgcaccatacaggagaaatatgcaagaccttttgtgcgacgctggtatgataccatatccagagcccttccagagtatgtaccagaaacgccggttgggtacccttggtctcgagtggcggcctccctctgtaaattttgctgttggccccacttacaatgcaacaactggtgaataccaaactatcccaattattgatccggataggtgggaaccgcttccagagataacagatttcattgagcttgaacctgaaaatgaagttatctctgacgatactgattctgagtacaatggcatggatgagtattcaagtgaaggagaacaggatattatgagtggtgattcttcaggtacttcatattcgagtggagaaattgatgcagataaccctgatagtgctcatctccgccgatcaagaagaaagaagaaaaaatctgaggctgatcttgttacttcatctggtcggcgagtcattaggaaaagatttttggatgatcctggtgtagccacagtgtcaaggccacatagaggaaggaaatctaggaatggatgttctagtaaaaagaaaagatcccctaaatccaggggtttgcgacctcggagacgtgctgctgaaaccgcattaattactttcccaaagaaaggagtttcaacagaagaggatgaagatgactccgagagtttctcagatagtgaattgaacacggatagcactgaagctgaacagttagaatggagtggtcagttaagaactagaagagagattaactccccatttgacatcgatgatgttacagatccttctcagtttactgataataaggaaaattctggaactggtaagaaactagttctcagaataccacgacgtgatttaagaactcaatttcctttaggaagcggaaaagcagaatgctccatacaggataaagcagtgaagtctctttctctagctaatcatgaaccagttgagcacgaactgactattgaaccaggacattcccctgcctccaaggctgaattaacaattgatggtgatctgcatgatagttctgctgtttgcagtaataactcaattaggtggggtgaggttaagatgcgatcctcaaagcgttgcaagtacagtgagccagctggaggtttgtggtcctcttcaaataacgttgctttgcaggatatcgagggatcgagcagtcagcagatacctcatgaatatggcgatggcatccagccaagtgttgtgcaaaacgtacaagaagtgcaacatggaacaattctagataacattccggaaaacaacagtactgatgaacacactagagaaaattttggggatttagaaaagatagctaacaatattaatgctcatgcagacggagtgaatgacactgtacaagttcccaatacttctcagcctcaactaaaagttaagtttaagtcaagaggctctgcagatgcagtaggaaatatcatgaactccaagcatgtcaaagattcagtgcagtgtggcgatgattcttccatcaatcaaccaagaaatgctgacttctatattgtgcccaaaagttctcaggaatgcctagataaaagcactagtttgcatgattcaaaaaaaccgtacttggatgcttcaaagaagtacactgcagtgtacaaaaggtcaaagcgaaagaacaagaaaaaaatggattcagatgaatgtccgaacgaggatagcacttctatctccaatgacgatggtggataccaacctgcagaatacagtcctgttgcagctgcaagcagtagattgagaagaagtgctaggaagtcatttgcatacaatatcaatggtacaacacaggatgatatctcggaagtgaaagtttcttacggttcccatgaagcatcaactagtggaagacgagttgtcacagatgtgcgtgaagggatgtggcgacaaaactcaagaagtgttggtttaaggtctgctaggaacaaaagagaaagtaacagcttccttgatacacatccattgggtagaaggcaccaggtttcttttaagtattcatggttaatgttgcttgagcatgaagatagctaccgttatattcctcaactcgatgatgaggttatgtacttggggcagggccatgaggaatatcttaaacaagtgcaatcatctgaattttgcccttggaaccggataaaaggacttaaagctgtagaactttgcaaaatacagggtcttgattatgccacctacagaggatctggtgaaagctgctgtaaattaaccattgaatttgttgattgcacgtccagtggatttggcaaaacatttatgatcacgttgcgtgagctggtcaactttccagattttcttgtggagagaacaaggtacgaagctgctatggagcggaactggacccacagagacaagtgcaaagtctggtggagggacgaagaaggacaggtaggaggaacttggtgggagggacgggtgatggcagtaacacctaaatcacctgattttcctgagagtccatgggaaaaatatgtcatacagtataaggaggatggttctgatcacgctcatagcccctgggaacttcatgagacaggcagtttatgggatccatggaaacatccacatatggatctcacggttcgagataaattgttatcagaaatggaaaatttacaggaaatgtcacacagggatcaggatcattatggtgtttttaaactggacaaggttgcagaaaagtcagatttcatcaacaggtttcctgttcaattttctattgaggtgatcaaggcaagattagcgaacaaatattacagaactctgggggctgtcagacatgataccactgtgatgctttcaaatgcagaatcttacttttcaaagagcagtgaaatgaccaaaaagatccgcaagctctctgagttgctcgaccagatcttttcatcactgtagggaacattgcttgatgcctgattgacaatttcccttttcgtttctgcaaaaaaaatttggccttaggcatcgagatgatttttactggtcctactgaggcattagagaattagccaaagtagttctcaggacagaaagggtttccggtgtagctccaaccagttaaactagttgctgatacaaagtgctcgttgctaacacatttgaccgtttgatctgttgtcaagatacaatggttcatcctattggacatgaaatattggggttttgttagagaagatgccaaggtgtaaatctggtggaggaaatgcattaactgataatttcattttgtacagacaccctcagcaataaaaggaaaaaaagaaatgtgcaacgttgtctattacattttggggtgacacatggtaactataatataggaaattagtggcacttttttcagcgtgcccaggcacgtattttatgttttttttatgacatcttttttggtcgca

SEQ ID NO: 71994 - DNA, 5713 bp, Zea Mays
gtctgtgcctagggttcgtacggggacgacaggacagcggcctccgccgtccctccgccgccgtaggtgccctgttcgtgccgcacgggcgctgccaaagcgccctccatatctggcatgcctctgagccgccgcagccgcgtcaccagagggttcgcagacaaggtccaggtggtgtattagacatgtctttcaggaagcgccaaccttccagtaacggagcttccattaatttagctcccctgggttttccaagtcaggaacttgagaaggttaatcctgtaaattcagtgatgtcaaccgattttgaatccatggatggtgttgatattgatatgagggaagtttactttctcattatgcattttttatctcatggtccattcaaacggacctttggagaattgtgcaatgaactcctagaacatcaactgctacctagaagataccatgcttggtattcacgtggtggtttccatagtggcgaagaaaatgatgatggcatatcactccctttggattatgtaaagctagctgagaggtacccccacattggtaaagaccacttggtgaagctattaaagcaactgatggctagttcttatcacccacacaacttgattggaagagtttctccaaatgctgctgatgtcccaacacttcttggctccaactccttttcacttcttccatctgacaggcaagataagggaactcccaggctgccaagttatcttcgttggcctcacattcagactgatcaagttcatggtctaagtttgagagagataggtggtttcactaagcattgtcgagctccctctgtacgtgcatcttgctatgccatcgcgaagccatccacccttgttgaaaagatgcaaatcataaagagattgagggggcatcaaaatgctgtgtattgtgctacctttgatcgcacagggcgttatgttattactggttctgatgaccgccttgttaaaatatgggcgatggaaacagcgttctgcctggctagctgccggggccatgaaggtgatattaccgatcttgcagtgagttccaataattctgtggtagcatcttcatctaatgatttcattattagagtgtggcgtatgcctgatggaatgccagtctcagtgctcaaggggcatacaggggcagttactgctattgcatttagtccaaggccaggtgctgctttccagctgttgtcgtcatcagatgatgggacatgcaggatttgggatgccagatactctcaacaacctccaagactgtatacaccaaagcccccagatgttgcccctggtaagagtggtgatgcatcttccagcgccgctcaagttcagccaacaaatcaccagatcttatgttgtgcatttaatgctaatggaaccgtgtttgtcactggcagctcggacacttatgcaagggtctggaatgcttgcaagagttcttctgatgaacatgagcaaccgattcatgagatggatctattatgtgggcatgaaaatgatgtaaactatgtgcagtttagtggatgtgcagttgcatcaagatctttttcatctgattccagtcatacctctaaggaagaaaatagcctgaagttcacgcataatattgttacctgctcccgtgatggcagtgcaattatatgggttccacgatctcggaggtcacatggaaagattggacgttggacgcgtgcttaccatcttaaagttcccccacctccaatggctcctcaaccacctcgaggtggtcctcgtcaaagataccagccaactcctcgtggtgtcaatatgatagtttggagtctggacaaccgctttgtgcttgctgctatcatggattgcagaatttgcgtatggaatgcttctgatgggagcttggtgcattcactgattggccataaggaatcaacgtttgtgctagatgtgcatccgttcaatcctcgtatagcaatgagtgctggatatgatgggaagacgatcatctgggatatatgggaagggaaacctgttcagatctatgaaacaggacaatttaaactagttgatgggaagttctctccggatggtacatcacttattttatcagatgaagttgggcgagtattcattattggaactgggcaaggagagtcccagaaagatgcaaaatatgatcagttcttccttggagactatcggcctctcattcgtgataccaatggaagtgtcattgatcaggaaacacagcttgcaccatacaggagaaatatgcaagaccttttgtgcgacgctggtatgataccatatccagagcccttccagagtatgtaccagaaacgccggttgggtacccttggtctcgagtggcggcctccctctgtaaattttgctgttggccccacttacaatgcaacaactggtgaataccaaactatcccaattattgatccggataggtgggaaccgcttccagagataacagatttcattgagcttgaacctgaaaatgaagttatctctgacgatactgattctgagtacaatggcatggatgagtattcaagtgaaggagaacaggatattatgagtggtgattcttcaggtacttcatattcgagtggagaaattgatgcagataaccctgatagtgctcatctccgccgatcaagaagaaagaagaaaaaatctgaggctgatcttgttacttcatctggtcggcgagtcattaggaaaagatttttggatgatcctggtgtagccacagtgtcaaggccacatagaggaaggaaatctaggaatggatgttctagtaaaaagaaaagatcccctaaatccaggggtttgcgacctcggagacgtgctgctgaaaccgcattaattactttcccaaagaaaggagtttcaacagaagaggatgaagatgactccgagagtttctcagatagtgaattgaacacggatagcactgaagctgaacagttagaatggagtggtcagttaagaactagaagagagattaactccccatttgacatcgatgatgttacagatccttctcagtttactgataataaggaaaattctggaactggtaagaaactagttctcagaataccacgacgtgatttaagaactcaatttcctttaggaagcggaaaagcagaatgctccatacaggataaagcagtgaagtctctttctctagctaatcatgaaccagttgagcacgaactgactattgaaccaggacattcccctgcctccaaggctgaattaacaattgatggtgatctgcatgatagttctgctgtttgcagtaataactcaattaggtggggtgaggttaagatgcgatcctcaaagcgttgcaagtacagtgagccagctggaggtttgtggtcctcttcaaataacgttgctttgcaggatatcgagggatcgagcagtcagcagatacctcatgaatatggcgatggcatccagccaagtgttgtgcaaaacgtacaagaagtgcaacatggaacaattctagataacattccggaaaacaacagtactgatgaacacactagagaaaattttggggatttagaaaagatagctaacaatattaatgctcatgcagacggagtgaatgacactgtacaagttcccaatacttctcagcctcaactaaaagttaagtttaagtcaagaggctctgcagatgcagtaggaaatatcatgaactccaagcatgtcaaagattcagtgcagtgtggcgatgattcttccatcaatcaaccaagaaatgctgacttctatattgtgcccaaaagttctcaggaatgcctagataaaagcactagtttgcatgattcaaaaaaaccgtacttggatgcttcaaagaagtacactgcagtgtacaaaaggtcaaagcgaaagaacaagaaaaaaatggattcagatgaatgtccgaacgaggatagcacttctatctccaatgacgatggtggataccaacctgcagaatacagtcctgttgcagctgcaagcagtagattgagaagaagtgctaggaagtcatttgcatacaatatcaatggtacaacacaggatgatatctcggaagtgaaagtttcttacggttcccatgaagcatcaactagtggaagacgagttgtcacagatgtgcgtgaagggatgtggcgacaaaactcaagaagtgttggtttaaggtctgctaggaacaaaagagaaagtaacagcttccttgatacacatccattgggtagaaggcaccaggtttcttttaagtattcatggttaatgttgcttgagcatgaagatagctaccgttatattcctcaactcgatgatgaggttatgtacttggggcagggccatgaggaatatcttaaacaagtgcaatcatctgaattttgcccttggaaccggataaaaggacttaaagctgtagaactttgcaaaatacagggtcttgattatgccacctacagaggatctggtgaaagctgctgtaaattaaccattgaatttgttgattgcacgtccagtggatttggcaaaacatttatgatcacgttgcgtgagctggtcaactttccagattttcttgtggagagaacaaggtacgaagctgctatggagcggaactggacccacagagacaagtgcaaagtctggtggagggacgaagaaggacaggtaggaggaacttggtgggagggacgggtgatggcagtaacacctaaatcacctgattttcctgagagtccatgggaaaaatatgtcatacagtataaggaggatggttctgatcacgctcatagcccctgggaacttcatgagacaggcagtttatgggatccatggaaacatccacatatggatctcacggttcgagataaattgttatcagaaatggaaaatttacaggaaatgtcacacagggatcaggatcattatggtgtttttaaactggacaaggttgcagaaaagtcagatttcatcaacaggtttcctgttcaattttctattgaggtgatcaaggcaagattagcgaacaaatattacagaactctgggggctgtcagacatgataccactgtgatgctttcaaatgcagaatcttacttttcaaagagcagtgaaatgaccaaaaagatccgcaagctctctgagttgctcgaccagatcttttcatcactgtagggaacattgcttgatgcctgattgacaatttcccttttcgtttctgcaaaaaaaatttggccttaggcatcgagatgatttttactggtcctactgaggcattagagaattagccaaagtagttctcaggacagaaagggtttccggtgtagctccaaccagttaaactagttgctgatacaaagtgctcgttgctaacacatttgaccgtttgatctgttgtcaagatacaatggttcatcctattggacatgaaatattggggttttgttagagaagatgccaaggtgtaaatctggtggaggaaatgcattaactgataatttcattttgtacagacaccctcagcaataaaaggaaaaaaagaaatgtgcaacgttgtctattacattttggggtgacacatggtaactataatataggaaattagtggcacttttttcagcgtgcccaggcacgtattttatgttttttttatgacatcttttttggtcgca

SEQ ID NO: 71995 - DNA, 5662 bp, Zea Mays
tcgtacggggacgacaggacagcggcctccgccgtccctccgccgccgtaggtgccctgttcgtgccgcacgggcgctgccaaagcgccctccatatctggcatgcctctgagccgccgcagccgcgtcaccagagggttcgcagacaaggtccaggtggtgtattagacatgtctttcaggaagcgccaaccttccagtaacggagcttccattaatttagctcccctgggttttccaagtcaggaacttgagaaggttaatcctgtaaattcagtgatgtcaaccgattttgaatccatggatggtgttgatattgatatgagggaagtttactttctcattatgcattttttatctcatggtccattcaaacggacctttggagaattgtgcaatgaactcctagaacatcaactgctacctagaagataccatgcttggtattcacgtggtggtttccatagtggcgaagaaaatgatgatggcatatcactccctttggattatgtaaagctagctgagaggtacccccacattggtaaagaccacttggtgaagctattaaagcaactgatggctagttcttatcacccacacaacttgattggaagagtttctccaaatgctgctgatgtcccaacacttcttggctccaactccttttcacttcttccatctgacaggcaagataagggaactcccaggctgccaagttatcttcgttggcctcacattcagactgatcaagttcatggtctaagtttgagagagataggtggtttcactaagcattgtcgagctccctctgtacgtgcatcttgctatgccatcgcgaagccatccacccttgttgaaaagatgcaaatcataaagagattgagggggcatcaaaatgctgtgtattgtgctacctttgatcgcacagggcgttatgttattactggttctgatgaccgccttgttaaaatatgggcgatggaaacagcgttctgcctggctagctgccggggccatgaaggtgatattaccgatcttgcagtgagttccaataattctgtggtagcatcttcatctaatgatttcattattagagtgtctcagtgctcaaggggcatacaggggcagttactgctattgcatttagtccaaggccaggtgctgctttccagctgttgtcgtcatcagatgatgggacatgcaggatttgggatgccagatactctcaacaacctccaagactgtatacaccaaagcccccagatgttgcccctggtaagagtggtgatgcatcttccagcgccgctcaagttcagccaacaaatcaccagatcttatgttgtgcatttaatgctaatggaaccgtgtttgtcactggcagctcggacacttatgcaagggtctggaatgcttgcaagagttcttctgatgaacatgagcaaccgattcatgagatggatctattatgtgggcatgaaaatgatgtaaactatgtgcagtttagtggatgtgcagttgcatcaagatctttttcatctgattccagtcatacctctaaggaagaaaatagcctgaagttaagaaattcttggttcacgcataatattgttacctgctcccgtgatggcagtgcaattatatgggttccacgatctcggaggtcacatggaaagattggacgttggacgcgtgcttaccatcttaaagttcccccacctccaatggctcctcaaccacctcgaggtggtcctcgtcaaagataccagccaactcctcgtggtgtcaatatgatagtttggagtctggacaaccgctttgtgcttgctgctatcatggattgcagaatttgcgtatggaatgcttctgatgggagcttggtgcattcactgattggccataaggaatcaacgtttgtgctagatgtgcatccgttcaatcctcgtatagcaatgagtgctggatatgatgggaagacgatcatctgggatatatgggaagggaaacctgttcagatctatgaaacaggacaatttaaactagttgatgggaagttctctccatgaagttgggcgagtattcattattggaactgggcaaggagagtcccagaaagatgcaaaatatgatcagttcttccttggagactatcggcctctcattcgtgataccaatggaagtgtcattgatcaggaaacacagcttgcaccatacaggagaaatatgcaagaccttttgtgcgacgctggtatgataccatatccagagcccttccagagtatgtaccagaaacgccggttgggtacccttggtctcgagtggcggcctccctctgtaaattttgctgttggccccacttacaatgcaacaactggtgaataccaaactatcccaattattgatccggataggtgggaaccgcttccagagataacagatttcattgagcttgaacctgaaaatgaagttatctctgacgatactgattctgagtacaatggcatggatgagtattcaagtgaaggagaacaggatattatgagtggtgattcttcaggtacttcatattcgagtggagaaattgatgcagataaccctgatagtgctcatctccgccgatcaagaagaaagaagaaaaaatctgaggctgatcttgttacttcatctggtcggcgagtcattaggaaaagatttttggatgatcctggtgtagccacagtgtcaaggccacatagaggaaggaaatctaggaatggatgttctagtaaaaagaaaagatcccctaaatccaggggtttgcgacctcggagacgtgctgctgaaaccgcattaattactttcccaaagaaaggagtttcaacagaagaggatgaagatgactccgagagtttctcagatagtgaattgaacacggatagcactgaagctgaacagttagaatggagtggtcagttaagaactagaagagagattaactccccatttgacatcgatgatgttacagatccttctcagtttactgataataaggaaaattctggaactggtaagaaactagttctcagaataccacgacgtgatttaagaactcaatttcctttaggaagcggaaaagcagaatgctccatacaggataaagcagtgaagtctctttctctagctaatcatgaaccagttgagcacgaactgactattgaaccaggacattcccctgcctccaaggctgaattaacaattgatggtgatctgcatgatagttctgctgtttgcagtaataactcaattaggtggggtgaggttaagatgcgatcctcaaagcgttgcaagtacagtgagccagctggaggtttgtggtcctcttcaaataacgttgctttgcaggatatcgagggatcgagcagtcagcagatacctcatgaatatggcgatggcatccagccaagtgttgtgcaaaacgtacaagaagtgcaacatggaacaattctagataacattccggaaaacaacagtactgatgaacacactagagaaaattttggggatttagaaaagatagctaacaatattaatgctcatgcagacggagtgaatgacactgtacaagttcccaatacttctcagcctcaactaaaagttaagtttaagtcaagaggctctgcagatgcagtaggaaatatcatgaactccaagcatgtcaaagattcagtgcagtgtggcgatgattcttccatcaatcaaccaagaaatgctgacttctatattgtgcccaaaagttctcaggaatgcctagataaaagcactagtttgcatgattcaaaaaaaccgtacttggatgcttcaaagaagtacactgcagtgtacaaaaggtcaaagcgaaagaacaagaaaaaaatggattcagatgaatgtccgaacgaggatagcacttctatctccaatgacgatggtggataccaacctgcagaatacagtcctgttgcagctgcaagcagtagattgagaagaagtgctaggaagtcatttgcatacaatatcaatggtacaacacaggatgatatctcggaagtgaaagtttcttacggttcccatgaagcatcaactagtggaagacgagttgtcacagatgtgcgtgaagggatgtggcgacaaaactcaagaagtgttggtttaaggtctgctaggaacaaaagagaaagtaacagcttccttgatacacatccattgggtagaaggcaccaggtttcttttaagtattcatggttaatgttgcttgagcatgaagatagctaccgttatattcctcaactcgatgatgaggttatgtacttggggcagggccatgaggaatatcttaaacaagtgcaatcatctgaattttgcccttggaaccggataaaaggacttaaagctgtagaactttgcaaaatacagggtcttgattatgccacctacagaggatctggtgaaagctgctgtaaattaaccattgaatttgttgattgcacgtccagtggatttggcaaaacatttatgatcacgttgcgtgagctggtcaactttccagattttcttgtggagagaacaaggtacgaagctgctatggagcggaactggacccacagagacaagtgcaaagtctggtggagggacgaagaaggacaggtaggaggaacttggtgggagggacgggtgatggcagtaacacctaaatcacctgattttcctgagagtccatgggaaaaatatgtcatacagtataaggaggatggttctgatcacgctcatagcccctgggaacttcatgagacaggcagtttatgggatccatggaaacatccacatatggatctcacggttcgagataaattgttatcagaaatggaaaatttacaggaaatgtcacacagggatcaggatcattatggtgtttttaaactggacaaggttgcagaaaagtcagatttcatcaacaggtttcctgttcaattttctattgaggtgatcaaggcaagattagcgaacaaatattacagaactctgggggctgtcagacatgataccactgtgatgctttcaaatgcagaatcttacttttcaaagagcagtgaaatgaccaaaaagatccgcaagctctctgagttgctcgaccagatcttttcatcactgtagggaacattgcttgatgcctgattgacaatttcccttttcgtttctgcaaaaaaaatttggccttaggcatcgagatgatttttactggtcctactgaggcattagagaattagccaaagtagttctcaggacagaaagggtttccggtgtagctccaaccagttaaactagttgctgatacaaagtgctcgttgctaacacatttgaccgtttgatctgttgtcaagatacaatggttcatcctattggacatgaaatattggggttttgttagagaagatgccaaggtgtaaatctggtggaggaaatgcattaactgataatttcattttgtacagacaccctcagcaataaaaggaaaaaaagaaatgtgcaacgttgtctattacattttggggtgacacatggtaactataatataggaaattagtggcacttttttcagcgtgcccaggcacgtattttatgttttttttatgacatcttttttggtcgca

SEQ ID NO: 71996 - DNA, 6005 bp, Zea Mays
gcggcctccgccgtccctccgccgccgtaggtgccctgttcgtgccgcacgggcgctgccaaagcgccctccatatctggcatgcctctgagccgccgcagccgcgtcaccagagggttcgcagacaaggtccaggtggtgtattagacatgtctttcaggaagcgccaaccttccagtaacggagcttccattaatttagctcccctgggttttccaagtcaggaacttgagaaggttaatcctgtaaattcagtgatgtcaaccgattttgaatccatggatggtgttgatattgatatgagggaagtttactttctcattatgcattttttatctcatggtccattcaaacggacctttggagaattgtgcaatgaactcctagaacatcaactgctacctagaagataccatgcttggtattcacgtggtggtttccatagtggcgaagaaaatgatgatggcatatcactccctttggattatgtaaagctagctgagaggtacccccacattggtaaagaccacttggtgaagctattaaagcaactgatggctagttcttatcacccacacaacttgattggaagagtttctccaaatgctgctgatgtcccaacacttcttggctccaactccttttcacttcttccatctgacaggcaagataagggaactcccaggctgccaagttatcttcgttggcctcacattcagactgatcaagttcatggtctaagtttgagagagataggtggtttcactaagcattgtcgagctccctctgtacgtgcatcttgctatgccatcgcgaagccatccacccttgttgaaaagatgcaaatcataaagagattgagggggcatcaaaatgctgtgtattgtgctacctttgatcgcacagggcgttatgttattactggttctgatgaccgccttgttaaaatatgggcgatggaaacagcgttctgcctggctagctgccggggccatgaaggtgatattaccgatcttgcagtgagttccaataattctgtggtagcatcttcatctaatgatttcattattagagtgtggcgtatgcctgatggaatgccagtctcagtgctcaaggggcatacaggggcagttactgctattgcatttagtccaaggccaggtgctgctttccagctgttgtcgtcatcagatgatgggacatgcaggatttgggatgccagatactctcaacaacctccaagactgtatacaccaaagcccccagatgttgcccctggtaagagtggtgatgcatcttccagcgccgctcaagttcagccaacaaatcaccagatcttatgttgtgcatttaatgctaatggaaccgtgtttgtcactggcagctcggacacttatgcaagggtctggaatgcttgcaagagttcttctgatgaacatgagcaaccgattcatgagatggatctattatgtgggcatgaaaatgatgtaaactatgtgcagtttagtggatgtgcagttgcatcaagatctttttcatctgattccagtcatacctctaaggaagaaaatagcctgaagttaagaaattcttggtcagtattttgtttgtatatactgtttttttttcttttcttcttctaatgaaatgatacgcagctctcctgcgtgttcgagaaaataagtattttgtttgtccttatgttttgttttctccttctaaatgttcttatttatttccattaggcattagcggcatcagttcttatttgttgacccaagggtttcctttttattcagtcagttcttagttgttcaccttaatcaccttcaccagcgtcaaatggtgtcattttttgtttcaacaatcctccatcagttgagttggtcactatttttttttgctaggttcacgcataatattgttacctgctcccgtgatggcagtgcaattatatgggttccacgatctcggaggtcacatggaaagattggacgttggacgcgtgcttaccatcttaaagttcccccacctccaatggctcctcaaccacctcgaggtggtcctcgtcaaagataccagccaactcctcgtggtgtcaatatgatagtttggagtctggacaaccgctttgtgcttgctgctatcatggattgcagaatttgcgtatggaatgcttctgatgggagcttggtgcattcactgattggccataaggaatcaacgtttgtgctagatgtgcatccgttcaatcctcgtatagcaatgagtgctggatatgatgggaagacgatcatctgggatatatgggaagggaaacctgttcagatctatgaaacaggacaatttaaactagttgatgggaagttctctccggatggtacatcacttattttatcagatgaagttgggcgagtattcattattggaactgggcaaggagagtcccagaaagatgcaaaatatgatcagttcttccttggagactatcggcctctcattcgtgataccaatggaagtgtcattgatcaggaaacacagcttgcaccatacaggagaaatatgcaagaccttttgtgcgacgctggtatgataccatatccagagcccttccagagtatgtaccagaaacgccggttgggtacccttggtctcgagtggcggcctccctctgtaaattttgctgttggccccacttacaatgcaacaactggtgaataccaaactatcccaattattgatccggataggtgggaaccgcttccagagataacagatttcattgagcttgaacctgaaaatgaagttatctctgacgatactgattctgagtacaatggcatggatgagtattcaagtgaaggagaacaggatattatgagtggtgattcttcaggtacttcatattcgagtggagaaattgatgcagataaccctgatagtgctcatctccgccgatcaagaagaaagaagaaaaaatctgaggctgatcttgttacttcatctggtcggcgagtcattaggaaaagatttttggatgatcctggtgtagccacagtgtcaaggccacatagaggaaggaaatctaggaatggatgttctagtaaaaagaaaagatcccctaaatccaggggtttgcgacctcggagacgtgctgctgaaaccgcattaattactttcccaaagaaaggagtttcaacagaagaggatgaagatgactccgagagtttctcagatagtgaattgaacacggatagcactgaagctgaacagttagaatggagtggtcagttaagaactagaagagagattaactccccatttgacatcgatgatgttacagatccttctcagtttactgataataaggaaaattctggaactggtaagaaactagttctcagaataccacgacgtgatttaagaactcaatttcctttaggaagcggaaaagcagaatgctccatacaggataaagcagtgaagtctctttctctagctaatcatgaaccagttgagcacgaactgactattgaaccaggacattcccctgcctccaaggctgaattaacaattgatggtgatctgcatgatagttctgctgtttgcagtaataactcaattaggtggggtgaggttaagatgcgatcctcaaagcgttgcaagtacagtgagccagctggaggtttgtggtcctcttcaaataacgttgctttgcaggatatcgagggatcgagcagtcagcagatacctcatgaatatggcgatggcatccagccaagtgttgtgcaaaacgtacaagaagtgcaacatggaacaattctagataacattccggaaaacaacagtactgatgaacacactagagaaaattttggggatttagaaaagatagctaacaatattaatgctcatgcagacggagtgaatgacactgtacaagttcccaatacttctcagcctcaactaaaagttaagtttaagtcaagaggctctgcagatgcagtaggaaatatcatgaactccaagcatgtcaaagattcagtgcagtgtggcgatgattcttccatcaatcaaccaagaaatgctgacttctatattgtgcccaaaagttctcaggaatgcctagataaaagcactagtttgcatgattcaaaaaaaccgtacttggatgcttcaaagaagtacactgcagtgtacaaaaggtcaaagcgaaagaacaagaaaaaaatggattcagatgaatgtccgaacgaggatagcacttctatctccaatgacgatggtggataccaacctgcagaatacagtcctgttgcagctgcaagcagtagattgagaagaagtgctaggaagtcatttgcatacaatatcaatggtacaacacaggatgatatctcggaagtgaaagtttcttacggttcccatgaagcatcaactagtggaagacgagttgtcacagatgtgcgtgaagggatgtggcgacaaaactcaagaagtgttggtttaaggtctgctaggaacaaaagagaaagtaacagcttccttgatacacatccattgggtagaaggcaccaggtttcttttaagtattcatggttaatgttgcttgagcatgaagatagctaccgttatattcctcaactcgatgatgaggttatgtacttggggcagggccatgaggaatatcttaaacaagtgcaatcatctgaattttgcccttggaaccggataaaaggacttaaagctgtagaactttgcaaaatacagggtcttgattatgccacctacagaggatctggtgaaagctgctgtaaattaaccattgaatttgttgattgcacgtccagtggatttggcaaaacatttatgatcacgttgcgtgagctggtcaactttccagattttcttgtggagagaacaaggtacgaagctgctatggagcggaactggacccacagagacaagtgcaaagtctggtggagggacgaagaaggacaggtaggaggaacttggtgggagggacgggtgatggcagtaacacctaaatcacctgattttcctgagagtccatgggaaaaatatgtcatacagtataaggaggatggttctgatcacgctcatagcccctgggaacttcatgagacaggcagtttatgggatccatggaaacatccacatatggatctcacggttcgagataaattgttatcagaaatggaaaatttacaggaaatgtcacacagggatcaggatcattatggtgtttttaaactggacaaggttgcagaaaagtcagatttcatcaacaggtttcctgttcaattttctattgaggtgatcaaggcaagattagcgaacaaatattacagaactctgggggctgtcagacatgataccactgtgatgctttcaaatgcagaatcttacttttcaaagagcagtgaaatgaccaaaaagatccgcaagctctctgagttgctcgaccagatcttttcatcactgtagggaacattgcttgatgcctgattgacaatttcccttttcgtttctgcaaaaaaaatttggccttaggcatcgagatgatttttactggtcctactgaggcattagagaattagccaaagtagttctcaggacagaaagggtttccggtgtagctccaaccagttaaactagttgctgatacaaagtgctcgttgctaacacatttgaccgtttgatctgttgtcaagatacaatggttcatcctattggacatgaaatattggggttttgttagagaagatgccaaggtgtaaatctggtggaggaaatgcattaactgataatttcattttgtacagacaccctcagcaataaaaggaaaaaaagaaatgtgcaacgttgtctattacattttggggtgacacatggtaactataatataggaaattagtggcacttttttcagcgtgcccaggcacgtattttatgttttttttatgacatcttttttggtcgca

SEQ ID NO: 71997 - DNA, 5583 bp, Zea Mays
tgggagcctccgtcactactcactgggtggtgtattagacatgtctttcaggaagcgccaaccttccagtaacggagcttccattaatttagctcccctgggttttccaagtcaggaacttgagaaggttaatcctgtaaattcagtgatgtcaaccgattttgaatccatggatggtgttgatattgatatgagggaagtttactttctcattatgcattttttatctcatggtccattcaaacggacctttggagaattgtgcaatgaactcctagaacatcaactgctacctagaagataccatgcttggtattcacgtggtggtttccatagtggcgaagaaaatgatgatggcatatcactccctttggattatgtaaagctagctgagaggtacccccacattggtaaagaccacttggtgaagctattaaagcaactgatggctagttcttatcacccacacaacttgattggaagagtttctccaaatgctgctgatgtcccaacacttcttggctccaactccttttcacttcttccatctgacaggcaagataagggaactcccaggctgccaagttatcttcgttggcctcacattcagactgatcaagttcatggtctaagtttgagagagataggtggtttcactaagcattgtcgagctccctctgtacgtgcatcttgctatgccatcgcgaagccatccacccttgttgaaaagatgcaaatcataaagagattgagggggcatcaaaatgctgtgtattgtgctacctttgatcgcacagggcgttatgttattactggttctgatgaccgccttgttaaaatatgggcgatggaaacagcgttctgcctggctagctgccggggccatgaaggtgatattaccgatcttgcagtgagttccaataattctgtggtagcatcttcatctaatgatttcattattagagtgtggcgtatgcctgatggaatgccagtctcagtgctcaaggggcatacaggggcagttactgctattgcatttagtccaaggccaggtgctgctttccagctgttgtcgtcatcagatgatgggacatgcaggatttgggatgccagatactctcaacaacctccaagactgtatacaccaaagcccccagatgttgcccctggtaagagtggtgatgcatcttccagcgccgctcaagttcagccaacaaatcaccagatcttatgttgtgcatttaatgctaatggaaccgtgtttgtcactggcagctcggacacttatgcaagggtctggaatgcttgcaagagttcttctgatgaacatgagcaaccgattcatgagatggatctattatgtgggcatgaaaatgatgtaaactatgtgcagtttagtggatgtgcagttgcatcaagatctttttcatctgattccagtcatacctctaaggaagaaaatagcctgaagttaagaaattcttggttcacgcataatattgttacctgctcccgtgatggcagtgcaattatatgggttccacgatctcggaggtcacatggaaagattggacgttggacgcgtgcttaccatcttaaagttcccccacctccaatggctcctcaaccacctcgaggtggtcctcgtcaaagataccagccaactcctcgtggtgtcaatatgatagtttggagtctggacaaccgctttgtgcttgctgctatcatggattgcagaatttgcgtatggaatgcttctgatgggagcttggtgcattcactgattggccataaggaatcaacgtttgtgctagatgtgcatccgttcaatcctcgtatagcaatgagtgctggatatgatgggaagacgatcatctgggatatatgggaagggaaacctgttcagatctatgaaacaggacaatttaaactagttgatgggaagttctctccggatggtacatcacttattttatcagatgaagttgggcgagtattcattattggaactgggcaaggagagtcccagaaagatgcaaaatatgatcagttcttccttggagactatcggcctctcattcgtgataccaatggaagtgtcattgatcaggaaacacagcttgcaccatacaggagaaatatgcaagaccttttgtgcgacgctggtatgataccatatccagagcccttccagagtatgtaccagaaacgccggttgggtacccttggtctcgagtggcggcctccctctgtaaattttgctgttggccccacttacaatgcaacaactggtgaataccaaactatcccaattattgatccggataggtgggaaccgcttccagagataacagatttcattgagcttgaacctgaaaatgaagttatctctgacgatactgattctgagtacaatggcatggatgagtattcaagtgaaggagaacaggatattatgagtggtgattcttcaggtacttcatattcgagtggagaaattgatgcagataaccctgatagtgctcatctccgccgatcaagaagaaagaagaaaaaatctgaggctgatcttgttacttcatctggtcggcgagtcattaggaaaagatttttggatgatcctggtgtagccacagtgtcaaggccacatagaggaaggaaatctaggaatggatgttctagtaaaaagaaaagatcccctaaatccaggggtttgcgacctcggagacgtgctgctgaaaccgcattaattactttcccaaagaaaggagtttcaacagaagaggatgaagatgactccgagagtttctcagatagtgaattgaacacggatagcactgaagctgaacagttagaatggagtggtcagttaagaactagaagagagattaactccccatttgacatcgatgatgttacagatccttctcagtttactgataataaggaaaattctggaactggtaagaaactagttctcagaataccacgacgtgatttaagaactcaatttcctttaggaagcggaaaagcagaatgctccatacaggataaagcagtgaagtctctttctctagctaatcatgaaccagttgagcacgaactgactattgaaccaggacattcccctgcctccaaggctgaattaacaattgatggtgatctgcatgatagttctgctgtttgcagtaataactcaattaggtggggtgaggttaagatgcgatcctcaaagcgttgcaagtacagtgagccagctggaggtttgtggtcctcttcaaataacgttgctttgcaggatatcgagggatcgagcagtcagcagatacctcatgaatatggcgatggcatccagccaagtgttgtgcaaaacgtacaagaagtgcaacatggaacaattctagataacattccggaaaacaacagtactgatgaacacactagagaaaattttggggatttagaaaagatagctaacaatattaatgctcatgcagacggagtgaatgacactgtacaagttcccaatacttctcagcctcaactaaaagttaagtttaagtcaagaggctctgcagatgcagtaggaaatatcatgaactccaagcatgtcaaagattcagtgcagtgtggcgatgattcttccatcaatcaaccaagaaatgctgacttctatattgtgcccaaaagttctcaggaatgcctagataaaagcactagtttgcatgattcaaaaaaaccgtacttggatgcttcaaagaagtacactgcagtgtacaaaaggtcaaagcgaaagaacaagaaaaaaatggattcagatgaatgtccgaacgaggatagcacttctatctccaatgacgatggtggataccaacctgcagaatacagtcctgttgcagctgcaagcagtagattgagaagaagtgctaggaagtcatttgcatacaatatcaatggtacaacacaggatgatatctcggaagtgaaagtttcttacggttcccatgaagcatcaactagtggaagacgagttgtcacagatgtgcgtgaagggatgtggcgacaaaactcaagaagtgttggtttaaggtctgctaggaacaaaagagaaagtaacagcttccttgatacacatccattgggtagaaggcaccaggtttcttttaagtattcatggttaatgttgcttgagcatgaagatagctaccgttatattcctcaactcgatgatgaggttatgtacttggggcagggccatgaggaatatcttaaacaagtgcaatcatctgaattttgcccttggaaccggataaaaggacttaaagctgtagaactttgcaaaatacagggtcttgattatgccacctacagaggatctggtgaaagctgctgtaaattaaccattgaatttgttgattgcacgtccagtggatttggcaaaacatttatgatcacgttgcgtgagctggtcaactttccagattttcttgtggagagaacaaggtacgaagctgctatggagcggaactggacccacagagacaagtgcaaagtctggtggagggacgaagaaggacaggtaggaggaacttggtgggagggacgggtgatggcagtaacacctaaatcacctgattttcctgagagtccatgggaaaaatatgtcatacagtataaggaggatggttctgatcacgctcatagcccctgggaacttcatgagacaggcagtttatgggatccatggaaacatccacatatggatctcacggttcgagataaattgttatcagaaatggaaaatttacaggaaatgtcacacagggatcaggatcattatggtgtttttaaactggacaaggttgcagaaaagtcagatttcatcaacaggtttcctgttcaattttctattgaggtgatcaaggcaagattagcgaacaaatattacagaactctgggggctgtcagacatgataccactgtgatgctttcaaatgcagaatcttacttttcaaagagcagtgaaatgaccaaaaagatccgcaagctctctgagttgctcgaccagatcttttcatcactgtagggaacattgcttgatgcctgattgacaatttcccttttcgtttctgcaaaaaaaatttggccttaggcatcgagatgatttttactggtcctactgaggcattagagaattagccaaagtagttctcaggacagaaagggtttccggtgtagctccaaccagttaaactagttgctgatacaaagtgctcgttgctaacacatttgaccgtttgatctgttgtcaagatacaatggttcatcctattggacatgaaatattggggttttgttagagaagatgccaaggtgtaaatctggtggaggaaatgcattaactgataatttcattttgtacagacaccctcagcaataaaaggaaaaaaagaaatgtgcaacgttgtctattacattttggggtgacacatggtaactataatataggaaattagtggcacttttttcagcgtgcccaggcacgtattttatgttttttttatgacatcttttttggtcgca

SEQ ID NO: 71998 - DNA, 4685 bp, Zea Mays
cgatcttgcagtgagttccaataattctgtggtagcatcttcatctaatgatttcattattagagtgtctcagtgctcaaggggcatacaggggcagttactgctattgcatttagtccaaggccaggtgctgctttccagctgttgtcgtcatcagatgatgggacatgcaggatttgggatgccagatactctcaacaacctccaagactgtatacaccaaagcccccagatgttgcccctggtaagagtggtgatgcatcttccagcgccgctcaagttcagccaacaaatcaccagatcttatgttgtgcatttaatgctaatggaaccgtgtttgtcactggcagctcggacacttatgcaagggtctggaatgcttgcaagagttcttctgatgaacatgagcaaccgattcatgagatggatctattatgtgggcatgaaaatgatgtaaactatgtgcagtttagtggatgtgcagttgcatcaagatctttttcatctgattccagtcatacctctaaggaagaaaatagcctgaagttaagaaattcttggttcacgcataatattgttacctgctcccgtgatggcagtgcaattatatgggttccacgatctcggaggtcacatggaaagattggacgttggacgcgtgcttaccatcttaaagttcccccacctccaatggctcctcaaccacctcgaggtggtcctcgtcaaagataccagccaactcctcgtggtgtcaatatgatagtttggagtctggacaaccgctttgtgcttgctgctatcatggattgcagaatttgcgtatggaatgcttctgatgggagcttggtgcattcactgattggccataaggaatcaacgtttgtgctagatgtgcatccgttcaatcctcgtatagcaatgagtgctggatatgatgggaagacgatcatctgggatatatgggaagggaaacctgttcagatctatgaaacaggacaatttaaactagttgatgggaagttctctccggatggtacatcacttattttatcagatgaagttgggcgagtattcattattggaactgggcaaggagagtcccagaaagatgcaaaatatgatcagttcttccttggagactatcggcctctcattcgtgataccaatggaagtgtcattgatcagctgttcccttctgcttcatatatgtaggaaacacagcttgcaccatacaggagaaatatgcaagaccttttgtgcgacgctggtatgataccatatccagagcccttccagagtatgtaccagaaacgccggttgggtacccttggtctcgagtggcggcctccctctgtaaattttgctgttggccccacttacaatgcaacaactggtgaataccaaactatcccaattattgatccggataggtgggaaccgcttccagagataacagatttcattgagcttgaacctgaaaatgaagttatctctgacgatactgattctgagtacaatggcatggatgagtattcaagtgaaggagaacaggatattatgagtggtgattcttcaggtacttcatattcgagtggagaaattgatgcagataaccctgatagtgctcatctccgccgatcaagaagaaagaagaaaaaatctgaggctgatcttgttacttcatctggtcggcgagtcattaggaaaagatttttggatgatcctggtgtagccacagtgtcaaggccacatagaggaaggaaatctaggaatggatgttctagtaaaaagaaaagatcccctaaatccaggggtttgcgacctcggagacgtgctgctgaaaccgcattaattactttcccaaagaaaggagtttcaacagaagaggatgaagatgactccgagagtttctcagatagtgaattgaacacggatagcactgaagctgaacagttagaatggagtggtcagttaagaactagaagagagattaactccccatttgacatcgatgatgttacagatccttctcagtttactgataataaggaaaattctggaactggtaagaaactagttctcagaataccacgacgtgatttaagaactcaatttcctttaggaagcggaaaagcagaatgctccatacaggataaagcagtgaagtctctttctctagctaatcatgaaccagttgagcacgaactgactattgaaccaggacattcccctgcctccaaggctgaattaacaattgatggtgatctgcatgatagttctgctgtttgcagtaataactcaattaggtggggtgaggttaagatgcgatcctcaaagcgttgcaagtacagtgagccagctggaggtttgtggtcctcttcaaataacgttgctttgcaggatatcgagggatcgagcagtcagcagatacctcatgaatatggcgatggcatccagccaagtgttgtgcaaaacgtacaagaagtgcaacatggaacaattctagataacattccggaaaacaacagtactgatgaacacactagagaaaattttggggatttagaaaagatagctaacaatattaatgctcatgcagacggagtgaatgacactgtacaagttcccaatacttctcagcctcaactaaaagttaagtttaagtcaagaggctctgcagatgcagtaggaaatatcatgaactccaagcatgtcaaagattcagtgcagtgtggcgatgattcttccatcaatcaaccaagaaatgctgacttctatattgtgcccaaaagttctcaggaatgcctagataaaagcactagtttgcatgattcaaaaaaaccgtacttggatgcttcaaagaagtacactgcagtgtacaaaaggtcaaagcgaaagaacaagaaaaaaatggattcagatgaatgtccgaacgaggatagcacttctatctccaatgacgatggtggataccaacctgcagaatacagtcctgttgcagctgcaagcagtagattgagaagaagtgctaggaagtcatttgcatacaatatcaatggtacaacacaggatgatatctcggaagtgaaagtttcttacggttcccatgaagcatcaactagtggaagacgagttgtcacagatgtgcgtgaagggatgtggcgacaaaactcaagaagtgttggtttaaggtctgctaggaacaaaagagaaagtaacagcttccttgatacacatccattgggtagaaggcaccaggtttcttttaagtattcatggttaatgttgcttgagcatgaagatagctaccgttatattcctcaactcgatgatgaggttatgtacttggggcagggccatgaggaatatcttaaacaagtgcaatcatctgaattttgcccttggaaccggataaaaggacttaaagctgtagaactttgcaaaatacagggtcttgattatgccacctacagaggatctggtgaaagctgctgtaaattaaccattgaatttgttgattgcacgtccagtggatttggcaaaacatttatgatcacgttgcgtgagctggtcaactttccagattttcttgtggagagaacaaggtacgaagctgctatggagcggaactggacccacagagacaagtgcaaagtctggtggagggacgaagaaggacaggtaggaggaacttggtgggagggacgggtgatggcagtaacacctaaatcacctgattttcctgagagtccatgggaaaaatatgtcatacagtataaggaggatggttctgatcacgctcatagcccctgggaacttcatgagacaggcagtttatgggatccatggaaacatccacatatggatctcacggttcgagataaattgttatcagaaatggaaaatttacaggaaatgtcacacagggatcaggatcattatggtgtttttaaactggacaaggttgcagaaaagtcagatttcatcaacaggtttcctgttcaattttctattgaggtgatcaaggcaagattagcgaacaaatattacagaactctgggggctgtcagacatgataccactgtgatgctttcaaatgcagaatcttacttttcaaagagcagtgaaatgaccaaaaagatccgcaagctctctgagttgctcgaccagatcttttcatcactgtagggaacattgcttgatgcctgattgacaatttcccttttcgtttctgcaaaaaaaatttggccttaggcatcgagatgatttttactggtcctactgaggcattagagaattagccaaagtagttctcaggacagaaagggtttccggtgtagctccaaccagttaaactagttgctgatacaaagtgctcgttgctaacacatttgaccgtttgatctgttgtcaagatacaatggttcatcctattggacatgaaatattggggttttgttagagaagatgccaaggtgtaaatctggtggaggaaatgcattaactgataatttcattttgtacagacaccctcagcaataaaaggaaaaaaagaaatgtgcaacgttgtctattacattttggggtgacacatggtaactataatataggaaattagtggcacttttttcagcgtgcccaggcacgtattttatgttttttttatgacatcttttttggtcgca

SEQ ID NO: 71999 - DNA, 1572 bp, Zea Mays
gtttgttacgaaaatgtgactattttctgatattggattttttcaatgaaactagttctcaatttactgacacgcgtgcatgcacacacgcgcacgcgcacacaggctagcactacttatcacctagggtgaagcttcacctggaccaaccccgtatcgcccctcgcgccgcctcatcccagcgagtgctgggaatcaggatggctcgacctaggcccatcgtgcttcggttcaaacaagcttgggctgataaggcccaaaaaacttttaggccgtgtcgtgccagcccaaagagtagaaaaagttgtacggcccgaccctaaagcacaccgtgccttcatagcacgacccatatatttgaaccacataaagtccaaacattttttaacataatgacaggagctctgtctttccattaagaagattagaattgacccagttttagggaaaactgggccctaaacctacacagagtgcccaaacaacacaggcaacaacaaccccacacacaaagcccatccggactccagagtcatcattgccgagctcaacacaaggtacgggcagctctgactttgccagacgggccgcacatggccaaaagaaacatgatgacgcctactctaaagtctaaaacctgacacaaaaggaggaagattgtgatgcgccatcattgccaaacctcaacacacctacactcgaggcagctccaattcttcatcaacgacctcgatccaacacccacctccatttttttgcctgatgtccaaaacaacccaggccatgaggaagggggtttgcctcatgtcatcgttgtcgagccacatcctctaacgtggcagcttcgacttcacgttgcaaaaaatcccacctccactcgcaatccagacgccgctccactcgcaatccagacgccgagaagcgaaagcagcaactgaaggcaacgtcgaggccgagacgaacttcaaacatgacgccttcaaggagtgacgtgtaggaagccatcgtcacatgtccgagatggaccgagctttcgcccaaggaagacagagcaacacgacaccctcaatagggggaagtggcgcccacaggcgtcatcctcgccgatgctttcgcccaagatgccctccaacacatcgaggccaggacccaggtcaaagcatgcagcctccgccgtcgccactgccctggcccccgcgcaaaccccttcagacggacatcgacgcgctggctgccgcagcagccgcaaagttgcgtcagctgccatccccccgggttggcacacaaaaccagggaacaccttgtcgtgtgcgccacattgccacccgccagagtcgaaaccggttgccgccattggccctgacacccgcgaccattgaaactggcactccagcgctcaaccctgaacaatacaaaggggccggaccgacggaggacaccttgctcgcaccatggcctttcattgtgaactccagccgcgcaagagccacgacccagatccggtcgagggaggcaccggtgctccacccagcacaagatgaagaggctgacccggcgatggaagccctgcac

SEQ ID NO: 72000 - DNA, 2431 bp, Zea Mays
cataaacgaagccctactaacccgagcctataaaaaaacgaatataggtaatggattcaaagagctaaatccgccgccatcccaaccgccctatagcagtccaccgctgttaagcacagtacgatttgccactcttctttttgccctaatacatattccatatatctatccctgttcgcatcacgactcgcgagctcccggtcccaaaccctaggcctagggggcgacctgacccgatgtcagcgtcttacggatccgaagactaccgcggcggcggcggtggcggaggctacggtggccgaggtggcggcggcggtcgtgggcgcggaggcgggggaggatatggaggtggcggcggtggaggaggatatggaggtggcggtagtggaggctacggcggcggcgggggtggaggtggccgaggcagtggcggcggagggttcggtggtggaggacgaggaggtggtggaggtggccgaggcggtggcgggcgcgggggtggacgcgaaggagactgggtttgccctgacgcgagttgtggcaatgtgaactttgcgaggagggctgaatgcaataagtgtggagcaccttgcccaagtggaggtggtggcggcgggggtgggggttataatagatctggtggaggtggtggaggatacaaccgtggcagtggtgattatggttctggaggtggtggtttcgaccgagatggtggagactataattctggtgggcgtggtggtggaagcgggggtggaggaggctacaatcgaagtggtggcagtgaccgtggttttgatgaccaccgtggtggcagaggtggcagctatgggggacgagatcaggagaaccaaaggggtagtgaaggtggctacagtgctggtggctatgggcaagctcctccacaagctcctccttcgtatggtggtcctgcgggtgattatgcagcacctccgagctcctatggaggcaacaatgcttatggttcagattctgcagtgccgcctcctaatagctacagtggtggcccaggctcatacccaccaagctatggtgccccgcctccacaccaatatggtggtgccccaggggggcaagggggtctgcctcctacatatgatggtggatatggtggtcggtccatgcctgggggtggaggatctgggggtgcaccaccgccttatcatggtggcggcagcggttatactggtagtgctgaccctgaaccagctggaaaagttaagcagtgcgatgaaaattgtgacgagacatgtgacaacgcaaggatttacatctcaaatttgcctcctgatgtcactgttgaggaattacaagagctatttggaggaatcggccaggtcggaaggatcaagcaaaagcgtggttacaaagatcagtggccttggaacataaaaatctatgctgatgactctggaaaagccaaaggagatgcttgccttgcttatgaagatccttctgctgctcattcagctggtggattttacaataattatgacatgagaggttataaaatcagtgttgtgatggctgagaaatcagcacccagagcggcaccctcatatgggcatggcggtggtcgtggtggtggccgcggtggtggtggacgcagggataattacagagatggcggggggcatggacccaatagaaaccagggtggtggttcacgttcacgaccatactgaaaacaaaacaattgttgttactgtgattgtcatctatgagaaaccatttctattcctgttatacagatttgtactcatacaggctcataagaggcagatggatataagctccaaatgctggtaggtttgtgatgttatttcagccggtggatcactcatgtaagctttggattttgctgcgaagaacaggttgcagccccatcacttgtgccctaactcatcgtccccagcaacacgatatgacgtgtgttgaagtggtgatctataagtagaaaaggagctgaattgagtgaattgttgcttcatctgcccccgtgatgcctctcgaattgggactgggagctcgtgacttacagcacttgccacgaatgggaaaccctctgctccaaaggaagcagttcaagcatatcgacgtgcttgcagggtcatcgctaaaaataatgtctcgaccacatgctaagattggaggttgttgtccgattatatatgttacaaaatattacatatgtgatcaatccaaggggtgtaacagttttctcaaagggacacactccttgggatacgctccttcacttgtatataagtgtaatgatctctggaatacaatcagtggctgtcacattctctccattctctgtgtcctgttttcactgcgctttaacactatcaagatggataggtgagtacccgtacgttgcaacgagaacatataataacataataat

SEQ ID NO: 72001 - DNA, 2452 bp, Zea Mays
cccaaccgccctatagcagtccaccgctgttaagcacagtacgatttgccactcttctttttgccctaatacatattccatatatctatccctgttcgcatcacgactcgcgagctcccggtcccaaaccctaggcctagggggcgacctgacccgatgtcagcgtcttacggatccgaagactaccgcggcggcggcggtggcggaggctacggtggccgaggtggcggcggtggaggaggatatggaggtggcggtagtggaggctacggcggcggcgggggtggaggtggccgaggcagtggcggcggagggttcggtggtggaggacgaggaggtggtggaggtggccgaggcggtggcgggcgcgggggtggacgcgaaggagactgggtttgccctgacgcgagttgtggcaatgtgaactttgcgaggagggctgaatgcaataagtgtggagcaccttgcccaagtggaggtggtggcggcgggggtgggggttataatagatctggtggaggtggtggaggatacaaccgtggcagtggtgattatggttctggaggtggtggtttcgaccgagatggtggagactataattctggtgggcgtggtggtggaagcgggggtggaggaggctacaatcgaagtggtggcagtgaccgtggttttgatgaccaccgtggtggcagaggtggcagctatgggggacgagatcaggagaaccaaaggggtagtgaaggtggctacagtgctggtggctatgggcaagctcctccacaagctcctccttcgtatggtggtcctgcgggtgattatgcagcacctccgagctcctatggaggcaacaatgcttatggttcagattctgcagtgccgcctcctaatagctacagtggtggcccaggctcatacccaccaagctatggtgccccgcctccacaccaatatggtggtgccccaggggggcaagggggtctgcctcctacatatgatggtggatatggtggtcggtccatgcctgggggtggaggatctgggggtgcaccaccgccttatcatggtggcggcagcggttatactggtagtgctgaccctgaaccagctggaaaagttaagcagtgcgatgaaaattgtgacgagacatgtgacaacgcaaggatttacatctcaaatttgcctcctgatgtcactgttgaggaattacaagagctatttggaggaatcggccaggtcggaaggatcaagcaaaagcgtggttacaaagatcagtggccttggaacataaaaatctatgctgatgactctggaaaagccaaaggagatgcttgccttgcttatgaagatccttctgctgctcattcagctggtggattttacaataattatgacatgagaggttataaaatcagtgttgtgatggctgagaaatcagcacccagagcggcaccctcatatgggcatggcggtggtcgtggtggtggccgcggtggtggtggacgcagggataattacagagatggcggggggcatggacccaatagaaaccagggtggtggttcacgttcacgaccatactgaaaacaaaacaattgttgttactgtgattgtcatctatgagaaaccatttctattcctgttatacagatttgtactcatacaggctcataagaggcagatggatataagctccaaatgctggtaggtttgtgatgttatttcagccggtggatcactcatgtaagctttggattttgctgcgaagaacaggtagggaggttttgttctgtgttaggtttattagatttcgtgtacattagacgacatatcaaccaccaatcatagaacgttccatatccgtttctgcttctgggcactcagcttattttggtgaaagagccaatttttttatcaaggttgcagccccatcacttgtgccctaactcatcgtccccagcaacacgatatgacgtgtgttgaagtggtgatctataagtagaaaaggagctgaattgagtgaattgttgcttcatctgcccccgtgatgcctctcgaattgggactgggagctcgtgacttacagcacttgccacgaatgggaaaccctctgctccaaaggaagcagttcaagcatatcgacgtgcttgcagggtcatcgctaaaaataatgtctcgaccacatgctaagattggaggttgttgtccgattatatatgttacaaaatattacatatgtgatcaatccaaggggtgtaacagttttctcaaagggacacactccttgggatacgctccttcacttgtatataagtgtaatgatctctggaatacaatcagtggctgtcacattctctccattctctgtgtcctgttttcactgcgctttaacactatcaagatggataggtgagtacccgtacgttgcaacgagaacatataataacataataat

SEQ ID NO: 72002 - DNA, 2302 bp, Zea Mays
caaccgccctatagcagtccaccgctgttaagcacagtacgatttgccactcttctttttgccctaatacatattccatatatctatccctgttcgcatcacgactcgcgagctcccggtcccaaaccctaggcctagggggcgacctgacccgatgtcagcgtcttacggatccgaagactaccgcggcggcggcggtggcggaggctacggtggccgaggtggcggcggcggtcgtgggcgcggaggcgggggaggatatggaggtggcggcggtggaggaggatatggaggtggcggtagtggaggctacggcggcggcgggggtggaggtggccgaggcagtggcggcggagggttcggtggtggaggacgaggaggtggtggaggtggccgaggcggtggcgggcgcgggggtggacgcgaaggagactgggtttgccctgacgcgagttgtggcaatgtgaactttgcgaggagggctgaatgcaataagtgtggagcaccttgcccaagtggaggtggtggcggcgggggtgggggttataatagatctggtggaggtggtggaggatacaaccgtggcagtggtgattatggttctggaggtggtggtttcgaccgagatggtggagactataattctggtgggcgtggtggtggaagcgggggtggaggaggctacaatcgaagtggtggcagtgaccgtggttttgatgaccaccgtggtggcagaggtggcagctatgggggacgagatcaggagaaccaaaggggtagtgaaggtggctacagtgctggtggctatgggcaagctcctccacaagctcctccttcgtatggtggtcctgcgggtgattatgcagcacctccgagctcctatggaggcaacaatgcttatggttcagattctgcagtgccgcctcctaatagctacagtggtggcccaggctcatacccaccaagctatggtgccccgcctccacaccaatatggtggtgccccaggggggcaagggggtctgcctcctacatatgatggtggatatggtggtcggtccatgcctgggggtggaggatctgggggtgcaccaccgccttatcatggtggcggcagcggttatactggtagtgctgaccctgaaccagctggaaaagttaagcagtgcgatgaaaattgtgacgagacatgtgacaacgcaaggatttacatctcaaatttgcctcctgatgtcactgttgaggaattacaagagctatttggaggaatcggccaggtcggaaggatcaagcaaaagcgtggttacaaagatcagtggccttggaacataaaaatctatgctgatgactctggaaaagccaaaggagatgcttgccttgcttatgaagatccttctgctgctcattcagctggtggattttacaataattatgacatgagaggttataaaatcagtgttgtgatggctgagaaatcagcacccagagcggcaccctcatatgggcatggcggtggtcgtggtggtggccgcggtggtggtggacgcagggataattacagagatggcggggggcatggacccaatagaaaccagggtggtggttcacgttcacgaccatactgaaaacaaaacaattgttgttactgtgattgtcatctatgagaaaccatttctattcctgttatacagatttgtactcatacaggctcataagatggatataagctccaaatgctggtaggtttgtgatgttatttcagccggtggatcactcatgtaagctttggattttgctgcgaagaacagcaacacgatatgacgtgtgttgaagtggtgatctataagtagaaaaggagctgaattgagtgaattgttgcttcatctgcccccgtgatgcctctcgaattgggactgggagctcgtgacttacagcacttgccacgaatgggaaaccctctgctccaaaggaagcagttcaagcatatcgacgtgcttgcagggtcatcgctaaaaataatgtctcgaccacatgctaagattggaggttgttgtccgattatatatgttacaaaatattacatatgtgatcaatccaaggggtgtaacagttttctcaaagggacacactccttgggatacgctccttcacttgtatataagtgtaatgatctctggaatacaatcagtggctgtcacattctctccattctctgtgtcctgttttcactgcgctttaacactatcaagatggataggtgagtacccgtacgttgcaacgagaacatataataacataataat

SEQ ID NO: 72003 - DNA, 3209 bp, Zea Mays
atcacgactcgcgagctcccggtcccaaaccctaggcctagggggcgacctgacccgatgtcagcgtcttacggatccgaagactaccgcggcggcggcggtggcggaggctacggtggccgaggtggcggcggcggtcgtgggcgcggaggcgggggaggatatggaggtggcggcggtggaggaggatatggaggtggcggtagtggaggctacggcggcggcgggggtggaggtggccgaggcagtggcggcggagggttcggtggtggaggacgaggaggtggtggaggtggccgaggcggtggcgggcgcgggggtggacgcgaaggagactgggtttgccctgacgcgagttgtggcaatgtgaactttgcgaggagggctgaatgcaataagtgtggagcaccttgcccaagtggaggtggtggcggcgggggtgggggttataatagatctggtggaggtggtggaggatacaaccgtggcagtggtgattatggttctggaggtggtggtttcgaccgagatggtggagactataattctggtgggcgtggtggtggaagcgggggtggaggaggctacaatcgaagtggtggcagtgaccgtggttttgatgaccaccgtggtggcagaggtggcagctatgggggacgagatcaggagaaccaaaggggtagtgaaggtggctacagtgctggtggctatgggcaagctcctccacaagctcctccttcgtatggtggtcctgcgggtgattatgcagcacctccgagctcctatggaggcaacaatgcttatggttcagattctgcagtgccgcctcctaatagctacagtggtggcccaggctcatacccaccaagctatggtgccccgcctccacaccaatatggtggtgccccaggggggcaagggggtctgcctcctacatatgatggtggatatggtggtcggtccatgcctgggggtggaggatctgggggtgcaccaccgccttatcatggtggcggcagcggttatactggtagtgctgaccctgaaccagctggaaaagttaagcagtgcgatgaaaattgtgacgagacatgtgacaacgcaaggatttacatctcaaatttgcctcctgatgtcactgttgaggaattacaagagctatttggaggaatcggccaggtcggaaggatcaagcaaaagcgtggttacaaagatcagtggccttggaacataaaaatctatgctgatgactctggaaaagccaaaggagatgcttgccttgcttatgaagatccttctgctgctcattcagctggtggattttacaataattatgacatgagaggttataaaatcagtgttgtgatggctgagaaatcagcacccagagcggcaccctcatatgggcatggacccagtgctagaggctccacatcagtggggtctggggaaggaataactggggcagaccttattcctgcattttgcagagaggatgcgttgaaccatggacctttggctcagtggaaaggcttctcaccactgtgtcaggcctgtcttccatagtctatggaatttcatctgcgtgacactttcagctacaaatgctaattcccaccagaaataaaaacacatgatcaactttatatgccgtgcactgttaccacttccattttgatttagcttttgaattagctttatttatagaaggatagatattgtccaaccaaactgagtttgcaaattgttctatcatacataagatactaacggttgatcagaaacacatagtcgaaaggtcatgacttgtgctttcattgaggcccttttgttatataattctaaataagtaatacatgggtggtaaatgttgatgttatcagctttggttggcttgaactctcctataacttcactgaagctaattagttgaacagagtaatattgtgatggatcgcagtaccaaatgctattaaaaaatactgagggggggatagtttgaatgtggccacaggcgaaacagttacgttttggtgtgctatattctcgtgtgcttatgtttacatattgaaattgtgtttgtaatatgtgaaccatgagtgatttcatcaaggtgattgcacaagtggaaaaggaaactcttcaaatttgtgtacttaatcatgcttcatgtggatgctccttttatgtaatttgggttgggttgtgtgatgtggtgtgcagcggtggtcgtggtggtggccgcggtggtggtggacgcagggataattacagagatggcggggggcatggacccaatagaaaccagggtggtggttcacgttcacgaccatactgaaaacaaaacaattgttgttactgtgattgtcatctatgagaaaccatttctattcctgttatacagatttgtactcatacaggctcataagaggcagatggatataagctccaaatgctggtaggtttgtgatgttatttcagccggtggatcactcatgtaagctttggattttgctgcgaagaacaggtagggaggttttgttctgtgttaggtttattagatttcgtgtacattagacgacatatcaaccaccaatcatagaacgttccatatccgtttctgcttctgggcactcagcttattttggtgaaagagccaatttttttatcaaggttgcagccccatcacttgtgccctaactcatcgtccccagcaacacgatatgacgtgtgttgaagtggtgatctataagtagaaaaggagctgaattgagtgaattgttgcttcatctgcccccgtgatgcctctcgaattgggactgggagctcgtgacttacagcacttgccacgaatgggaaaccctctgctccaaaggaagcagttcaagcatatcgacgtgcttgcagggtcatcgctaaaaataatgtctcgaccacatgctaagattggaggttgttgtccgattatatatgttacaaaatattacatatgtgatcaatccaaggggtgtaacagttttctcaaagggacacactccttgggatacgctccttcacttgtatataagtgtaatgatctctggaatacaatcagtggctgtcacattctctccattctctgtgtcctgttttcactgcgctttaacactatcaagatggataggtgagtacccgtacgttgcaacgagaacatataataacataataat

SEQ ID NO: 72004 - DNA, 2101 bp, Zea Mays
atgtcagcgtcttacggatccgaagactaccgcggcggcggcggtggcggaggctacggtggccgaggtggcggcggcggtcgtgggcgcggaggcgggggaggatatggaggtggcggcggtggaggaggatatggaggtggcggtagtggaggctacggcggcggcgggggtggaggatacaaccgtggcagtggtgattatggttctggaggtggtggtttcgaccgagatggtggagactataattctggtgggcgtggtggtggaagcgggggtggaggaggctacaatcgaagtggtggcagtgaccgtggttttgatgaccaccgtggtggcagaggtggcagctatgggggacgagatcaggagaaccaaaggggtagtgaaggtggctacagtgctggtggctatgggcaagctcctccacaagctcctccttcgtatggtggtcctgcgggtgattatgcagcacctccgagctcctatggaggcaacaatgcttatggttcagattctgcagtgccgcctcctaatagctacagtggtggcccaggctcatacccaccaagctatggtgccccgcctccacaccaatatggtggtgccccaggggggcaagggggtctgcctcctacatatgatggtggatatggtggtcggtccatgcctgggggtggaggatctgggggtgcaccaccgccttatcatggtggcggcagcggttatactggtagtgctgaccctgaaccagctggaaaagttaagcagtgcgatgaaaattgtgacgagacatgtgacaacgcaaggatttacatctcaaatttgcctcctgatgtcactgttgaggaattacaagagctatttggaggaatcggccaggtcggaaggatcaagcaaaagcgtggttacaaagatcagtggccttggaacataaaaatctatgctgatgactctggaaaagccaaaggagatgcttgccttgcttatgaagatccttctgctgctcattcagctggtggattttacaataattatgacatgagaggttataaaatcagtgttgtgatggctgagaaatcagcacccagagcggcaccctcatatgggcatggcggtggtcgtggtggtggccgcggtggtggtggacgcagggataattacagagatggcggggggcatggacccaatagaaaccagggtggtggttcacgttcacgaccatactgaaaacaaaacaattgttgttactgtgattgtcatctatgagaaaccatttctattcctgttatacagatttgtactcatacaggctcataagaggcagatggatataagctccaaatgctggtaggtttgtgatgttatttcagccggtggatcactcatgtaagctttggattttgctgcgaagaacaggtagggaggttttgttctgtgttaggtttattagatttcgtgtacattagacgacatatcaaccaccaatcatagaacgttccatatccgtttctgcttctgggcactcagcttattttggtgaaagagccaatttttttatcaaggttgcagccccatcacttgtgccctaactcatcgtccccagcaacacgatatgacgtgtgttgaagtggtgatctataagtagaaaaggagctgaattgagtgaattgttgcttcatctgcccccgtgatgcctctcgaattgggactgggagctcgtgacttacagcacttgccacgaatgggaaaccctctgctccaaaggaagcagttcaagcatatcgacgtgcttgcagggtcatcgctaaaaataatgtctcgaccacatgctaagattggaggttgttgtccgattatatatgttacaaaatattacatatgtgatcaatccaaggggtgtaacagttttctcaaagggacacactccttgggatacgctccttcacttgtatataagtgtaatgatctctggaatacaatcagtggctgtcacattctctccattctctgtgtcctgttttcactgcgctttaacactatcaagatggataggtgagtacccgtacgttgcaacgagaacatataataacataataat

SEQ ID NO: 72005 - DNA, 1590 bp, Zea Mays
aagagccacaggccagaggccacgcggccacgccgtcctcttcaccccagggttgccgacgcggcgactccgatcacccaccaccgctgccccctgtcctccctgctgccgcctgtgccggggctagcccgccgcggagccatgtcgcggtccttgagcatgagagggagcatgagggcgcgccgcgacctgcctcctcctgagaagacaattgaaaggcttgagagtatggtggatggaggaaatttctatgaagctcaacaaatgtacaagtcaaccagtgcaaggtatattgctgctcagaagtattcagaagccttggacatccttcagtcaggcgctttggttcaattgaagcatggacaggttacctgtggtggtgaacttgctgtcctctttgttgacaccctcatcacaggagagcttccatatagtgaacaaatttttgaaagatgtatgaggcattcccaagggtaactgttccacatttccttggagatgactatgatgatgaggggcatcaattatctgaagctatttctgctgccaaagtgcgggcagagagttgctcatcattcatgaaagctgcaatcaggtggtctgctgagtttggaacatcaagaaatggttcttctgagcttcacgttatgttagcagaatacatatattcggaatctccagagacggacatgactaaagtctcaagtcattttgttcgtggaaatgatccaaaaaagttcgcttctatgctggtgaactttatgggcaagtgttaccctggtgaagatgatactgcaattgcacgtggggtcctaatgtacctatctcaagggaacttgagagatgcaaatttacttatggatgagatgaacgaacaactaaaatctgctaactcggaatttccgaaaacagatttgattcagttcatcaagtatcttttaccaacacttgagagagatgcttaccctctttttagaacacttcgacagaagtataagacaagtacagatcgtgatgctgtgtttcaggagttactggatgaaatagctgcaaaattttacaatatacaacgccagaaccctttagaaggccttttcagcgaaatgttcaagatataatgcacgagaaaagaattttatgtcgatgctttcatctaaaccattggctggaataatacaattggtcaacaaaggtgtttgctcaactatgaatctccaaggccatacatttagcatcatgctgcatgaagatatatacttagctctgcagcaaaatcgtcgattagtgtcagattgttactgagcatgtgtaactgaattttgttttctattacttgtttctctttgttgacttgcccttgattgttattgaccatgcataactgaattttgttttcttttacttgtttctccttgtcctgttcacttttggagatgtattttgtgtacccacagatcaaaactataacctatttaaattcattgattttaatatatggtgttatcagtaaagttcattgaatccttgatcattagggatgcactattgtgctcttgctcaattggcttatggcgggctagtgtcttatgg

SEQ ID NO: 72006 - DNA, 1515 bp, Zea Mays
aagagccacaggccagaggccacgcggccacgccgtcctcttcaccccagggttgccgacgcggcgactccgatcacccaccaccgctgccccctgtcctccctgctgccgcctgtgccggggctagcccgccgcggagccatgtcgcggtccttgagcatgagagggagcatgagggcgcgccgcgacctgcctcctcctgagaagacaattgaaaggcttgagagtatggtggatggaggaaatttctatgaagctcaacaaatgtacaagtcaaccagtgcaaggtatattgctgctcagaagtattcagaagccttggacatccttcagtcaggcgctttggttcaattgaagcatggacaggttacctgtggtggtgaacttgctgtcctctttgttgacaccctcatcacaggagagcttccatatagtgaacaaatttttgatcgtatcagaaagatgtatgaggcattcccaagggtaactgttccacatttccttggagatgactatgatgatgaggggcatcaattatctgaagctatttctgctgccaaagtgcgggcagagagttgctcatcattcatgaaagctgcaatcaggtggtctgctgagtttggaacatcaagaaatggttcttctgagcttcacgttatgttagcagaatacatatattcggaatctccagagacggacatgactaaagtctcaagtcattttgttcgtggaaatgatccaaaaaagttcgcttctatgctggtgaactttatgggcaagtgttaccctggtgaagatgatactgcaattgcacgtggggtcctaatgtacctatctcaagggaacttgagagatgcaaatttacttatggatgagatgaacgaacaactaaaatctgctaactcggaatttccgaaaacagatttgattcagttcatcaagtatcttttaccaacttactggatgaaatagctgcaaaattttacaatatacaacgccagaaccctttagaaggccttttcagcgaaatgttcaagatataatgcacgagaaaagaattttatgtcgatgctttcatctaaaccattggctggaataatacaattggtcaacaaaggtgtttgctcaactatgaatctccaaggccatacatttagcatcatgctgcatgaagatatatacttagctctgcagcaaaatcgtcgattagtgtcagattgttactgagcatgtgtaactgaattttgttttctattacttgtttctctttgttgacttgcccttgattgttattgaccatgcataactgaattttgttttcttttacttgtttctccttgtcctgttcacttttggagatgtattttgtgtacccacagatcaaaactataacctatttaaattcattgattttaatatatggtgttatcagtaaagttcattgaatccttgatcattagggatgcactattgtgctcttgctcaattggcttatggcgggctagtgtcttatgg

SEQ ID NO: 72007 - DNA, 1460 bp, Zea Mays
tgaagacctccaatgcaaggcggcgccggcaagcattcaagggaacgaaaaaaaaatctacaacgggacaattgaaaggcttgagagtatggtggatggaggaaatttctatgaagctcaacaaatgtacaagtcaaccagtgcaaggtatattgctgctcagaagtattcagaagccttggacatccttcagtcaggcgctttggttcaattgaagcatggacaggttacctgtggtggtgaacttgctgtcctctttgttgacaccctcatcacaggagagcttccatatagtgaacaaatttttgatcgtatcagaaagatgtatgaggcattcccaagggtaactgttccacatttccttggagatgactatgatgatgaggggcatcaattatctgaagctatttctgctgccaaagtgcgggcagagagttgctcatcattcatgaaagctgcaatcaggtggtctgctgagtttggaacatcaagaaatggttcttctgagcttcacgttatgttagcagaatacatatattcggaatctccagagacggacatgactaaagtctcaagtcattttgttcgtggaaatgatccaaaaaagttcgcttctatgctggtgaactttatgggcaagtgttaccctggtgaagatgatactgcaattgcacgtggggtcctaatgtacctatctcaagggaacttgagagatgcaaatttacttatggatgagatgaacgaacaactaaaatctgctaactcggaatttccgaaaacagatttgattcagttcatcaagtatcttttaccaacacttgagagagatgcttaccctctttttagaacacttcgacagaagtataagacaagtacagatcgtgatgctgtgtttcaggagttactggatgaaatagctgcaaaattttacaatatacaacgccagaaccctttagaaggccttttcagcgaaatgttcaagatataatgcacgagaaaagaattttatgtcgatgctttcatctaaaccattggctggaataatacaattggtcaacaaaggtgtttgctcaactatgaatctccaaggccatacatttagcatcatgctgcatgaagatatatacttagctctgcagcaaaatcgtcgattagtgtcagattgttactgagcatgtgtaactgaattttgttttctattacttgtttctctttgttgacttgcccttgattgttattgaccatgcataactgaattttgttttcttttacttgtttctccttgtcctgttcacttttggagatgtattttgtgtacccacagatcaaaactataacctatttaaattcattgattttaatatatggtgttatcagtaaagttcattgaatccttgatcattagggatgcactattgtgctcttgctcaattggcttatggcgggctagtgtcttatgg

SEQ ID NO: 72008 - DNA, 1322 bp, Zea Mays
atccatcaatttataccaagaaatccatcaatttataccaagaaatccatcaatttataccaagaatattcattgattcaatatcattgttacctgtggtggtgaacttgctgtcctctttgttgacaccctcatcacaggagagcttccatatagtgaacaaatttttgatcgtatcagaaagatgtatgaggcattcccaagggtaactgttccacatttccttggagatgactatgatgatgaggggcatcaattatctgaagctatttctgctgccaaagtgcgggcagagagttgctcatcattcatgaaagctgcaatcaggtggtctgctgagtttggaacatcaagaaatggttcttctgagcttcacgttatgttagcagaatacatatattcggaatctccagagacggacatgactaaagtctcaagtcattttgttcgtggaaatgatccaaaaaagttcgcttctatgctggtgaactttatgggcaagtgttaccctggtgaagatgatactgcaattgcacgtggggtcctaatgtacctatctcaagggaacttgagagatgcaaatttacttatggatgagatgaacgaacaactaaaatctgctaactcggaatttccgaaaacagatttgattcagttcatcaagtatcttttaccaacacttgagagagatgcttaccctctttttagaacacttcgacagaagtataagacaagtacagatcgtgatgctgtgtttcaggagttactggatgaaatagctgcaaaattttacaatatacaacgccagaaccctttagaaggccttttcagcgaaatgttcaagatataatgcacgagaaaagaattttatgtcgatgctttcatctaaaccattggctggaataatacaattggtcaacaaaggtgtttgctcaactatgaatctccaaggccatacatttagcatcatgctgcatgaagatatatacttagctctgcagcaaaatcgtcgattagtgtcagattgttactgagcatgtgtaactgaattttgttttctattacttgtttctctttgttgacttgcccttgattgttattgaccatgcataactgaattttgttttcttttacttgtttctccttgtcctgttcacttttggagatgtattttgtgtacccacagatcaaaactataacctatttaaattcattgattttaatatatggtgttatcagtaaagttcattgaatccttgatcattagggatgcactattgtgctcttgctcaattggcttatggcgggctagtgtcttatgg

SEQ ID NO: 72009 - DNA, 1210 bp, Zea Mays
atttataccaagaaatccatcaatttataccaagaatattcattgattcaatatcattatcgtatcagaaagatgtatgaggcattcccaagggtaactgttccacatttccttggagatgactatgatgatgaggggcatcaattatctgaagctatttctgctgccaaagtgcgggcagagagttgctcatcattcatgaaagctgcaatcaggtggtctgctgagtttggaacatcaagaaatggttcttctgagcttcacgttatgttagcagaatacatatattcggaatctccagagacggacatgactaaagtctcaagtcattttgttcgtggaaatgatccaaaaaagttcgcttctatgctggtgaactttatgggcaagtgttaccctggtgaagatgatactgcaattgcacgtggggtcctaatgtacctatctcaagggaacttgagagatgcaaatttacttatggatgagatgaacgaacaactaaaatctgctaactcggaatttccgaaaacagatttgattcagttcatcaagtatcttttaccaacacttgagagagatgcttaccctctttttagaacacttcgacagaagtataagacaagtacagatcgtgatgctgtgtttcaggagttactggatgaaatagctgcaaaattttacaatatacaacgccagaaccctttagaaggccttttcagcgaaatgttcaagatataatgcacgagaaaagaattttatgtcgatgctttcatctaaaccattggctggaataatacaattggtcaacaaaggtgtttgctcaactatgaatctccaaggccatacatttagcatcatgctgcatgaagatatatacttagctctgcagcaaaatcgtcgattagtgtcagattgttactgagcatgtgtaactgaattttgttttctattacttgtttctctttgttgacttgcccttgattgttattgaccatgcataactgaattttgttttcttttacttgtttctccttgtcctgttcacttttggagatgtattttgtgtacccacagatcaaaactataacctatttaaattcattgattttaatatatggtgttatcagtaaagttcattgaatccttgatcattagggatgcactattgtgctcttgctcaattggcttatggcgggctagtgtcttatgg

SEQ ID NO: 72010 - DNA, 1189 bp, Zea Mays
atcaatttataccaagaatattcattgattcaatatcattgttacctgtggtggtgaacttgctgtcctctttgttgacaccctcatcacaggagagcttccatatagtgaacaaatttttgatcgtatcagaaagatgtatgaggcattcccaagggtaactgttccacatttccttggagatgactatgatgatgaggggcatcaattatctgaagctatttctgctgccaaagtgcgggcagagagttgctcatcattcatgaaagctgcaatcaggtggtctgctgagtttggaacatcaagaaatggttcttctgagcttcacgttatgttagcagaatacatatattcggaatctccagagacggacatgactaaagtctcaagtcattttgttcgtggaaatgatccaaaaaagttcgcttctatgctggtgaactttatgggcaagtgttaccctggtgaagatgatactgcaattgcacgtggggtcctaatgtacctatctcaagggaacttgagagatgcaaatttacttatggatgagatgaacgaacaactaaaatctgctaactcggaatttccgaaaacagatttgattcagttcatcaagtatcttttaccaacttactggatgaaatagctgcaaaattttacaatatacaacgccagaaccctttagaaggccttttcagcgaaatgttcaagatataatgcacgagaaaagaattttatgtcgatgctttcatctaaaccattggctggaataatacaattggtcaacaaaggtgtttgctcaactatgaatctccaaggccatacatttagcatcatgctgcatgaagatatatacttagctctgcagcaaaatcgtcgattagtgtcagattgttactgagcatgtgtaactgaattttgttttctattacttgtttctctttgttgacttgcccttgattgttattgaccatgcataactgaattttgttttcttttacttgtttctccttgtcctgttcacttttggagatgtattttgtgtacccacagatcaaaactataacctatttaaattcattgattttaatatatggtgttatcagtaaagttcattgaatccttgatcattagggatgcactattgtgctcttgctcaattggcttatggcgggctagtgtcttatgg

SEQ ID NO: 72011 - DNA, 1102 bp, Zea Mays
gaatattcattgattcaatatcattgttacctgtggtggtgaacttgctgtcctctttgttgacaccctcatcacaggagagcttccatatagtgaacaaatttttggtggtctgctgagtttggaacatcaagaaatggttcttctgagcttcacgttatgttagcagaatacatatattcggaatctccagagacggacatgactaaagtctcaagtcattttgttcgtggaaatgatccaaaaaagttcgcttctatgctggtgaactttatgggcaagtgttaccctggtgaagatgatactgcaattgcacgtggggtcctaatgtacctatctcaagggaacttgagagatgcaaatttacttatggatgagatgaacgaacaactaaaatctgctaactcggaatttccgaaaacagatttgattcagttcatcaagtatcttttaccaacacttgagagagatgcttaccctctttttagaacacttcgacagaagtataagacaagtacagatcgtgatgctgtgtttcaggagttactggatgaaatagctgcaaaattttacaatatacaacgccagaaccctttagaaggccttttcagcgaaatgttcaagatataatgcacgagaaaagaattttatgtcgatgctttcatctaaaccattggctggaataatacaattggtcaacaaaggtgtttgctcaactatgaatctccaaggccatacatttagcatcatgctgcatgaagatatatacttagctctgcagcaaaatcgtcgattagtgtcagattgttactgagcatgtgtaactgaattttgttttctattacttgtttctctttgttgacttgcccttgattgttattgaccatgcataactgaattttgttttcttttacttgtttctccttgtcctgttcacttttggagatgtattttgtgtacccacagatcaaaactataacctatttaaattcattgattttaatatatggtgttatcagtaaagttcattgaatccttgatcattagggatgcactattgtgctcttgctcaattggcttatggcgggctagtgtcttatgg

SEQ ID NO: 72012 - DNA, 1016 bp, Zea Mays
tggtttgattttgtgtctgtgcacttggtgttgcagtaaaaaaggtttcaatcttccttccagcacccattttttgaaaatcatgaaaaacatgtaaaatggcaacaataatatgcatacagcacacatgcaggggcaagttggacaaacaaactcgttaggctatctccaacagcttaaccatcctcatcctcatattcaaactccactctgcaaacagtgcagtctacggggcaaaacagtgcttacgggggcaaaacagtgcttacagggcagaacagtgttttgagtgaccatatggggtgaactgctggagacaatcttacaaagataactcaccataggtagcaactcagagtaatatggagtaataaatgtccaaaaatatatttggaaccagtaacacagctaggactaccaagccaccaaggagaagcaaagagcagagaaaaagggaagtaatgtacagaacatctaccaacaagagaagggaaacgaaaatttaaagaatcaaggactcccagttactagttcatagttatgttcgcctcataagagttgttcctcgtctcaactgcttatcaaaagtccattctttgataaaacttgaaataatttccaaactcatgctttgccatatgcacctttaaaaaaatataaaaaaaatacaacagttaaaatattttgcctcccaaatccccagacctccaaataccaaaaccgcagcaattttgggagccaaggtgcaccggaattgcactgtaattaccagaattacactggaattaccggaattataagcgattaactgttagaacaaatgcagttctgaaaaatagcaaaaatattccaccaaattccgaacccttacgaattgcattagaaaaaagacccagaggaagcacacgcgaaaagcagcaaatgtttcgcaggaagaggtcaaatcgttgggagatgtcctgtatgtgggggagtatcttttaggaagatgtacagatagggagaagaagtatgaa

SEQ ID NO: 72013 - DNA, 631 bp, Zea Mays
cacctcccgcaagaatggcgcgcaccacaaaccacgcaccgtcgtagactgcccacgggccccgcgcggcggagcacgggtcagagccgtgagcgcccgtgcaacgccacgacctcctcgacgccgtcgaggccgcgtgcatggagatgtggaggccctccagcagtcgtcccgcacggagacgcggaggccctgaagcaggcggacgcagtctctggggtcgacgacgcgacagcggctgcgcgggcaaggtcgacgacgcgcgcggggccgcgggcggcgacagagagtactgaaggttgatttcaaagaaatttaagaggttttctataaaattatggttctacattttaccaaacgtgccattaaattgtatacaagtaatcaaagtgttaaatcgaaacacggtaaagataatgtgcttagaatcacccagaatcgatctaccgaagtactgaaggttgatttcaaagaaatttaaggggttttctatataattatgacgtgagatcaaaatagtaaagataatgtgcttagaatcacccagaatcgatccaccagagaattgagctggagctaaagaaccaaccatgtaggagatactgatcggcatgttatttgtttaaattta

SEQ ID NO: 72014 - DNA, 298 bp, Zea Mays
gcatatcatgactagtttttaactgaactgaattcagcaaaaaagagtgaaatggatcgctttgtccaaacgaaagcacagtgaacacaaaatggagcatgtttgagtccagagcaagccagcaatgacaacatttcttcagacaaacacaccatgtgcagcataccgcactgcagttctacagtatctagcaaatttcccccacacaaacaacttgcgaactgcagcaacaccagaaccgcagcgacggcgaggcgcgggacgagaggattggggaatttttgcttgctggttggtg

SEQ ID NO: 72015 - DNA, 514 bp, Zea Mays
ctgaactgaattcagcaaaaaagagtgaaatggatcgctttgtccaaacgaaagcacagtgaacacaaaatggagcatgtttgagtccagagcaagccagcaatgacaacatttcttcagacaaacacaccatgtgcagcataccgcactgcagttctacagtatctagcaaatttcccccacacaaacaacttgcgaactgcagcaacaccagaaccgcagcgacggcgaggcgcggggcggcaggcctagccgccgaagccgtagagggtacggccctggcgcttaagcgcgtagacgacgtccatggcggtgacggtcttacggcgagcgtgctcagtgtaggtgacggcgtcgcggatgacgttctccaggaagatcttgagcacgccgcgggtctcctcgtagatgagccccgagatgcgcttcacgccgcccttgccgcccttgccgcgccccgacatcttcgccgcggagacgagaggattggggaatttttgcttgctggttggtg

SEQ ID NO: 72016 - DNA, 3009 bp, Zea Mays
cccaaacctgatacggaactcaacgattgtgtggcgtcgttttgctatagaaattaagggccggaggccggagcagatatatacgctgcacctactacacaaacacagtcagctaggcgcagctagcaatttctctcttggtttggttgcattgcatgccccccggccggccccttcacacacgcatagcacagtcgcatgtggaagctgaaggtggcggcggagggcggcggcggccccttgctgcgctcgacgaaccgcttcgtcgggcggaccgtgtgggagttcgagcctgacctcggcacgccggagcagcgtgccgaggtggaaaaggcgcgccgggacttctccgaccaccgcttccagcgcaggcattctgccgacgtcctcatgcgcatgcagatgcagcagtattcaaaaggcacccctcttaagctggaccttcctgctgtcaagaagctgggggaggacgaagacgttacggaggaagctgtatcgacctctttgaaacgggctatcaaccgcgtctctgctctccaggcgcacgatggccactggcctggcgattgtagtggccctctcttccttttgccaggcttgattataacgctgtatgtgaccggagcattgaacgcggttctatcttcagaacaccagagggagatacgccgctatctctacaaccatcagaacgaagacggagggtgggggctgcacatggagggccacagcgcaatgctgggcacaaccctcaactacgttgctctgagactgatcggcgagggcccggacagtggtggagatgatggagcagccatggagagaggccgcaactggatcctacagcgcggtggggcaacctatacaacgtcgtggggcaagttctggctaacggtgctcggagtatacgattggtctggtaacaacccgctgccaccagaaatgtggctgttgccctatcacctgcctttccacccaggtcgcatgtggtgtcattgccgagcggtgtacttgcccatgtcttacgtctatgggaagaggtttgttgggcgtattacaccacttgtcttggaactcagaaatgaactctacggagacccatacagtctgattgattggaacaaggctcgaaaccaatgcgcaaaggaagatttgtactatccacattcattccttcaggatgtcttatgggccactctccataagtttgttgaaccggttatgatgcattggcctgggatcaaatttagggagattgctttgcgcacagccatgcgccacattcactatgaagatgagagcactcgatacattaaccttggtcctgtaaacaaggtattgaatatgcttgcttgttggattgaagacccaaactcagaggcattcaagctccatgttcctcgaatttatgattatttgtggcttgctgaagatggtatgaaaatgaagggttataatggcagccaactatgggatgcaggtttaacagttctggcaattgtgaataccgatcttattgaagagtttggtccaactcttaaactagcacatgcctttgttaagaattcacagatcattgacaactgcctcgaagatttgaaccagtggtatcgccacatgtcaaaaggtggatggccattttctacagctgatcatggttggtgtgtatcagattgcactgcaacaggactagaggcaactctattgttatcaacgatttctcctcaaatagttggtgaggcgatggaagttggtagagtttatgatggtgtaaattgtctcatttctcttatgaacaataatggtggatttgcaacatttgaacttacaaggtcatatgcatggttggagcatattaatccttccgagacctttggaggcataatgatcgattacccgtatgttgaatgcacgtcgtcgtcaattcaagctctagctttgttcaagaaactctacccaaggcatcgtacggaagagatagacagttgtatcagcaagggtgcaaacttcatcgagagtatgcagagaaatgatggttcatgtgtttggattggcttgtgctggtcggacattcgaggacagtcctgcaattaaaaaggcatgtgagtttctgttgtcaaaagagcttccttctggtggctggggagagagctacttgtcatgtcaggacaaggtttacacaaatctcgaaggcatgcgacctcacgcggtgaacactagttgggcaatgctggccctaattcgtgttggacaggctgaaagagatccagcaccattgcatcgggcagctagggttttgatcaacttacagtcagaggacggagaatttccacagcaagagatcattggagtgttcaaccaaaattgcatgatcggttactcccaatacagaaacatcttccctatatgggctctaggagagtatcgtaccaaggtccatgttccaaggaagaaatagccaatatgcttatgatatattcaacgtggtgcgaaaaatgccatgtactacacatcttgtgcactctcgttatctagctagtaccttaattttttttataaccgttgatctatcctttttgcattttctacaataaactcaacggttattcaagaatggtagtgctgtgaaccgttgatccaactcttttttcctctacaaaaaggtgcacaaaaactagtaccatgtacctgtaatattgcaataagatatgatttaatgtgctcattttttgttgtttatgccttcgcatgctagttctaaaacaaggttgctcataaatcctagtcatatgcgagaactcataggtcatattttcaatgttggacgatgacatcattagaatgataacagtcgcggttagagcgggattgagggaattaaatctcctccatttaatcaccttcaatctctctcaatccatactaaaccaaacaagcccttaggggtagcaatgttggattaatgtgggcttggcccaaattaatattcaataatagtcaatgctaatg

SEQ ID NO: 72017 - DNA, 3334 bp, Zea Mays
agtcagctaggcgcagctagcaatttctctcttggtttggttgcattgcatgccccccggccggccccttcacacacgcatagcacagtcgcatgtggaagctgaaggtggcggcggagggcggcggcggccccttgctgcgctcgacgaaccgcttcgtcgggcggaccgtgtgggagttcgagcctgacctcggcacgccggagcagcgtgccgaggtggaaaaggcgcgccgggacttctccgaccaccgcttccagcgcaggcattctgccgacgtcctcatgcgcatgcagatgcagcagtattcaaaaggcacccctcttaagctggaccttcctgctgtcaagaagctgggggaggacgaagacgttacggaggaagctgtatcgacctctttgaaacgggctatcaaccgcgtctctgctctccaggcgcacgatggccactggcctggcgattgtagtggccctctcttccttttgccaggcttgattataacgctgtatgtgaccggagcattgaacgcggttctatcttcagaacaccagagggagatacgccgctatctctacaaccatcagaacgaagacggagggtgggggctgcacatggagggccacagcgcaatgctgggcacaaccctcaactacgttgctctgagactgatcggcgagggcccggacagtggtggagatgatggagcagccatggagagaggccgcaactggatcctacagcgcggtggggcaacctatacaacgtcgtggggcaagttctggctaacggtgctcggagtatacgattggtctggtaacaacccgctgccaccagaaatgtggctgttgccctatcacctgcctttccacccaggtcgcatgtggtgtcattgccgagcggtgtacttgcccatgtcttacgtctatgggaagaggtttgttgggcgtattacaccacttgtcttggaactcagaaatgaactctacggagacccatacagtctgattgattggaacaaggctcgaaaccaatgcgcaaaggaagatttgtactatccacattcattccttcaggatgtcttatgggccactctccataagtttgttgaaccggttatgatgcattggcctgggatcaaatttagggagattgctttgcgcacagccatgcgccacattcactatgaagatgagagcactcgatacattaaccttggtcctgtaaacaaggtattgaatatgcttgcttgttggattgaagacccaaactcagaggcattcaagctccatgttcctcgaatttatgattatttgtggcttgctgaagatggtatgaaaatgaagggttataatggcagccaactatgggatgcaggtttaacagttctggcaattgtgaataccgatcttattgaagagtttggtccaactcttaaactagcacatgcctttgttaagaattcacagatcattgacaactgcctcgaagatttgaaccagtggtatcgccacatgtcaaaaggtggatggccattttctacagctgatcatggttggtgtgtatcagattgcactgcaacaggactagaggcaactctattgttatcaacgatttctcctcaaatagttggtgaggcgatggaagttggtagagtttatgatggtgtaaattgtctcatttctcttatgaacaataatggtggatttgcaacatttgaacttacaaggtcatatgcatggttggagcatattaatccttccgagacctttggaggcataatgatcgattacccgtatgttgaatgcacgtcgtcgtcaattcaagctctagctttgttcaagaaactctacccaaggcatcgtacggaagagatagacagttgtatcagcaagggtgcaaacttcatcgagagtatgcagagaaatgatggttcatggtacggctcttggggtgtttgtttcacctacgccacatggtttgcagtgtttggattggcttgtgctggtcggacattcgaggacagtcctgcaattaaaaaggcatgtgagtttctgttgtcaaaagagcttccttctggtggctggggagagagctacttgtcatgtcaggacaaggtttacacaaatctcgaaggcatgcgacctcacgcggtgaacactagttgggcaatgctggccctaattcgtgttggacaggtctaccttttcatcttacaatatgggtcaagggttttatggatacatttataaaggatatactttgcctcattgttataggctgaaagagatccagcaccattgcatcgggcagctagggttttgatcaacttacagtcagaggacggagaatttccacagcaagtaataatactcctaactcgcatttgcactttcttccatctcacacattctttattaaaaacctcgtaggttgaatagtaatataaaagctccaacatcatgagaggataaagaatatagatatttggtgcaaactatagcttagagtctcgtaaatgatctatatcgatctctgtaggcttctctcttcgtccccttccagttaacttcagatgcagctattttatccaagtgatcatttttttattcatgaaattttactgcctaatgatttgttagtaattttgaaccatgtacaaacaggagatcattggagtgttcaaccaaaattgcatgatcggttactcccaatacagaaacatcttccctatatgggctctaggagagtatcgtaccaaggtccatgttccaaggaagaaatagccaatatgcttatgatatattcaacgtggtgcgaaaaatgccatgtactacacatcttgtgcactctcgttatctagctagtaccttaattttttttataaccgttgatctatcctttttgcattttctacaataaactcaacggttattcaagaatggtagtgctgtgaaccgttgatccaactcttttttcctctacaaaaaggtgcacaaaaactagtaccatgtacctgtaatattgcaataagatatgatttaatgtgctcattttttgttgtttatgccttcgcatgctagttctaaaacaaggttgctcataaatcctagtcatatgcgagaactcataggtcatattttcaatgttggacgatgacatcattagaatgataacagtcgcggttagagcgggattgagggaattaaatctcctccatttaatcaccttcaatctctctcaatccatactaaaccaaacaagcccttaggggtagcaatgttggattaatgtgggcttggcccaaattaatattcaataatagtcaatgctaatg

SEQ ID NO: 72018 - DNA, 2982 bp, Zea Mays
agcaatttctctcttggtttggttgcattgcatgccccccggccggccccttcacacacgcatagcacagtcgcatgtggaagctgaaggtggcggcggagggcggcggcggccccttgctgcgctcgacgaaccgcttcgtcgggcggaccgtgtgggagttcgagcctgacctcggcacgccggagcagcgtgccgaggtggaaaaggcgcgccgggacttctccgaccaccgcttccagcgcaggcattctgccgacgtcctcatgcgcatgcagatgcagcagtattcaaaaggcacccctcttaagctggaccttcctgctgtcaagaagctgggggaggacgaagacgttacggaggaagctgtatcgacctctttgaaacgggctatcaaccgcgtctctgctctccaggcgcacgatggccactggcctggcgattgtagtggccctctcttccttttgccaggcttgattataacgctgtatgtgaccggagcattgaacgcggttctatcttcagaacaccagagggagatacgccgctatctctacaaccatcagaacgaagacggagggtgggggctgcacatggagggccacagcgcaatgctgggcacaaccctcaactacgttgctctgagactgatcggcgagggcccggacagtggtggagatgatggagcagccatggagagaggccgcaactggatcctacagcgcggtggggcaacctatacaacgtcgtggggcaagttctggctaacggtgctcggagtatacgattggtctggtaacaacccgctgccaccagaaatgtggctgttgccctatcacctgcctttccacccaggtcgcatgtggtgtcattgccgagcggtgtacttgcccatgtcttacgtctatgggaagaggtttgttgggcgtattacaccacttgtcttggaactcagaaatgaactctacggagacccatacagtctgattgattggaacaaggctcgaaaccaatgcgcaaaggaagatttgtactatccacattcattccttcaggatgtcttatgggccactctccataagtttgttgaaccggttatgatgcattggcctgggatcaaatttagggagattgctttgcgcacagccatgcgccacattcactatgaagatgagagcactcgatacattaaccttggtcctgtaaacaaggtattgaatatgcttgcttgttggattgaagacccaaactcagaggcattcaagctccatgttcctcgaatttatgattatttgtggcttgctgaagatggtatgaaaatgaaggtttaacagttctggcaattgtgaataccgatcttattgaagagtttggtccaactcttaaactagcacatgcctttgttaagaattcacagatcattgacaactgcctcgaagatttgaaccagtggtatcgccacatgtcaaaaggtggatggccattttctacagctgatcatggttggtgtgtatcagattgcactgcaacaggactagaggcaactctattgttatcaacgatttctcctcaaatagttggtgaggcgatggaagttggtagagtttatgatggtgtaaattgtctcatttctcttatgaacaataatggtggatttgcaacatttgaacttacaaggtcatatgcatggttggagcatattaatccttccgagacctttggaggcataatgatcgattacccgtatgttgaatgcacgtcgtcgtcaattcaagctctagctttgttcaagaaactctacccaaggcatcgtacggaagagatagacagttgtatcagcaagggtgcaaacttcatcgagagtatgcagagaaatgatggttcatggtacggctcttggggtgtttgtttcacctacgccacatggtttgcagtgtttggattggcttgtgctggtcggacattcgaggacagtcctgcaattaaaaaggcatgtgagtttctgttgtcaaaagagcttccttctggtggctggggagagagctacttgtcatgtcaggacaaggtttacacaaatctcgaaggcatgcgacctcacgcggtgaacactagttgggcaatgctggccctaattcgtgttggacaggtctaccttttcatcttacaatatgggtcaagggttttatggatacatttataaaggatatactttgcctcattgttataggctgaaagagatccagcaccattgcatcgggcagctagggttttgatcaacttacagtcagaggacggagaatttccacagcaagagatcattggagtgttcaaccaaaattgcatgatcggttactcccaatacagaaacatcttccctatatgggctctaggagagtatcgtaccaaggtccatgttccaaggaagaaatagccaatatgcttatgatatattcaacgtggtgcgaaaaatgccatgtactacacatcttgtgcactctcgttatctagctagtaccttaattttttttataaccgttgatctatcctttttgcattttctacaataaactcaacggttattcaagaatggtagtgctgtgaaccgttgatccaactcttttttcctctacaaaaaggtgcacaaaaactagtaccatgtacctgtaatattgcaataagatatgatttaatgtgctcattttttgttgtttatgccttcgcatgctagttctaaaacaaggttgctcataaatcctagtcatatgcgagaactcataggtcatattttcaatgttggacgatgacatcattagaatgataacagtcgcggttagagcgggattgagggaattaaatctcctccatttaatcaccttcaatctctctcaatccatactaaaccaaacaagcccttaggggtagcaatgttggattaatgtgggcttggcccaaattaatattcaataatagtcaatgctaatg

SEQ ID NO: 72019 - DNA, 2882 bp, Zea Mays
atgtggaagctgaaggtggcggcggagggcggcggcggccccttgctgcgctcgacgaaccgcttcgtcgggcggaccgtgtgggagttcgagcctgacctcggcacgccggagcagcgtgccgaggtggaaaaggcgcgccgggacttctccgaccaccgcttccagcgcaggcattctgccgacgtcctcatgcgcatgcagatgcagcagtattcaaaaggcacccctcttaagctggaccttcctgctgtcaagaagctgggggaggacgaagacgttacggaggaagctgtatcgacctctttgaaacgggctatcaaccgcgtctctgctctccaggcgcacgatggccactggcctggcgattgtagtggccctctcttccttttgccaggcttgattataacgctgtatgtgaccggagcattgaacgcggttctatcttcagaacaccagagggagatacgccgctatctctacaaccatcagaacgaagacggagggtgggggctgcacatggagggccacagcgcaatgctgggcacaaccctcaactacgttgctctgagactgatcggcgagggcccggacagtggtggagatgatggagcagccatggagagaggccgcaactggatcctacagcgcggtggggcaacctatacaacgtcgtggggcaagttctggctaacggtgctcggagtatacgattggtctggtaacaacccgctgccaccagaaatgtggctgttgccctatcacctgcctttccacccaggtcgcatgtggtgtcattgccgagcggtgtacttgcccatgtcttacgtctatgggaagaggtttgttgggcgtattacaccacttgtcttggaactcagaaatgaactctacggagacccatacagtctgattgattggaacaaggctcgaaaccaatgcgcaaaggaagatttgtactatccacattcattccttcaggatgtcttatgggccactctccataagtttgttgaaccggttatgatgcattggcctgggatcaaatttagggagattgctttgcgcacagccatgcgccacattcactatgaagatgagagcactcgatacattaaccttggtcctgtaaacaaggtattgaatatgcttgcttgttggattgaagacccaaactcagaggcattcaagctccatgttcctcgaatttatgattatttgtggcttgctgaagatggtatgaaaatgaagggttataatggcagccaactatgggatgcaggtttaacagttctggcaattgtgaataccgatcttattgaagagtttggtccaactcttaaactagcacatgcctttgttaagaattcacagatcattgacaactgcctcgaagatttgaaccagtggtatcgccacatgtcaaaaggtggatggccattttctacagctgatcatggttggtgtgtatcagattgcactgcaacaggactagaggcaactctattgttatcaacgatttctcctcaaatagttggtgaggcgatggaagttggtagagtttatgatggtgtaaattgtctcatttctcttatgcatattaatccttccgagacctttggaggcataatgatcgattacccgtatgttgaatgcacgtcgtcgtcaattcaagctctagctttgttcaagaaactctacccaaggcatcgtacggaagagatagacagttgtatcagcaagggtgcaaacttcatcgagagtatgcagagaaatgatggttcatggtacggctcttggggtgtttgtttcacctacgccacatggtttgcagtgtttggattggcttgtgctggtcggacattcgaggacagtcctgcaattaaaaaggcatgtgagtttctgttgtcaaaagagcttccttctggtggctggggagagagctacttgtcatgtcaggacaaggtttacacaaatctcgaaggcatgcgacctcacgcggtgaacactagttgggcaatgctggccctaattcgtgttggacaggtctaccttttcatcttacaatatgggtcaagggttttatggatacatttataaaggatatactttgcctcattgttataggctgaaagagatccagcaccattgcatcgggcagctagggttttgatcaacttacagtcagaggacggagaatttccacagcaagagatcattggagtgttcaaccaaaattgcatgatcggttactcccaatacagaaacatcttccctatatgggctctaggagagtatcgtaccaaggtccatgttccaaggaagaaatagccaatatgcttatgatatattcaacgtggtgcgaaaaatgccatgtactacacatcttgtgcactctcgttatctagctagtaccttaattttttttataaccgttgatctatcctttttgcattttctacaataaactcaacggttattcaagaatggtagtgctgtgaaccgttgatccaactcttttttcctctacaaaaaggtgcacaaaaactagtaccatgtacctgtaatattgcaataagatatgatttaatgtgctcattttttgttgtttatgccttcgcatgctagttctaaaacaaggttgctcataaatcctagtcatatgcgagaactcataggtcatattttcaatgttggacgatgacatcattagaatgataacagtcgcggttagagcgggattgagggaattaaatctcctccatttaatcaccttcaatctctctcaatccatactaaaccaaacaagcccttaggggtagcaatgttggattaatgtgggcttggcccaaattaatattcaataatagtcaatgctaatg

SEQ ID NO: 72020 - DNA, 2762 bp, Zea Mays
atgtggaagctgaaggtggcggcggagggcggcggcggccccttgctgcgctcgacgaaccgcttcgtcgggcggaccgtgtgggagttcgagcctgacctcggcacgccggagcagcgtgccgaggtggaaaaggcgcgccgggacttctccgaccaccgcttccagcgcaggcattctgccgacgtcctcatgcgcatgcagatgcagcagtattcaaaaggcacccctcttaagctggaccttcctgctgtcaagaagctgggggaggacgaagacgttacggaggaagctgtatcgacctctttgaaacgggctatcaaccgcgtctctgctctccaggcgcacgatggccactggcctggcgattgtagtggccctctcttccttttgccaggcttgaacaccagagggagatacgccgctatctctacaaccatcagaacgaagacggagggtgggggctgcacatggagggccacagcgcaatgctgggcacaaccctcaactacgttgctctgagactgatcggcgagggcccggacagtggtggagatgatggagcagccatggagagaggccgcaactggatcctacagcgcggtggggcaacctatacaacgtcgtggggcaagttctggctaacggtgctcggagtatacgattggtctggtaacaacccgctgccaccagaaatgtggctgttgccctatcacctgcctttccacccaggtcgcatgtggtgtcattgccgagcggtgtacttgcccatgtcttacgtctatgggaagaggtttgttgggcgtattacaccacttgtcttggaactcagaaatgaactctacggagacccatacagtctgattgattggaacaaggctcgaaaccaatgcgcaaaggaagatttgtactatccacattcattccttcaggatgtcttatgggccactctccataagtttgttgaaccggttatgatgcattggcctgggatcaaatttagggagattgctttgcgcacagccatgcgccacattcactatgaagatgagagcactcgatacattaaccttggtcctgtaaacaaggtattgaatatgcttgcttgttggattgaagacccaaactcagaggcattcaagctccatgttcctcgaatttatgattatttgtggcttgctgaagatggtatgaaaatgaagggttataatggcagccaactatgggatgcaggtttaacagttctggcaattgtgaataccgatcttattgaagagtttggtccaactcttaaactagcacatgcctttgttaagaattcacagatcattgacaactgcctcgaagatttgaaccagtggtatcgccacatgtcaaaaggtggatggccattttctacagctgatcatggttggtgtgtatcagattgcactgcaacaggactagaggcaactctattgttatcaacgatttctcctcaaatagttggtgaggcgatggaagttggtagagtttatgatggtgtaaattgtctcatttctcttatgaacaataatggtggatttgcaacatttgaacttacaaggtcatatgcatggttggagcatattaatccttccgagacctttggaggcataatgatcgattacccgtatgttgaatgcacgtcgtcgtcaattcaagctctagctttgttcaagaaactctacccaaggcatcgtacggaagagatagacagttgtatcagcaagggtgcaaacttcatcgagagtatgcagagaaatgatggttcatgtgtttggattggcttgtgctggtcggacattcgaggacagtcctgcaattaaaaaggcatgtgagtttctgttgtcaaaagagcttccttctggtggctggggagagagctacttgtcatgtcaggacaaggtttacacaaatctcgaaggcatgcgacctcacgcggtgaacactagttgggcaatgctggccctaattcgtgttggacaggctgaaagagatccagcaccattgcatcgggcagctagggttttgatcaacttacagtcagaggacggagaatttccacagcaagagatcattggagtgttcaaccaaaattgcatgatcggttactcccaatacagaaacatcttccctatatgggctctaggagagtatcgtaccaaggtccatgttccaaggaagaaatagccaatatgcttatgatatattcaacgtggtgcgaaaaatgccatgtactacacatcttgtgcactctcgttatctagctagtaccttaattttttttataaccgttgatctatcctttttgcattttctacaataaactcaacggttattcaagaatggtagtgctgtgaaccgttgatccaactcttttttcctctacaaaaaggtgcacaaaaactagtaccatgtacctgtaatattgcaataagatatgatttaatgtgctcattttttgttgtttatgccttcgcatgctagttctaaaacaaggttgctcataaatcctagtcatatgcgagaactcataggtcatattttcaatgttggacgatgacatcattagaatgataacagtcgcggttagagcgggattgagggaattaaatctcctccatttaatcaccttcaatctctctcaatccatactaaaccaaacaagcccttaggggtagcaatgttggattaatgtgggcttggcccaaattaatattcaataatagtcaatgctaatg

SEQ ID NO: 72021 - DNA, 1077 bp, Zea Mays
aataaaaatgtggaactcggattttcagatgaagagtgtgactaagaacttcctgattttccatcatttattccattcttacctcctctgagtgcagctaatctaaaggtctactatgccacacgtttcaccatcatagttgggataatggtgttcggtggttttcttgcaccaatcgtagcgctttttatgcagcaatcaacttacagagcagatgctctcttgttgacaactctcataagagtcgataaggttgcgcgttttctggcatcgttcttcaagcaagcatgcgagctggctcctattttcaatgagctcgtggattgtgtgagcttagatggggagtccttgcaagctgctttgtctaggcaagttctgaattctatacactggattcttgtggtaccaatgtggtatatatctttgttcagagcatacagagcacaacagggtgagcaagagatctctgaagaactgggtggtaatgatcttatcattgtatttcacagaccagcagtacttgatcgagaagatgcatatttagctcaagctgttttcaaacatatgcaactagatgacaatgaggtggttctaggaggtggtcaggatgcaatgaatgtgactatgatagactgtcgtgttggtaaatttgaggctaaattctatcacaaggcgagaaccgtgacacccgagtctgaggtcaagtgccataccaccgtgttttcaggatggttcaccgagccaccatcacgctgtggactcgacatgtcattcctgaatgaagggttgctcaagaatagaagagggttcaaacttttctatagtatcatctttgggggcacaactatacatgttagcatgacgctgaacattttggccgacctttcacctcttttcacgtgggacacaaaacagcagagtgtgggactccacaggatgcttttattcaaaaaattgacatctgtgaaggaaaagtcccttgggctcctcacccagaattttgtcaagctcttcttcaccatgaaggttgaaacaatctcactttgacgaaggtgggcttctccttggagacggaca

SEQ ID NO: 72022 - DNA, 1964 bp, Zea Mays
cccggaagagagagagagaggatcatcaaaagggcaggccacaaaatatcctcaaagcctcccagaaaaattcctcccaccgcgcccgcgacagcgacgacgacggcgacgagcacggggcccctccaccgcctccgcctccgcctcgccgcgtgcggccaccgcgccgccccgacgtcgtcccctccgccctccccctcggccctcgacgcgccgccgcccgccctccgccgccgccgccgccgcggcgggctcggcctcctctggaagctcccctccgcccgcgcgccgccccgcccggctccgatggacgcgcgcgcgcccccgcctccgcagccccatccgccgcgcgccccgtcgccgcagcccccgcccgcgccgtccaggaggtacggcctgcacttctcggcgtccagcttcatccaggcgccgctcaccgcgctgctcgagtactccggcatcctccggcccgatcccggtggtggaatccaacagccagggaccggggccaggccgggcgaggtgtcgatccggattgtggcgcccggcgaggcgggcacgtcgtctgagagggccgaggaggtgatcgtcgaggaagaggaagaggatggacaggcaacgaggacgcgccccgaggacccatcacctgccgctggcggcggggagggcggcagggaatcctcgtcgtcgtaccagcggtacgacatacagcaggtggccaggtgggtggagcagatactgcccttctcactgttgctgctcgtcgtcttcatccgacaacatttgcaaggtttctttgtgacaatttggattgctgcggtgatgttcaagtccaacgatatcctgtgtaagcagactgctctgaagagggagagaaaaattccagttcttgtcgggattacaatattatttgttgttcatgtatctggattttactggtgttacaagaacggggatcttataagacctctcatgatgcttcctccaaaagaaataccaccattttggcacgcaatattcatcatcttggtgaacgatacaatggtgcgccaaactgctatggttgtcaaatgtttactgctgatgtactataagaacagcagagggcgtagctatcgtaggcagggtcaaatgttgacgattgtggaatattttctacttttgtatcgtgcattattgcctacacctgtgtggtaccgttttttcctgaacaaggagtatggaagcctattttcgtctctaaccactggcttgtatctcactttcaagttgacatctgttgtggaaaagtcttttttgacggcattgagagcattatctcataaagacttccattatggttcatatgcaacaagtgagcaggtagttgctgctggagacttgtgtgcgatatgccaagaaaagatgcatgttcccatccttttgcgctgcaaacatatcttctgtgaagattgtgtatccgaatggttcgagagggagcgaacgtgcccgctgtgcagggcattggtgaagccagcagacctccgctcgttcagcgacggttcaacaagcctcttcttccagctattctagtccgagacagccaaaagagcggcaagccggagcgctccacccgatgatgcagatgttagctgtgtgtgtgcgtgtgttgctgcttgcaacgcctgcgagcagtgcggccctgatgcggtgctgggagagtgtacaccaagctgaagctgaaggcgtacatgattgtgtattgtgactgcacatattttcatcatcccctgtataggctctcgcgttgatgcttgagcacctgaggattttacctgaccatatacggcacaaattattacataaatagaaatggtgagtatatacaacgataaatcaatatggtccttgtttatgctgtgctctgtgttgggatttagaactagtcgataaatccttgtgatccttgcttatgccgtgcgccc

SEQ ID NO: 72023 - DNA, 1950 bp, Zea Mays
cccggaagagagagagagaggatcatcaaaagggcaggccacaaaatatcctcaaagcctcccagaaaaattcctcccaccgcgcccgcgacagcgacgacgacggcgacgagcacggggcccctccaccgcctccgcctccgcctcgccgcgtgcggccaccgcgccgccccgacgtcgtcccctccgccctccccctcggccctcgacgcgccgccgcccgccctccgccgccgccgccgccgcggcgggctcggcctcctctggaagctcccctccgcccgcgcgccgccccgcccggctccgatggacgcgcgcgcgcccccgcctccgcagccccatccgccgcgcgccccgtcgccgcagcccccgcccgcgccgtccaggaggtacggcctgcacttctcggcgtccagcttcatccaggcgccgctcaccgcgctgctcgagtactccggcatcctccggcccgatcccggtggtggaatccaacagccagggaccggggccaggccgggcgaggtgtcgatccggattgtggcgcccggcgaggcgggcacgtcgtctgagagggccgaggaggtgatcgtcgaggaagaggaagaggatggacaggcaacgaggacgcgccccgaggacccatcacctgccgctggcggcggggagggcggcagggaatcctcgtcgtcgtaccagcggtacgacatacagcaggtggccaggtgggtggagcagatactgcccttctcactgttgctgctcgtcgtcttcatccgacaacatttgcaaggtttctttgtgacaatttggattgctgcggtgatgttcaagtccaacgatatcctgtagggagagaaaaattccagttcttgtcgggattacaatattatttgttgttcatgtatctggattttactggtgttacaagaacggggatcttataagacctctcatgatgcttcctccaaaagaaataccaccattttggcacgcaatattcatcatcttggtgaacgatacaatggtgcgccaaactgctatggttgtcaaatgtttactgctgatgtactataagaacagcagagggcgtagctatcgtaggcagggtcaaatgttgacgattgtggaatattttctacttttgtatcgtgcattattgcctacacctgtgtggtaccgttttttcctgaacaaggagtatggaagcctattttcgtctctaaccactggcttgtatctcactttcaagttgacatctgttgtggaaaaggttcagtcttttttgacggcattgagagcattatctcataaagacttccattatggttcatatgcaacaagtgagcaggtagttgctgctggagacttgtgtgcgatatgccaagaaaagatgcatgttcccatccttttgcgctgcaaacatatcttctgtgaagattgtgtatccgaatggttcgagagggagcgaacgtgcccgctgtgcagggcattggtgaagccagcagacctccgctcgttcagcgacggttcaacaagcctcttcttccagctattctagtccgagacagccaaaagagcggcaagccggagcgctccacccgatgatgcagatgttagctgtgtgtgtgcgtgtgttgctgcttgcaacgcctgcgagcagtgcggccctgatgcggtgctgggagagtgtacaccaagctgaagctgaaggcgtacatgattgtgtattgtgactgcacatattttcatcatcccctgtataggctctcgcgttgatgcttgagcacctgaggattttacctgaccatatacggcacaaattattacataaatagaaatggtgagtatatacaacgataaatcaatatggtccttgtttatgctgtgctctgtgttgggatttagaactagtcgataaatccttgtgatccttgcttatgccgtgcgccc

SEQ ID NO: 72024 - DNA, 1363 bp, Zea Mays
gaggaagggagcttcccccgatagatgtgccctccgataccctggatttcgtccgtggcgagtggctaccgcttgtgctccttttgtgacagctgaatctttgtggttcgaaggcgattgacttgggttcactgacgcggtgacgcccaatgagctcccacgtctccacatcgcggggtcttcatcccccaggcaagcttgggacgttggactcacccggtgcgtggcagccgccagcacctatggctcagcccgaagcaggccgcggtgatgaccaggaggtcaggctgttgtcggttgcttggaatcaggattgtggatgctttgctgccggtaccagtaacggattcaggatctttaattgcgagcctttcaaggagactttcaggagggatctcaagagcggcgggttcgcgattgtcgagatgctgttccgttgcaacgtccttgctcttgtaggtggtggctccaatgtgctgtacccgccgaacaaggtgattatctgggacgatctcctgagccgttgcattggggagttcgcctttcgctctgatgtccgagctgtaaaattagcaaaggactacatcgtgattgtcctcgagcgcaagatatttgtctacaacttcaccgatctgaagctgctctaccagattgacaccctgtcaaatcccaatggactttgctgcctctctcatcattccaatacttcagtgttggcctgccctgggttgcaccaggggcatgttcgcgtggagcatttcgggctgcagatggtgaagacaatcccagctcacgattcacacatctcttgcatgtcactgacaatggatggtctcctgctggcaacagcgagcacgaagggcactttgattagaatattcaacacaatggatggcactcgtctacaagaggtacgcagagggcttgacaaagcagaaatatacagcattgcattgtcgcccaatgtgcagtggttggcagtgtccagcgacaaagggactgttcatattttctccctgagagtcagagttgctggagtggattcaagcaatgagcaacgcgctcttgaaggtccacggatggatcaccagaactcttccagttctattgatcctcttattcaggcgaacactggatccaatgctagttcatcactgtcttttatgagagggatcctgccgaagtatttcagttcagagtggtcatttgctcagttccatttaccagaagtcactcgttacatagtagcctttggtgcccagaatactgtgatgatggttggcctggatggcagatgaaccatgaatggaatataaattgtggtaccttctctgttttggatcaagacattattggccttgtc

SEQ ID NO: 72025 - DNA, 1339 bp, Zea Mays
ctttccatcgtctccccctcccactcgtcgtgttcctcatcctcctgctggaatttacaagagcaacggctatctacgagtgacttgcaatggtggcctcaaccaaatgcgagccggggttcgtacctcagcttcttgctgatatgcgatatggttactatagcacgccatctaaatctaacgcttgtggtccctgaattggacaaaaggtcgttttgggctgacccaagtgattttggagatatttttgacgtggaccacttcattaattccttgagagatgagctgatgatagttaaagagctgcctttgaaactccagttaataagaactaagaagagactgtactccatgtctcctgtcagctggtcgaatgaaacatactacctaaagcggatactacctcttgcaaggaagcacaaagtaatccatttcgataaatcagacgcccgccttgcaaacaacggccttccagttcagctccagatgctgcgttgccgtgtaaacttcgatgctttgagattcaccccacagattgaggcccttggcagacagcttatctccactctccagagaagcgggcaattcgttgtgcttcacctgcgctatgagatggacatgctctccttttcaggctgcacgcatggctgctctactgaagaagctgaggagctcactagaatgagatatgcttatccatggtggaaagaaaaagagattggttctgaagcgaagaggcttcagggactttgcccccctcacgccagaggagattactctagtgcttaaagctctagggttcacaaaggacacgctgatctacattgcttctggtgagatctatggcggcgaaaggcgcttggcagtgctcaaggctgcgtaccctaaactagtaaggaaggagaagattctatctcctgatgaactgcggccgttccagaaccattcgacccagatggcagcgctggattacatggtctctctagcgagcgatattttcattcccagctatgacggaaatatggcaagggttgttgaaggtcaccgcaggtatatgggtttccgcaagaccattgctttggacagaaagaagctcgttgagctcttggaccttttccaaggacgcgctctatcttgggacgagttctcaggcgcagtgaaggaggcgcacaagagccgcacggggcaacctacggatagaaaggccatccctggccagcccaaggaagaggactatttctacgctaaccctcaggaatgccttggctctagtatcctgacagctcgtcctgggaacccgttgccaatgaataatggcgcctcgacgactgtagtatag

SEQ ID NO: 72026 - DNA, 1615 bp, Zea Mays
atgcgggcggtggccagcgccgtcgtgtggaccgcggtcgtgcaggtcgcctccatcgccgggctgttccgcccgcgggtcgtcgccgactgcggcgggaaaggcggcggcggcgccgcggccgggctcgccgctctcgccggcgaggacagcgccgccgcgaggctgtcgccgccggcgctcgtgcccaagagaatttacaagagcaacggctatctacgagtgacttgcaatggtggcctcaaccaaatgcgagccggggttcgtacctcagcttcttgctgatatgcgatatggttactatagcacgccatctaaatctaacgcttgtggtccctgaattggacaaaaggtcgttttgggctgacccaagtgattttggagatatttttgacgtggaccacttcattaattccttgagagatgagctgatgatagttaaagagctgcctttgaaactccagttaataagaactaagaagagactgtactccatgtctcctgtcagctggtcgaatgaaacatactacctaaagcgggtaacctttgatctttcgtaccacaaagcgcaggctgcatttagcagcacatcgacagagtgatgtcaagtggtctgaaagcacatattttgtagatactacctcttgcaaggaagcacaaagtaatccatttcgataaatcagacgcccgccttgcaaacaacggccttccagttcagctccagatgctgcgttgccgtgtaaacttcgatgctttgagattcaccccacagattgaggcccttggcagacagcttatctccactctccagagaagcgggcaattcgttgtgcttcacctgcgctatgagatggacatgctctccttttcaggctgcacgcatggctgctctactgaagaagctgaggagctcactagaatgaggtctgtgtctttcaccgttacacactactcaactctttgcgctacttcgacgcttcgctggaaaaagagattggttctgaagcgaagaggcttcagggactttgcccccctcacgccagaggagattactctagtgcttaaagctctagggttcacaaaggacacgctgatctacattgcttctggtgagatctatggcggcgaaaggcgcttggcagtgctcaaggctgcgtaccctaaactagtaaggaaggagaagattctatctcctgatgaactgcggccgttccagaaccattcgacccagatggcagcgctggattacatggtctctctagcgagcgatattttcattcccagctatgacggaaatatggcaagggttgttgaaggtcaccgcaggtatatgggtttccgcaagaccattgctttggacagaaagaagctcgttgagctcttggaccttttccaaggacgcgctctatcttgggacgagttctcaggcgcagtgaaggaggcgcacaagagccgcacggggcaacctacggatagaaaggccatccctggccagcccaaggaagaggactatttctacgctaaccctcaggaatgccttggctctagtatcctgacagctcgtcctgggaacccgttgccaatgaataatggcgcctcgacgactgtagtatag

SEQ ID NO: 72027 - DNA, 1459 bp, Zea Mays
atgcgggcggtggccagcgccgtcgtgtggaccgcggtcgtgcaggtcgcctccatcgccgggctgttccgcccgcgggtcgtcgccgactgcggcgggaaaggcggcggcggcgccgcggccgggctcgccgctctcgccggcgaggacagcgccgccgcgaggctgtcgccgccggcgctcgtgcccaagagaatttacaagagcaacggctatctacgagtgacttgcaatggtggcctcaaccaaatgcgagccgggatatgcgatatggttactatagcacgccatctaaatctaacgcttgtggtccctgaattggacaaaaggtcgttttgggctgacccaagtgattttggagatatttttgacgtggaccacttcattaattccttgagagatgagctgatgatagttaaagagctgcctttgaaactccagttaataagaactaagaagagactgtactccatgtctcctgtcagctggtcgaatgaaacatactacctaaagcggatactacctcttgcaaggaagcacaaagtaatccatttcgataaatcagacgcccgccttgcaaacaacggccttccagttcagctccagatgctgcgttgccgtgtaaacttcgatgctttgagattcaccccacagattgaggcccttggcagacagcttatctccactctccagagaagcgggcaattcgttgtgcttcacctgcgctatgagatggacatgctctccttttcaggctgcacgcatggctgctctactgaagaagctgaggagctcactagaatgagatatgcttatccatggtggaaagaaaaagagattggttctgaagcgaagaggcttcagggactttgcccccctcacgccagaggagattactctagtgcttaaagctctagggttcacaaaggacacgctgatctacattgcttctggtgagatctatggcggcgaaaggcgcttggcagtgctcaaggctgcgtaccctaaactagtaaggaaggagaagattctatctcctgatgaactgcggccgttccagaaccattcgacccagatggcagcgctggattacatggtctctctagcgagcgatattttcattcccagctatgacggaaatatggcaagggttgttgaaggtcaccgcaggtatatgggtttccgcaagaccattgctttggacagaaagaagctcgttgagctcttggaccttttccaaggacgcgctctatcttgggacgagttctcaggcgcagtgaaggaggcgcacaagagccgcacggggcaacctacggatagaaaggccatccctggccagcccaaggaagaggactatttctacgctaaccctcaggaatgccttggctctagtatcctgacagctcgtcctgggaacccgttgccaatgaataatggcgcctcgacgactgtagtatag

SEQ ID NO: 72028 - DNA, 1823 bp, Zea Mays
gatttggcaagtgatatacatagtaggtcaaaaaggggacgttgttgtgagcttggcaaaaaaaatgtggcttcaggccttcatccctatcttccatacgctacatttaggtagcgtttggttcggtgtcaacgagggatgggacgggatcaagtctgggctgacccgtcccttattttttgagggatgacctcatccaccatttttgaacaatattccttgatcctgagtctggatctctaaaccaaacgcgggtcaagttaaaatgattccatctcatccctcttcgtccttcctcgtccttccatccaaacacatctagagctcattccgatgcttagtagaaccactgttgttcatagcatttagtactagtgatcaggggggactccttcgttctgtatgctgaaggccgagcgttgttcagttccttcagacacgtggtgatcaggatcgatgccagaatttacaagagcaacggctatctacgagtgacttgcaatggtggcctcaaccaaatgcgagccgggatatgcgatatggttactatagcacgccatctaaatctaacgcttgtggtccctgaattggacaaaaggtcgttttgggctgacccaagtgattttggagatatttttgacgtggaccacttcattaattccttgagagatgagctgatgatagttaaagagctgcctttgaaactccagttaataagaactaagaagagactgtactccatgtctcctgtcagctggtcgaatgaaacatactacctaaagcgggtaacctttgatctttcgtaccacaaagcgcaggctgcatttagcagcacatcgacagagtgatgtcaagtggtctgaaagcacatattttgtagatactacctcttgcaaggaagcacaaagtaatccatttcgataaatcagacgcccgccttgcaaacaacggccttccagttcagctccagatgctgcgttgccgtgtaaacttcgatgctttgagattcaccccacagattgaggcccttggcagacagcttatctccactctccagagaagcgggcaattcgttgtgcttcacctgcgctatgagatggacatgctctccttttcaggctgcacgcatggctgctctactgaagaagctgaggagctcactagaatgagatatgcttatccatggtggaaagaaaaagagattggttctgaagcgaagaggcttcagggactttgcccccctcacgccagaggagattactctagtgcttaaagctctagggttcacaaaggacacgctgatctacattgcttctggtgagatctatggcggcgaaaggcgcttggcagtgctcaaggctgcgtaccctaaactagtaaggaaggagaagattctatctcctgatgaactgcggccgttccagaaccattcgacccagatggcagcgctggattacatggtctctctagcgagcgatattttcattcccagctatgacggaaatatggcaagggttgttgaaggtcaccgcaggtatatgggtttccgcaagaccattgctttggacagaaagaagctcgttgagctcttggaccttttccaaggacgcgctctatcttgggacgagttctcaggcgcagtgaaggaggcgcacaagagccgcacggggcaacctacggatagaaaggccatccctggccagcccaaggaagaggactatttctacgctaaccctcaggaatgccttggctctagtatcctgacagctcgtcctgggaacccgttgccaatgaataatggcgcctcgacgactgtagtatag

SEQ ID NO: 72029 - DNA, 611 bp, Zea Mays
caccctcttgaatttcaaaacaagccagccatggagaaaaacaaaaacaaaaggcggcggtggaggaagggcgcagcaggaagtcgaggaggactcggttgaagagcttgctgtcctcctgctgcggcaggtgccccgcgttggggatcaccttcaccgtcgccttctccccgagcttcctgcgcacacaaatacactccatgatatcagttgacttgcgttggattggaaaaccaaaagtgactgagtgagtgagtgaagaaacggacagctccgagcagaagggacaacttactctttcaccttgtgcgctttgtccaccgggaagatctggtcgaactctccccagatgatgagcacctcctgcagttagttcatcgatgtgctcgtgttcatagtacattccgtatttccgtagtcgtagcgacctgatcggtgtgcatgctctggtggtgttcagtggtgagtacgtacctgaggcagcggagcaagctcgaagccttctccggtggcgatccctctgatgagcgccatcttctcctccctcttgtccgcgaagtatctctgcatacatgtgcataaatgcgcacggtttgaatacaatcgaagcc

SEQ ID NO: 72030 - DNA, 1366 bp, Zea Mays
ggaccgattttgctaaccctgagcccaacgcgacccaacctcttcgtctccgatagtccgactccacgaagcgaagccgctcaacatcctcttccgctgcgcctgcgcgcgcgggaggacgaaatacggcaagaagctactcgagaaaggccacgcacgatgatggcgtgtcggcggctggcgagggacgccgtcgcggcctcgctccggcggagcgccgccaccgagaccaccgcctccacgcccgccttcttctcctcttcctccgccgctgcgtcctcctgctcctccggcgcaccagtcgccggcagccccattcgccacttcctggcgcgctattcaagccccgctttccagatccagcctagcgctgcggggctcggcccttcgttcgccgcgagagtggcccttggtctccggccgcagttgtcaggcctcaatctgatcaaaggatttggaacaagcaccatgctagcgatgacgcttcatcagggacaggttactgctgccacaaaagagcaaccatcaaaagccatagctggaccaccccaggggtctttgaaaaccaagcttggttcattttggcctttggtcaggaaacttcagctgccagttggattgatttttctgattatgtctgggttacacagcccattaagtctcaccctaaatattttgcttctcctctactgctcaagtccaagccgctattcaatatatttgtttcttcaggagtacatgcgtacaagaaatattattactgaagattacaagtttttttcaattggaaccattgaattagtagatgggagggtgctgcatctcattggaatgctgggcagctggtggatctaccgtgtgtcattcaagtgcaaagagctggtgtagaatatattttagttctgaaggaagagcgagttaaccatgtggtgctgaatagcagatattttgaatcatttctaactgaaagtattttgcaagaatataatggaagtatggagcccggtggccggtgctatttctcacagggcataaagcaattccatgtggaagatacatttcttgtcacatagcacatcgttgtcctgggtgtgttttctgtacaatcgccaatggattgcattatgtcccaaatgttgcttctctaggtttatcatctgtaaacaaggacatgattataatgaacactagtagctgccgcacgcacctgcgcgctgccgccatggtgctagattcatagtttatcatttgtattaggatatgtataagtataaaagtttaatttttgaataaattttagtctctatattcagagttcatgttctctagagtctggacaacatacagtggtttgattatagaatag

SEQ ID NO: 72031 - DNA, 3273 bp, Zea Mays
ggaccgattttgctaaccctgagcccaacgcgacccaacctcttcgtctccgatagtccgactccacgaagcgaagccgctcaacatcctcttccgctgcgcctgcgcgcgcgggaggacgaaatacggcaagaagctactcgagaaaggccacgcacgatgatggcgtgtcggcggctggcgagggacgccgtcgcggcctcgctccggcggagcgccgccaccgagaccaccgcctccacgcccgccttcttctcctcttcctccgccgctgcgtcctcctgctcctccggcgcaccagtcgccggcagccccattcgccacttcctggcgcgctattcaagccccgctttccagatccagcctagcgctgcggggctcggcccttcgttcgccgcgagagtggcccttggtctccggccgcagttgtcaggcctcaatctgatcaaaggatttggaacaagcaccatgctagcgatgacgcttcatcagggacaggttactgctgccacaaaagagcaaccatcaaaagccatagctggaccaccccaggggtctttgaaaaccaagcttggttcattttggcctttggtcaggaaacttcagctgccagttggattgatttttctgattatgtctgggttacacagcccattaagtctcaccctaaatattttgcttctcctctactgctcaagtccaagccgctattcaatatatttgtttcttcaggaggttagtcaaatgttgatgttattttatgaataaatatgtttgcaactactgatttgtgttgctcaacaatgtatgatgttttagatttcatcatgccgtgcaaaagttgactcacaggaggtcaatctgttttttttccttctgaactaatataccgttaattattttagcttcatcatagggaggtgggtcaaaaccatgctgtgtcgaaggaggaggtgagtttcatgcatatttgtttttttctcctttaggtcttagggttgtagtgcacacttgcaatttaaattggatttaaaactcgacctgcggagggtaagacagcccccgggcattgtattaagaagaagaccttctcacacaggtcgagaaaacccctgaacccctgccccacccatacacagcggcatcgaagcccatgtgagaacaaccacgaccggggctgagccttagacctgtgctttggcgtgggacagacgaggggatttttgttttaaccacagcctgaaattcgctcccacggggagtcgaacctaggacctgaggagtgctactcagaccacttaaccaactcagctagaggcactttcacttaaattggatttacagtagtcctacatcggttgcgtctcattctgattctgaaatgccttcaatatggttgtaactttcactcacaccaccttttttactgtttacattacatgtcctgaaatgtcccgtgagccccgaagcttgacatttttttatttagtttcgaaccaattaataaaaatcaccatattaagtttgtcaaagggacctctatggattcttttgaaaaaaaattttgggggggcgatcctaccattaggattatgagtttcgtacatgcaaaaaacttacaattgattaaaaaaaggatcacagccctgacagttttgggtctgttttagattatttgttagtatcccaatcaaggggcaattccctacatgcgaaattatacacgtcccttgtgtgccacaggccccacatgtcatacacacaaaaaaatcccccatatgccactcaatggcacataagggatggattatgctgaccttggataaacaaagtttgggcctttggggattcagtgttttattctcgtgagttctgagttttgtgcttttttattttctcggaaaaaactgtgcacctctgtaagtatttaaggtagttccttactgtattttaggcataagtattaaatgttttaaggaccctcatgaagaattacaaagttctaatgtctgggagattctttatactagctctgtatacctttttttacttaactgtctcggttgcttcaggattggagatggtgaatgattttccctcttttttgtatttttctgttgagatcattttcctctttagtgacttatagtgatgatttgataagtggggcatactgttttagtgcaactacaccatggcaaatgatatatcaatgagcacagacccagtagtccgacaaaactgttagactaaggctttgcagttcttcccatgcattccgcagcaacacacgtaaaaaaggggaatttaaagttttttttaatcgagttggaggtagtatttggttgagttatacttcttaaattttagtgagtccaacttttggatgtttccttgaattatgacttaataattgcaaatatggatttaattgaattaattgtctattacacaaataatgacacacatccacatcaatattcagatttctattttctttcctgtgttagtatgttcctttatgtgctaatttatttgaactaaacattgcatatttttctgcagtacatgcgtacaagaaatattattactgaagattacaagtttttttcaattggaaccattgaattagtagatgggagggtgctgcatctcattggaatgctgggcagctggtggatctaccgtgtgtcattcaagtgcaaagagctggtgtagaatatattttagttctgaaggaagagcgagttaaccatgtggtgctgaatagcagatattttgaatcatttctaactgaagtaggtacttgaattggcttttcagtaggtgctgtattactgttttttgaaagcagtgatgtccaatgttttgctagagtattttgcaagaatataatggaagtatggagcccggtggccggtgctatttctcacagggcataaagcaattccatgtggaagatacatttcttgtcacatagcacatcgttgtcctgggtgtgttttctgtacaatcgccaatggattgcattatgtcccaaatgttgcttctctaggtttatcatctgtaaacaaggacatgattataatgaacactagtagctgccgcacgcacctgcgcgctgccgccatggtgctagattcatagtttatcatttgtattaggatatgtataagtataaaagtttaatttttgaataaattttagtctctatattcagagttcatgttctctagagtctggacaacatacagtggtttgattatagaatag

SEQ ID NO: 72032 - DNA, 1229 bp, Zea Mays
atggcgcacggttctgccgtcgcgctcccttggtctccctccgcgctccatccgtcctccacgctcgatccccgattcccgcggcttccatcctcgaacccctgcagcggctcccatcctcgaatcccgcccgcggatcaagcagtcgcggttccttccatcctcgaatcgagcagctccatcctcgaacccccggcagcggcttccatcctcgagcccccgcagcggctcccatcctcaaatcccacctgcggatcaagtggcggaggttgcttccatcctcctccccctcttgatccgcgattacctggaatcgaggccgcaatttggaaggtgccgcaacatggaggcagccggatggcggcggcgggcgggctatggcagcgggagctaaagctgggcggcgagctgaagctggtggtcgacccacacaggggcgggggcgcggacgctggggcaggcgtgccaccggatctggcacaagctattcatttccatctcaagattaatgggctttggatctatgcagcaacatgggaattcgatcagaatccaaatgacttggcacattctaatgagttaaaactagaggaatattttttcaatgtcaaggcactactcatatcatatgtacgagattttaattgtgattttgtgtactcacatgcaaagtggatgatagttgataggagagttaaggacagagctgaactaaaggaccttacacagtggcatcgaccagatggtactctctcagtgtccagtagtgttcaccatttcgcttgggaaacatcggtttcaggttgtatcatggtatcaccagatcaagcaacaaaaatatacaaggccatgaaggacaagggccttcccgttgatttggttgagtgtgaaggggaacgacatggtttcctcaaggctcagtgatccctccgtcgccctcaacttctcgctcaaggcgacttcgtactctactaggctactcgactacaatgcagtgtgaaggcaagtatcatcagggatgacatggtccaaactcccatctccatcgggattgatggagaacatagtggtgcctacattgaaggcattctccctgcgtgcctatgacccaaaagtcgacatatttataacaatattacatatttataataatattacatactttccttgtatgatatttacagtgatattttatcacacggattttgcatatcataatgatgtttttt

SEQ ID NO: 72033 - DNA, 604 bp, Zea Mays
gaacagctacgtcaagtggctgtctacaacacatgcgtttacaaaccacggcgaacacatgcaataacagacactcatctcaatataaactatgcggacggcatttacaacagccttcgacatagattgtacatgacattaaacacacatcagttgtccatggtttcgtccaaaattcatccccatgcgtttgtttacccaggattgggttatatcattgggagtacactagcaaagtcaagttttaacgctttacaacccacaggcacggaatcaagcgtctcccagacgtcaaatcaagatagcaggagaccgttagggttcagaccatcacatccttggatctaagcaggataagaaaaggaaataatataacttgttagggtgccatcttctacttggtttcgtcaccatcgcaaaaattggattgcacctagtggatgcaatcaccagttggaaacttccacgggcttgccaggaggacttctgctcctggcacggaatccatcattgcttgttctgctctggtcccttccacgtgatccatagaacctgccgattgaatggaggatacagacagttggaattcattcttcatggatgc

SEQ ID NO: 72034 - DNA, 534 bp, Zea Mays
atgagagattatccatattgttgtactagcaccacatcaacgaatccatacaggcctttagcagcacacttgaaaaaacaaccatgttttaattctgaactctgaagtcgcctttacaaacagcactgcaacgcagaaagctacacaagctacaccagacaaggggcaacacaatctcgtcatctggtgcagtacatagtagttatgatttatgaacaactctaactcctatcgtcccaccatgcacaatgcacttattatcactcaataactataaaaacactgctatctgaactttcagtatctcaaacacaaacagagaagccatggcgctgcctgcagcctgcagcctatgtggtgaggatgggcgggaggtaatccgacttgttgccgaggacgcgggcacgggtgtcagggaagttctccatcccgggcagctcagtaacggtgccgtcggcagtgacaccgatcgggtagctgaggaggtggcccgggaggtcctgctccaggtcatcactcgagtacaggtcccag

SEQ ID NO: 72035 - DNA, 1505 bp, Zea Mays
gcatttgacatggcagggcatcccaaataatcaatgcagttggtggtgttcatggttgatgcggacgggcgggccagctataaacaaattttcatagtgtatacttgggcagacccgatcatcagacgttttccaaaatgaaaaaaaaaacagcatcagatcaggtgacatggcatctcattatctcaacgctgctcacctcgaggttttagctgctgctgcgtgctgcccgtgtcaagtccggagcaagagcaaccaaccaaccacctcctcccctctccgtctcccagtccggcctcgctcgccactcggagtctcggagtcaaccgccagcgcctcgatccggcgaagccagcccagcccatggcctccggcgccgtaccaccgcagcgggtcgccctgctggcgctcgccgccgccctctccgtcgtctcattcccgcacctgtccctcctcgcctcgtcccatccgctcccgcaggaagctgctgctgctgctgcgggtgcggcggcgggaggcgaggcgtccgagcctcacggcaccgccgccgatggtgccgccgtggcgcggcgcgcgtgcacgtacacggtgcagatcaagacgagctgcgcgtccccgcggagctccgcggacgcggtgagcctcgcgttcggggacgcgtaccgcaacgaggtgtacgcggcgacggtgacgccgcggcgcgggttcgagcgctgcgccacggacacgttccgcgtcgccgggccctgcggctacggcgtctgctacctctacctgcgccggtcgggccgcgcggccgggtggacgcccgagtgggtcagggtgtacgagccggcgtccggcgcgccctccaccttctactacggcgacccgctccccgacggcgtctggtacggcttcgaccgctgcgtcaaggccggggccggcgcctctgccgagcatggtgccgcggcgcggacgctgtgacggacggacgcggacgccgccggtctctgggcgacagggcgaggtagcagagcgccactcgtggcgcgcggtcctgctgccgtgtcaagcgatgattgctggggcacggcgtctctttctgtgcaagtggagtattcatttcgggtggctgctagtagtaatagcttctctatttggtctatttgcgttacgtgtagtacgtgccacgcataataaaaagtagtacgtatgtctgaaaaagaaaatatgagtcctcaaaggattttctatgcaacgctagcaataaaaaccgatccaatctgtgagttgtttttttctagttcgcctctcatcagggccctgttgccaattcgacaacgatcccacactgtatgcccggtctgattagctgccttccttttgctgtctacgagtgtatcaaaacattccatggaaatgcgacaacagaaactaaacacatcctcatcgtgtgcgttccttccacatccacacgcgttctcagccacggggcgagtgtcgttctgccacactccaccagc

SEQ ID NO: 72036 - DNA, 6155 bp, Zea Mays
ctaaacagtagaaatggacagcacaattgtccatttggcctttttggtgtgatttctggactcacatttgagcttttaaaacctcctcttcctccgcacctgttcacccctttcttttccgttcttctccgtaccccaatcactgctactcaacagccaactctttcgcaaccaaatatttcttctggcgttttggggtttgcaaaccgctatcaacattggagttggagcagaatgtgatctgtccaattcttctcttgtcttatttttggcgtgctttgctcttctttccccctatttcctgaggaggggttcccgtcttaatctcttgcgtttagtgtggcttcgaagagttagcagctgccatggcacataatgtgtgggaggcggacaagatgttggattcctacatttatgattacctgttgaagaggaacctgcagaacacggcgaaggcattccaagccgaaagcaacgtgccttcggctcctgtttcgattgatgcgccaggggggtttctcttcgaatggtggtcggttttctgggacgtcttcattgcaagaacgaacgaaaaacattccgattctgccacttcttaccttgagtcaattaaagcacgggagcagcagcaacaatcgcagcaccagatccagacgcagcaactcttgctacagaggcatgcgcaacagcatccgcaagagcagcagcaatggcggcagcagaagcaacagcagcgcagcgaaaacactgattttccaactagtgcccagaatggtactgttgctgctgatccaccagcgcgacaaaatgatacaactgcaggtactttatctgcaaaagtatttgaggatagaatgaaaattactgttcagagggacgtttcagaagagacttcaatgaagcaaaggctcactgaaaccatttgcccattactggaatcaaacccaacttcaatgctaaagtcacctgcaagatcatctctagcttcagggccaatcttccaaagatcagctgggggcatgtccggttcattacagcaagctcagttcaggagccagccacttctgggatcaacacaggatattaaggcggaaacaaatgtagctttgaaccagagagctgcaggtgcagatggatcactatttggagtaccaggctctaatcaggcggggaacaatttgaccttgaaaggatggcctctcacaggattagaacagcttcgatctgggtttctccagcacaaatcttatatgtacccggcccagccattacaacaccagctccagtttctcactcctcagcagcagcatgctctaattcatgttcaagcacaacaaaatgccacttcacctggagacatggataacagacgacttcggatgctttttagcagccgaaacttggttcctgggagagatggtcaatcaactggtttcactgaaattgttcccagtgttggccagtcattgcaaaacatgtgcttacctatgcagcgcactgagacagatatgctgatgaagatagctgctctacagcaacaacagccgagtaacaatctgcaacagctcctccaacatccattactgagtcagcaacaacaaagctcaacttatcttgaaggtgagcaggaaaaaatgggtgctggaattgtaacagtggcttttgctggaaatgaacaggtttctaagaatcgaaatgggcgaaagcgcaaacatcctatctcctcgtctggcccagccaatagctctggtactacaaatactgctggtgcttcccccagttcaacaccttcaactctttctgcacattctcccggagaaacaatatcaacaccattgcagcaccaaaatgcgagctcatgtacgactttagttgtttatggttctgagggtccagtaccaataggatcgccgaccaatcaacttgttgatatggatcactataccgaggatgactccatggaagataatttagaaccattcttgccgcataatggcacaaatccaagagctgctggtagccattgtatcagttctggaaaaggatatatccttagagaggtatcttcagcccaagcaagcacaagcagtgttctgtgttgtcatttctcgtcagatggaaaattaattgctactggaggtcacgataagaaggttttcctgtggaatgctgacactctgaaacaaaaatcaatgctagaggagcattctctgctcataactgatgtgcgcttcagcccaagcactcctcgcctcgccacatcttcatttgacaaaactgtgagggtttgggatgctgataaccatggttattcaattcgtacgttcactgggcactcagcatctgttatgtcactcgatttccacccgaacaaggatgacctcatttgttcttgcgatggggacaacgagatacggttctggagcatcaagcatggaaatgctgtccgaattttcaagggaggttcgacccagctgagattccaaccacgttatggaggactccttgcaacggcttcagacaatgtagtctctatcctggatgtggagaggcaagcttgcgtgaggagatttgagagccacactaagggcgtcgattccgtgtgctgggatcccaccggcgagtacgtggtgtctgtcagtgaagacacggtgaaggtgtggtctttgaacgacgagagcttcgtgaacgagcttagctgcggcgggagaaagttcagttcgtgcactttccatcctacgtacccatccttgcttatcattggctgttaccagtctctggagctgtgggacatgtccgagaaccggagcatgactgttgcagcgcacgacagcctcgtctcggccctggcatcgtcgagctccggcctggttgcttcgagtggccatgacaagtatgtcaagctgtggagatgagcttcgactttcctgccctggcatgttaagtacggttgtggacgcgccccaacccttttggcaccattagctatctgcttgcattgcagtagcgctcaggagttaggatggtgactcgaccgcctgactgaacatgtgtccgctgaagtagcgtgcagtaaaaccctgaagaagtgggtttagcgcctagcttttgtataggaaattagaacacgggttatgttaagtatccaatgtctgtcactaccttgacatctgacatggcttgaaagcttttgctgctgcaactcggcttccgaaagggatcacatttctgtgctcgtgggtggcgtgtgtggtgtggtgttgcgtacaagacaagatgcaaggctagaaagataacggcagtcccaacttagaagaaaggaacccttgtagcccgtgatgcctagctaacgcaacgagattcccgtgttcaattctaattcgcacgtaggagtagcagatctgcggatctgccgttccgattcctctacgaggaagaacagctatgcctccggtcattcaagatctgtggccttgtttgctatgcctgcgtcgaatcatcttcttcgtctgcagacttgttcgagacgccaccctcccccgccgcgcgccgccgcccgcggacatggatctccttcgctctcatctccacaaggtccggatccccgagccaaccaaccgcatccacaaggacgagtgctgcgtctccttcgacactccgaggtcagagggaggcctgtacgtggacatggtctcgttcctggggttcgggagggagtacgtggagtggaacttcgagaagacggggaaccccgtgtacctccacatcgttcagcgccggaagccggagcccgacgaggcggatcgcccgcttaagaagcccaccctcctcgctataggtgtggaaggaggttttggtgatcaagaaccagaatatgatgaaacttttgaaatagtcatcttacctgattttatttgtcttccatttccgtcagttgatttgccagagaaggttaggcttgcggttgataaagttttacttgctgaaagtgctgatagaaaagaacaactggctgcttgggttgctgacaaaaagaacattagtgcatatgctatggacctgcagcagctagacaatggtgttattgtgcctcctactggatggaagtgtagcaaatgcgataaaactgagaacctctggctgaatttaactgatggtatgatcctttgtgggaggaagctctgggatggaagtggtgggaataatcatgccattgaacattatgaacagactaaataccctcttgcggtgaagcttggaacaattactgctgatttggaagcggcagatgttttctcgtaccctgaagatgatagtgttgaagatccgctattagctcagcacttatcacattttggtatcgatttttcttcactccaaaagactgagatgactactgctgagagggaacttgatgctaacacaaattatgactggaatagaatacaagaaagtggaaaagacgctgagcttctgtttggacccggctatactggtcttgcgaatcttgggaatagttgctatatggcttcaataatgcaagtcatgttttcaatccatcctttcatatcaaggtacttcgagaaacagagtttgaaagctgcatttgcaactgcacccgctgatccaacagtagacctaaacatgcaactgacaaaactagcgcatggtttgctctctggtaaatattctgctccagcaaaggaggggcaagaagggatacgttctcgcatgtttaagtcagttatcactgcgaaccatcctgaattttcaagcatgagacaacaggatgtccttgaattcttccttcaccttattgacagagttgagaaggcaaaccctggagaccgtgagctaaatcctttttccggtttcaagtttgttgttgaagagagggttcagtgcccttctgggaaggtttcttacaacaaacgatctgacaacgttctttctttgagcataccactgcatgaggcaactaataaagagcagctagaagcttttaatgagaagaaagctgcaatgaacttggatggaaaagaagtgtctaatgaggatattgtcaggcctagagtcccattggaggcatgcttgtcaagtttttcagggccagaggagattccagatttttatagcactgcattaaattcaaagactaccgtcactaagacagctggtttcactacctttcctgattaccttgtgctgcacatgcgtaagtttgtaatggaaacaggatgggtgccaaagaaactcgatgtttatatagatgtgccagatacaattgatatcacacatatgcgcagcaaaggattacagcctggggaagagctgctacctgaaggaggttctggtgacgacagtgccgagcctgctaatcctgttgccagtgaggatattgtaacccagcttgcaagcatgggcttcaactaccttcattgtcagaaagctgctattaacacatcaaacacaggagttgaggaagcgatgaattggctcctctcgcacatggatgatccagatataaacgacccaatatcaaaagattcacgtgcttatgagccatctgttgacgaagcaagtgttcaaactctcatctcctttggattccaggaagacattgccataaaggccctgaaagcttctggtggtaatatcgagaaagctacagactggattttcagccaccccgaagcatctacctcagcatctgctgattcttccactagcaatgtaaatgctgatgacacatatattccagatggaagtggcagatacaagctgatggcgttcgtgagccatatgggcacctctacccactgcgggcactacgtagctcatgtcctcaaagacgggaggtggacaatctttaacgacagcaaggtcgcagtatctgttgacctgcccaaggaaatgggctacctctatttctttcagaggattagcaactaggcacgtcacacacaatggaaagaatggtgggctgttaggatactgtcttgctgattttaaagcgaacgtttactcacatcctgccatgctggttactgaatggtcaaccgggatatttgcttttttgttccttgagacctcgattggcatcttccggttacataagaacaaaatcgcaatgaaagaaagtagacaataagaca

SEQ ID NO: 72037 - DNA, 6056 bp, Zea Mays
cacccctttcttttccgttcttctccgtaccccaatcactgctactcaacagccaactctttcgcaaccaaatatttcttctggcgttttggggtttgcaaaccgctatcaacattggagttggagcagaatgtgatctgtccaattcttctcttgtcttatttttggcgtgctttgctcttctttccccctatttcctgaggaggggttcccgtcttaatctcttgcgtttagtgtggcttcgaagagttagcagctgccatggcacataatgtgtgggaggcggacaagatgttggattcctacatttatgattacctgttgaagaggaacctgcagaacacggcgaaggcattccaagccgaaagcaacgtgccttcggctcctgtttcgattgatgcgccaggggggtttctcttcgaatggtggtcggttttctgggacgtcttcattgcaagaacgaacgaaaaacattccgattctgccacttcttaccttgagtcaattaaagcacgggagcagcagcaacaatcgcagcaccagatccagacgcagcaactcttgctacagaggcatgcgcaacagcatccgcaagagcagcagcaatggcggcagcagaagcaacagcagcgcagcgaaaacactgattttccaactagtgcccagaatggtactgttgctgctgatccaccagcgcgacaaaatgatacaactgcaggtactttatctgcaaaagtatttgaggatagaatgaaaattactgttcagagggacgtttcagaagagacttcaatgaagcaaaggctcactgaaaccatttgcccattactggaatcaaacccaacttcaatgctaaagtcacctgcaagatcatctctagcttcagggccaatcttccaaagatcagctgggggcatgtccggttcattacagcaagctcagttcaggagccagccacttctgggatcaacacaggatattaaggcggaaacaaatgtagctttgaaccagagagctgcaggtgcagatggatcactatttggagtaccaggctctaatcaggcggggaacaatttgaccttgaaaggatggcctctcacaggattagaacagcttcgatctgggtttctccagcacaaatcttatatgtacccggcccagccattacaacaccagctccagtttctcactcctcagcagcagcatgctctaattcatgttcaagcacaacaaaatgccacttcacctggagacatggataacagacgacttcggatgctttttagcagccgaaacttggttcctgggagagatggtcaatcaactggtttcactgaaattgttcccagtgttggccagtcattgcaaaacatgtgcttacctatgcagcgcactgagacagatatgctgatgaagatagctgctctacagcaacaacagccgagtaacaatctgcaacagctcctccaacatccattactgagtcagcaacaacaaagctcaacttatcttgaaggtgagcaggaaaaaatgggtgctggaattgtaacagtggcttttgctggaaatgaacaggtttctaagaatcgaaatgggcgaaagcgcaaacatcctatctcctcgtctggcccagccaatagctctggtactacaaatactgctggtgcttcccccagttcaacaccttcaactctttctgcacattctcccggagaaacaatatcaacaccattgcagcaccaaaatgcgagctcatgtacgactttagttgtttatggttctgagggtccagtaccaataggatcgccgaccaatcaacttgttgatatggatcactataccgaggatgactccatggaagataatttagaaccattcttgccgcataatggcacaaatccaagagctgctggtagccattgtatcagttctggaaaaggatatatccttagagaggtatcttcagcccaagcaagcacaagcagtgttctgtgttgtcatttctcgtcagatggaaaattaattgctactggaggtcacgataagaaggttttcctgtggaatgctgacactctgaaacaaaaatcaatgctagaggagcattctctgctcataactgatgtgcgcttcagcccaagcactcctcgcctcgccacatcttcatttgacaaaactgtgagggtttgggatgctgataaccatggttattcaattcgtacgttcactgggcactcagcatctgttatgtcactcgatttccacccgaacaaggatgacctcatttgttcttgcgatggggacaacgagatacggttctggagcatcaagcatggaaatgctgtccgaattttcaagggaggttcgacccagctgagattccaaccacgttatggaggactccttgcaacggcttcagacaatgtagtctctatcctggatgtggagaggcaagcttgcgtgaggagatttgagagccacactaagggcgtcgattccgtgtgctgggatcccaccggcgagtacgtggtgtctgtcagtgaagacacggtgaaggtgtggtctttgaacgacgagagcttcgtgaacgagcttagctgcggcgggagaaagttcagttcgtgcactttccatcctacgtacccatccttgcttatcattggctgttaccagtctctggagctgtgggacatgtccgagaaccggagcatgactgttgcagcgcacgacagcctcgtctcggccctggcatcgtcgagctccggcctggttgcttcgagtggccatgacaagtatgtcaagctgtggagatgagcttcgactttcctgccctggcatgttaagtacggttgtggacgcgccccaacccttttggcaccattagctatctgcttgcattgcagtagcgctcaggagttaggatggtgactcgaccgcctgactgaacatgtgtccgctgaagtagcgtgcagtaaaaccctgaagaagtgggtttagcgcctagcttttgtataggaaattagaacacgggttatgttaagtatccaatgtctgtcactaccttgacatctgacatggcttgaaagcttttgctgctgcaactcggcttccgaaagggatcacatttctgtgctcgtgggtggcgtgtgtggtgtggtgttgcgtacaagacaagatgcaaggctagaaagataacggcagtcccaacttagaagaaaggaacccttgtagcccgtgatgcctagctaacgcaacgagattcccgtgttcaattctaattcgcacgtaggagtagcagatctgcggatctgccgttccgattcctctacgaggaagaacagctatgcctccggtcattcaagatctgtggccttgtttgctatgcctgcgtcgaatcatcttcttcgtctgcagacttgttcgaggtaagacgccaccctcccccgccgcgcgccgccgcccgcggacatggatctccttcgctctcatctccacaaggtccggatccccgagccaaccaaccgcatccacaaggacgagtgctgcgtctccttcgacactccgaggtcagagggaggcctgtacgtggacatggtctcgttcctggggttcgggagggagtacgtggagtggaacttcgagaagacggggaaccccgtgtacctccacatcgttcagcgccggaagccggagcccgacgaggcggatcgcccgcttaagaagcccaccctcctcgctataggtgtggaaggaggttttggtgatcaagaaccagaatatgatgaaacttttgaaatagtcatcttacctgattttatttgtcttccatttccgtcagttgatttgccagagaaggttaggcttgcggttgataaagttttacttgctgaaagtgctgatagaaaagaacaactggctgcttgggttgctgacaaaaagaacattagtgcatatgctatggacctgcagcagctagacaatggtgttattgtgcctcctactggatggaagtgtagcaaatgcgataaaactgagaacctctggctgaatttaactgatggtatgatcctttgtgggaggaagctctgggatggaagtggtgggaataatcatgccattgaacattatgaacagactaaataccctcttgcggtgaagcttggaacaattactgctgatttggaagcggcagatgttttctcgtaccctgaagatgatagtgttgaagatccgctattagctcagcacttatcacattttggtatcgatttttcttcactccaaaagactgagatgactactgctgagagggaacttgatgctaacacaaattatgactggaatagaatacaagaaagtggaaaagacgctgagcttctgtttggacccggctatactggtcttgcgaatcttgggaatagttgctatatggcttcaataatgcaagtcatgttttcaatccatcctttcatatcaaggtacttcgagaaacagagtttgaaagctgcatttgcaactgcacccgctgatccaacagtagacctaaacatgcaactgacaaaactagcgcatggtttgctctctggtaaatattctgctccagcaaaggaggggcaagaagggatacgttctcgcatgtttaagtcagttatcactgcgaaccatcctgaattttcaagcatgagacaacaggatgtccttgaattcttccttcaccttattgacagagttgagaaggcaaaccctggagaccgtgagctaaatcctttttccggtttcaagtttgttgttgaagagagggttcagtgcccttctgggaaggtttcttacaacaaacgatctgacaacgttctttctttgagcataccactgcatgaggcaactaataaagagcagctagaagcttttaatgagaagaaagctgcaatgaacttggatggaaaagaagtgtctaatgaggatattgtcaggcctagagtcccattggaggcatgcttgtcaagtttttcagggccagaggagattccagatttttatagcactgcattaaattcaaagactaccgtcactaagacagctggtttcactacctttcctgattaccttgtgctgcacatgcgtaagtttgtaatggaaacaggatgggtgccaaagaaactcgatgtttatatagatgtgccagatacaattgatatcacacatatgcgcagcaaaggattacagcctggggaagagctgctacctgaaggaggttctggtgacgacagtgccgagcctgctaatcctgttgccagtgaggatattgtaacccagcttgcaagcatgggcttcaactaccttcattgtcagaaagctgctattaacacatcaaacacaggagttgaggaagcgatgaattggctcctctcgcacatggatgatccagatataaacgacccaatatcaaaagattcacgtgcttatgagccatctgttgacgaagcaagtgttcaaactctcatctcctttggattccaggaagacattgccataaaggccctgaaagcttctggtggtaatatcgagaaagctacagactggattttcagccaccccgaagcatctacctcagcatctgctgattcttccactagcaatgtaaatgctgatgacacatatattccagatggaagtggcagatacaagctgatggcgttcgtgagccatatgggcacctctacccactgcgggcactacgtagctcatgtcctcaaagacgggaggtggacaatctttaacgacagcaaggtcgcagtatctgttgacctgcccaaggaaatgggctacctctatttctttcagaggattagcaactaggcacgtcacacacaatggaaagaatggtgggctgttaggatactgtcttgctgattttaaagcgaacgtttactcacatcctgccatgctggttactgaatggtcaaccgggatatttgcttttttgttccttgagacctcgattggcatcttccggttacataagaacaaaatcgcaatgaaagaaagtagacaataagaca

SEQ ID NO: 72038 - DNA, 5268 bp, Zea Mays
cttcaatgaaggcaaaggctcactgaaaccatttgcccattactggaatcaaacccaacttcaatgctaaagtcacctgcaagatcatctctagcttcagggccaatcttccaaagatcagctgggggcatgtccggttcattacagcaagctcagttcaggagccagccacttctgggatcaacacaggatattaaggcggaaacaaatgtagctttgaaccagagagctgcaggtgcagatggatcactatttggagtaccaggctctaatcaggcggggaacaatttgaccttgaaaggatggcctctcacaggattagaacagcttcgatctgggtttctccagcacaaatcttatatgtacccggcccagccattacaacaccagctccagtttctcactcctcagcagcagcatgctctaattcatgttcaagcacaacaaaatgccacttcacctggagacatggataacagacgacttcggatgctttttagcagccgaaacttggttcctgggagagatggtcaatcaactggtttcactgaaattgttcccagtgttggccagtcattgcaaaacatgtgcttacctatgcagcgcactgagacagatatgctgatgaagaagatagctgctctacagcaacaacagccgagtaacaatctgcaacagctcctccaacatccattactgagtcagcaacaacaaagctcaacttatcttgaaggtgagcaggaaaaaatgggtgctggaattgtaacagtggcttttgctggaaatgaacaggtttctaagaatcgaaatgggcgaaagcgcaaacatcctatctcctcgtctggcccagccaatagctctggtactacaaatactgctggtgcttcccccagttcaacaccttcaactctttctgcacattctcccggagaaacaatatcaacaccattgcagcaccaaaatgcgagctcatgtacgactttagttgtttatggttctgagggtccagtaccaataggatcgccgaccaatcaacttgttgatatggatcactataccgaggatgactccatggaagataatttagaaccattcttgccgcataatggcacaaatccaagagctgctggtagccattgtatcagttctggaaaaggatatatccttagagaggtatcttcagcccaagcaagcacaagcagtgttctgtgttgtcatttctcgtcagatggaaaattaattgctactggaggtcacgataagaaggttttcctgtggaatgctgacactctgaaacaaaaatcaatgctagaggagcattctctgctcataactgatgtgcgcttcagcccaagcactcctcgcctcgccacatcttcatttgacaaaactgtgagggtttgggatgctgataaccatggttattcaattcgtacgttcactgggcactcagcatctgttatgtcactcgatttccacccgaacaaggatgacctcatttgttcttgcgatggggacaacgagatacggttctggagcatcaagcatggaaatgctgtccgaattttcaagggaggttcgacccagctgagattccaaccacgttatggaggactccttgcaacggcttcagacaatgtagtctctatcctggatgtggagaggcaagcttgcgtgaggagatttgagagccacactaagggcgtcgattccgtgtgctgggatcccaccggcgagtacgtggtgtctgtcagtgaagacacggtgaaggtgtggtctttgaacgacgagagcttcgtgaacgagcttagctgcggcgggagaaagttcagttcgtgcactttccatcctacgtacccatccttgcttatcattggctgttaccagtctctggagctgtgggacatgtccgagaaccggagcatgactgttgcagcgcacgacagcctcgtctcggccctggcatcgtcgagctccggcctggttgcttcgagtggccatgacaagtatgtcaagctgtggagatgagcttcgactttcctgccctggcatgttaagtacggttgtggacgcgccccaacccttttggcaccattagctatctgcttgcattgcagtagcgctcaggagttaggatggtgactcgaccgcctgactgaacatgtgtccgctgaagtagcgtgcagtaaaaccctgaagaagtgggtttagcgcctagcttttgtataggaaattagaacacgggttatgttaagtatccaatgtctgtcactaccttgacatctgacatggcttgaaagcttttgctgctgcaactcggcttccgaaagggatcacatttctgtgctcgtgggtggcgtgtgtggtgtggtgttgcgtacaagacaagatgcaaggctagaaagataacggcagtcccaacttagaagaaaggaacccttgtagcccgtgatgcctagctaacgcaacgagattcccgtgttcaattctaattcgcacgtaggagtagcagatctgcggatctgccgttccgattcctctacgaggaagaacagctatgcctccggtcattcaagatctgtggccttgtttgctatgcctgcgtcgaatcatcttcttcgtctgcagacttgttcgagacgccaccctcccccgccgcgcgccgccgcccgcggacatggatctccttcgctctcatctccacaaggtccggatccccgagccaaccaaccgcatccacaaggacgagtgctgcgtctccttcgacactccgaggtcagagggaggcctgtacgtggacatggtctcgttcctggggttcgggagggagtacgtggagtggaacttcgagaagacggggaaccccgtgtacctccacatcgttcagcgccggaagccggagcccgacgaggcggatcgcccgcttaagaagcccaccctcctcgctataggtgtggaaggaggttttggtgatcaagaaccagaatatgatgaaacttttgaaatagtcatcttacctgattttatttgtcttccatttccgtcagttgatttgccagagaaggttaggcttgcggttgataaagttttacttgctgaaagtgctgatagaaaagaacaactggctgcttgggttgctgacaaaaagaacattagtgcatatgctatggacctgcagcagctagacaatggtgttattgtgcctcctactggatggaagtgtagcaaatgcgataaaactgagaacctctggctgaatttaactgatggtatgatcctttgtgggaggaagctctgggatggaagtggtgggaataatcatgccattgaacattatgaacagactaaataccctcttgcggtgaagcttggaacaattactgctgatttggaagcggcagatgttttctcgtaccctgaagatgatagtgttgaagatccgctattagctcagcacttatcacattttggtatcgatttttcttcactccaaaagactgagatgactactgctgagagggaacttgatgctaacacaaattatgactggaatagaatacaagaaagtggaaaagacgctgagcttctgtttggacccggctatactggtcttgcgaatcttgggaatagttgctatatggcttcaataatgcaagtcatgttttcaatccatcctttcatatcaaggtacttcgagaaacagagtttgaaagctgcatttgcaactgcacccgctgatccaacagtagacctaaacatgcaactgacaaaactagcgcatggtttgctctctggtaaatattctgctccagcaaaggaggggcaagaagggatacgttctcgcatgtttaagtcagttatcactgcgaaccatcctgaattttcaagcatgagacaacaggatgtccttgaattcttccttcaccttattgacagagttgagaaggcaaaccctggagaccgtgagctaaatcctttttccggtttcaagtttgttgttgaagagagggttcagtgcccttctgggaaggtttcttacaacaaacgatctgacaacgttctttctttgagcataccactgcatgaggcaactaataaagagcagctagaagcttttaatgagaagaaagctgcaatgaacttggatggaaaagaagtgtctaatgaggatattgtcaggcctagagtcccattggaggcatgcttgtcaagtttttcagggccagaggagattccagatttttatagcactgcattaaattcaaagactaccgtcactaagacagctggtttcactacctttcctgattaccttgtgctgcacatgcgtaagtttgtaatggaaacaggatgggtgccaaagaaactcgatgtttatatagatgtgccagatacaattgatatcacacatatgcgcagcaaaggattacagcctggggaagagctgctacctgaaggaggttctggtgacgacagtgccgagcctgctaatcctgttgccagtgaggatattgtaacccagcttgcaagcatgggcttcaactaccttcattgtcagaaagctgctattaacacatcaaacacaggagttgaggaagcgatgaattggctcctctcgcacatggatgatccagatataaacgacccaatatcaaaagattcacgtgcttatgagccatctgttgacgaagcaagtgttcaaactctcatctcctttggattccaggaagacattgccataaaggccctgaaagcttctggtggtaatatcgagaaagctacagactggattttcagccaccccgaagcatctacctcagcatctgctgattcttccactagcaatgtaaatgctgatgacacatatattccagatggaagtggcagatacaagctgatggcgttcgtgagccatatgggcacctctacccactgcgggcactacgtagctcatgtcctcaaagacgggaggtggacaatctttaacgacagcaaggtcgcagtatctgttgacctgcccaaggaaatgggctacctctatttctttcagaggattagcaactaggcacgtcacacacaatggaaagaatggtgggctgttaggatactgtcttgctgattttaaagcgaacgtttactcacatcctgccatgctggttactgaatggtcaaccgggatatttgcttttttgttccttgagacctcgattggcatcttccggttacataagaacaaaatcgcaatgaaagaaagtagacaataagaca

SEQ ID NO: 72039 - DNA, 3900 bp, Zea Mays
atgagagatgcctgcccttatttacttcaaagctgtaattgcagcaaacatggttattcaattcgtacgttcactgggcactcagcatctgttatgtcactcgatttccacccgaacaaggatgacctcatttgttcttgcgatggggacaacgagatacggttctggagcatcaagcatggaaatgctgtccgaattttcaagggaggttcgacccagctgagattccaaccacgttatggaggactccttgcaacggcttcagacaatgtagtctctatcctggatgtggagaggcaagcttgcgtgaggagatttgagagccacactaagggcgtcgattccgtgtgctgggatcccaccggcgagtacgtggtgtctgtcagtgaagacacggtgaaggtgtggtctttgaacgacgagagcttcgtgaacgagcttagctgcggcgggagaaagttcagttcgtgcactttccatcctacgtacccatccttgcttatcattggctgttaccagtctctggagctgtgggacatgtccgagaaccggagcatgactgttgcagcgcacgacagcctcgtctcggccctggcatcgtcgagctccggcctggttgcttcgagtggccatgacaagtatgtcaagctgtggagatgagcttcgactttcctgccctggcatgttaagtacggttgtggacgcgccccaacccttttggcaccattagctatctgcttgcattgcagtagcgctcaggagttaggatggtgactcgaccgcctgactgaacatgtgtccgctgaagtagcgtgcagtaaaaccctgaagaagtgggtttagcgcctagcttttgtataggaaattagaacacgggttatgttaagtatccaatgtctgtcactaccttgacatctgacatggcttgaaagcttttgctgctgcaactcggcttccgaaagggatcacatttctgtgctcgtgggtggcgtgtgtggtgtggtgttgcgtacaagacaagatgcaaggctagaaagataacggcagtcccaacttagaagaaaggaacccttgtagcccgtgatgcctagctaacgcaacgagattcccgtgttcaattctaattcgcacgtaggagtagcagatctgcggatctgccgttccgattcctctacgaggaagaacagctatgcctccggtcattcaagatctgtggccttgtttgctatgcctgcgtcgaatcatcttcttcgtctgcagacttgttcgagacgccaccctcccccgccgcgcgccgccgcccgcggacatggatctccttcgctctcatctccacaaggtccggatccccgagccaaccaaccgcatccacaaggacgagtgctgcgtctccttcgacactccgaggtcagagggaggcctgtacgtggacatggtctcgttcctggggttcgggagggagtacgtggagtggaacttcgagaagacggggaaccccgtgtacctccacatcgttcagcgccggaagccggagcccgacgaggcggatcgcccgcttaagaagcccaccctcctcgctataggtgtggaaggaggttttggtgatcaagaaccagaatatgatgaaacttttgaaatagtcatcttacctgattttatttgtcttccatttccgtcagttgatttgccagagaaggttaggcttgcggttgataaagttttacttgctgaaagtgctgatagaaaagaacaactggctgcttgggttgctgacaaaaagaacattagtgcatatgctatggacctgcagcagctagacaatggtgttattgtgcctcctactggatggaagtgtagcaaatgcgataaaactgagaacctctggctgaatttaactgatggtatgatcctttgtgggaggaagctctgggatggaagtggtgggaataatcatgccattgaacattatgaacagactaaataccctcttgcggtgaagcttggaacaattactgctgatttggaagcggcagctcagatgttttctcgtaccctgaagatgatagtgttgaagatccgctattagctcagcacttatcacattttggtatcgatttttcttcactccaaaagactgagatgactactgctgagagggaacttgatgctaacacaaattatgactggaatagaatacaagaaagtggaaaagacgctgagcttctgtttggacccggctatactggtcttgcgaatcttgggaatagttgctatatggcttcaataatgcaagtcatgttttcaatccatcctttcatatcaaggtacttcgagaaacagagtttgaaagctgcatttgcaactgcacccgctgatccaacagtagacctaaacatgcaactgacaaaactagcgcatggtttgctctctggtaaatattctgctccagcaaaggaggggcaagaagggatacgttctcgcatgtttaagtcagttatcactgcgaaccatcctgaattttcaagcatgagacaacaggatgtccttgaattcttccttcaccttattgacagagttgagaaggcaaaccctggagaccgtgagctaaatcctttttccggtttcaagtttgttgttgaagagagggttcagtgcccttctgggaaggtttcttacaacaaacgatctgacaacgttctttctttgagcataccactgcatgaggcaactaataaagagcagctagaagcttttaatgagaagaaagctgcaatgaacttggatggaaaagaagtgtctaatgaggatattgtcaggcctagagtcccattggaggcatgcttgtcaagtttttcagggccagaggagattccagatttttatagcactgcattaaattcaaagactaccgtcactaactggtttcactacctttcctgattaccttgtgctgcacatgcgtaagtttgtaatggaaacaggatgggtgccaaagaaactcgatgtttatatagatgtgccagatacaattgatatcacacatatgcgcagcaaaggattacagcctggggaagagctgctacctgaaggaggttctggtgacgacagtgccgagcctgctaatcctgttgccagtgaggatattgtaacccagcttgcaagcatgggcttcaactaccttcattgtcagaaagctgctattaacacatcaaacacaggagttgaggaagcgatgaattggctcctctcgcacatggatgatccagatataaacgacccaatatcaaaagattcacgtgcttatgagccatctgttgacgaagcaagtgttcaaactctcatctcctttggattccaggaagacattgccataaaggccctgaaagcttctggtggtaatatcgagaaagctacagactggattttcagccaccccgaagcatctacctcagcatctgctgattcttccactagcaatgtaaatgctgatgacacatatattccagatggaagtggcagatacaagctgatggcgttcgtgagccatatgggcacctctacccactgcgggcactacgtagctcatgtcctcaaagacgggaggtggacaatctttaacgacagcaaggtcgcagtatctgttgacctgcccaaggaaatgggctacctctatttctttcagaggattagcaactaggcacgtcacacacaatggaaagaatggtgggctgttaggatactgtcttgctgattttaaagcgaacgtttactcacatcctgccatgctggttactgaatggtcaaccgggatatttgcttttttgttccttgagacctcgattggcatcttccggttacataagaacaaaatcgcaatgaaagaaagtagacaataagaca

SEQ ID NO: 72040 - DNA, 3895 bp, Zea Mays
atgagagatgcctgcccttatttacttcaaagctgtaattgcagcaaacatggttattcaattcgtacgttcactgggcactcagcatctgttatgtcactcgatttccacccgaacaaggatgacctcatttgttcttgcgatggggacaacgagatacggttctggagcatcaagcatggaaatgctgtccgaattttcaagggaggttcgacccagctgagattccaaccacgttatggaggactccttgcaacggcttcagacaatgtagtctctatcctggatgtggagaggcaagcttgcgtgaggagatttgagagccacactaagggcgtcgattccgtgtgctgggatcccaccggcgagtacgtggtgtctgtcagtgaagacacggtgaaggtgtggtctttgaacgacgagagcttcgtgaacgagcttagctgcggcgggagaaagttcagttcgtgcactttccatcctacgtacccatccttgcttatcattggctgttaccagtctctggagctgtgggacatgtccgagaaccggagcatgactgttgcagcgcacgacagcctcgtctcggccctggcatcgtcgagctccggcctggttgcttcgagtggccatgacaagtatgtcaagctgtggagatgagcttcgactttcctgccctggcatgttaagtacggttgtggacgcgccccaacccttttggcaccattagctatctgcttgcattgcagtagcgctcaggagttaggatggtgactcgaccgcctgactgaacatgtgtccgctgaagtagcgtgcagtaaaaccctgaagaagtgggtttagcgcctagcttttgtataggaaattagaacacgggttatgttaagtatccaatgtctgtcactaccttgacatctgacatggcttgaaagcttttgctgctgcaactcggcttccgaaagggatcacatttctgtgctcgtgggtggcgtgtgtggtgtggtgttgcgtacaagacaagatgcaaggctagaaagataacggcagtcccaacttagaagaaaggaacccttgtagcccgtgatgcctagctaacgcaacgagattcccgtgttcaattctaattcgcacgtaggagtagcagatctgcggatctgccgttccgattcctctacgaggaagaacagctatgcctccggtcattcaagatctgtggccttgtttgctatgcctgcgtcgaatcatcttcttcgtctgcagacttgttcgagacgccaccctcccccgccgcgcgccgccgcccgcggacatggatctccttcgctctcatctccacaaggtccggatccccgagccaaccaaccgcatccacaaggacgagtgctgcgtctccttcgacactccgaggtcagagggaggcctgtacgtggacatggtctcgttcctggggttcgggagggagtacgtggagtggaacttcgagaagacggggaaccccgtgtacctccacatcgttcagcgccggaagccggagcccgacgaggcggatcgcccgcttaagaagcccaccctcctcgctataggtgtggaaggaggttttggtgatcaagaaccagaatatgatgaaacttttgaaatagtcatcttacctgattttatttgtcttccatttccgtcagttgatttgccagagaaggttaggcttgcggttgataaagttttacttgctgaaagtgctgatagaaaagaacaactggctgcttgggttgctgacaaaaagaacattagtgcatatgctatggacctgcagcagctagacaatggtgttattgtgcctcctactggatggaagtgtagcaaatgcgataaaactgagaacctctggctgaatttaactgatggtatgatcctttgtgggaggaagctctgggatggaagtggtgggaataatcatgccattgaacattatgaacagactaaataccctcttgcggtgaagcttggaacaattactgctgatttggaagcggcagatgttttctcgtaccctgaagatgatagtgttgaagatccgctattagctcagcacttatcacattttggtatcgatttttcttcactccaaaagactgagatgactactgctgagagggaacttgatgctaacacaaattatgactggaatagaatacaagaaagtggaaaagacgctgagcttctgtttggacccggctatactggtcttgcgaatcttgggaatagttgctatatggcttcaataatgcaagtcatgttttcaatccatcctttcatatcaaggtacttcgagaaacagagtttgaaagctgcatttgcaactgcacccgctgatccaacagtagacctaaacatgcaactgacaaaactagcgcatggtttgctctctggtaaatattctgctccagcaaaggaggggcaagaagggatacgttctcgcatgtttaagtcagttatcactgcgaaccatcctgaattttcaagcatgagacaacaggatgtccttgaattcttccttcaccttattgacagagttgagaaggcaaaccctggagaccgtgagctaaatcctttttccggtttcaagtttgttgttgaagagagggttcagtgcccttctgggaaggtttcttacaacaaacgatctgacaacgttctttctttgagcataccactgcatgaggcaactaataaagctagaagcttttaatgagaagaaagctgcaatgaacttggatggaaaagaagtgtctaatgaggatattgtcaggcctagagtcccattggaggcatgcttgtcaagtttttcagggccagaggagattccagatttttatagcactgcattaaattcaaagactaccgtcactaagacagctggtttcactacctttcctgattaccttgtgctgcacatgcgtaagtttgtaatggaaacaggatgggtgccaaagaaactcgatgtttatatagatgtgccagatacaattgatatcacacatatgcgcagcaaaggattacagcctggggaagagctgctacctgaaggaggttctggtgacgacagtgccgagcctgctaatcctgttgccagtgaggatattgtaacccagcttgcaagcatgggcttcaactaccttcattgtcagaaagctgctattaacacatcaaacacaggagttgaggaagcgatgaattggctcctctcgcacatggatgatccagatataaacgacccaatatcaaaagattcacgtgcttatgagccatctgttgacgaagcaagtgttcaaactctcatctcctttggattccaggaagacattgccataaaggccctgaaagcttctggtggtaatatcgagaaagctacagactggattttcagccaccccgaagcatctacctcagcatctgctgattcttccactagcaatgtaaatgctgatgacacatatattccagatggaagtggcagatacaagctgatggcgttcgtgagccatatgggcacctctacccactgcgggcactacgtagctcatgtcctcaaagacgggaggtggacaatctttaacgacagcaaggtcgcagtatctgttgacctgcccaaggaaatgggctacctctatttctttcagaggattagcaactaggcacgtcacacacaatggaaagaatggtgggctgttaggatactgtcttgctgattttaaagcgaacgtttactcacatcctgccatgctggttactgaatggtcaaccgggatatttgcttttttgttccttgagacctcgattggcatcttccggttacataagaacaaaatcgcaatgaaagaaagtagacaataagaca

SEQ ID NO: 72041 - DNA, 1931 bp, Zea Mays
catataactccagggctgtttgctgttttccctcctgagaagtgaccaattgattaaccaccttgaacttggcgataaaattctggttgaaacaaatgttaactttgattctataagagcatggcagcttgtaacatggatgacagaaatctggaaaatctatgactgagatgactactgctgagagggaacttgatgctaacacaaattatgactggaatagaatacaagaaagtggaaaagacgctgagcttctgtttggacccggctatactggtcttgcgaatcttgggaatagttgctatatggcttcaataatgcaagtcatgttttcaatccatcctttcatatcaaggtacttcgagaaacagagtttgaaagctgcatttgcaactgcacccgctgatccaacagtagacctaaacatgcaactgacaaaactagcgcatggtttgctctctggtaaatattctgctccagcaaaggaggggcaagaagggatacgttctcgcatgtttaagtcagttatcactgcgaaccatcctgaattttcaagcatgagacaacaggatgtccttgaattcttccttcaccttattgacagagttgagaaggcaaaccctggagaccgtgagctaaatcctttttccggtttcaagtttgttgttgaagagagggttcagtgcccttctgggaaggtttcttacaacaaacgatctgacaacgttctttctttgagcataccactgcatgaggcaactaataaagagcagctagaagcttttaatgagaagaaagctgcaatgaacttggatggaaaagaagtgtctaatgaggatattgtcaggcctagagtcccattggaggcatgcttgtcaagtttttcagggccagaggagattccagatttttatagcactgcattaaattcaaagactaccgtcactaactggtttcactacctttcctgattaccttgtgctgcacatgcgtaagtttgtaatggaaacaggatgggtgccaaagaaactcgatgtttatatagatgtgccagatacaattgatatcacacatatgcgcagcaaaggattacagcctggggaagagctgctacctgaaggaggttctggtgacgacagtgccgagcctgctaatcctgttgccagtgaggatattgtaacccagcttgcaagcatgggcttcaactaccttcattgtcagaaagctgctattaacacatcaaacacaggagttgaggaagcgatgaattggctcctctcgcacatggatgatccagatataaacgacccaatatcaaaagattcacgtgcttatgagccatctgttgacgaagcaagtgttcaaactctcatctcctttggattccaggaagacattgccataaaggccctgaaagcttctggtggtaatatcgagaaagctacagactggattttcagccaccccgaagcatctacctcagcatctgctgattcttccactagcaatgtaaatgctgatgacacatatattccagatggaagtggcagatacaagctgatggcgttcgtgagccatatgggcacctctacccactgcgggcactacgtagctcatgtcctcaaagacgggaggtggacaatctttaacgacagcaaggtcgcagtatctgttgacctgcccaaggaaatgggctacctctatttctttcagaggattagcaactaggcacgtcacacacaatggaaagaatggtgggctgttaggatactgtcttgctgattttaaagcgaacgtttactcacatcctgccatgctggttactgaatggtcaaccgggatatttgcttttttgttccttgagacctcgattggcatcttccggttacataagaacaaaatcgcaatgaaagaaagtagacaataagaca

SEQ ID NO: 72042 - DNA, 1929 bp, Zea Mays
ctccagggctgtttgctgttttccctcctgagaagtgaccaattgattaaccaccttgaacttggcgataaaattctggttgaaacaaatgttaactttgattctataagagcatggcagcttgtaacatggatgacagaaatctggaaaatctatgactgagatgactactgctgagagggaacttgatgctaacacaaattatgactggaatagaatacaagaaagtggaaaagacgctgagcttctgtttggacccggctatactggtcttgcgaatcttgggaatagttgctatatggcttcaataatgcaagtcatgttttcaatccatcctttcatatcaaggtacttcgagaaacagagtttgaaagctgcatttgcaactgcacccgctgatccaacagtagacctaaacatgcaactgacaaaactagcgcatggtttgctctctggtaaatattctgctccagcaaaggaggggcaagaagggatacgttctcgcatgtttaagtcagttatcactgcgaaccatcctgaattttcaagcatgagacaacaggatgtccttgaattcttccttcaccttattgacagagttgagaaggcaaaccctggagaccgtgagctaaatcctttttccggtttcaagtttgttgttgaagagagggttcagtgcccttctgggaaggtttcttacaacaaacgatctgacaacgttctttctttgagcataccactgcatgaggcaactaataaagagcagctagaagcttttaatgagaagaaagctgcaatgaacttggatggaaaagaagtgtctaatgaggatattgtcaggcctagagtcccattggaggcatgcttgtcaagtttttcagggccagaggagattccagatttttatagcactgcattaaattcaaagactaccgtcactaagacagctggtttcactacctttcctgattaccttgtgctgcacatgcgtaagtttgtaatggaaacaggatgggtgccaaagaaactcgatgtttatatagatgtgccagatacaattgatatcacacatatgcgcagcaaaggattacagcctggggaagagctgctacctgaaggaggttctggtgacgacagtgccgagcctgctaatcctgttgccagtgaggatattgtaacccagcttgcaagcatgggcttcaactaccttcattgtcagaaagctgctattaacacatcaaacacaggagttgaggaagcgatgaattggctcctctcgcacatggatgatccagatataaacgacccaatatcaaaagattcacgtgcttatgagccatctgttgacgaagcaagtgttcaaactctcatctcctttggattccaggaagacattgccataaaggccctgaaagcttctggtggtaatatcgagaaagctacagactggattttcagccaccccgaagcatctacctcagcatctgctgattcttccactagcaatgtaaatgctgatgacacatatattccagatggaagtggcagatacaagctgatggcgttcgtgagccatatgggcacctctacccactgcgggcactacgtagctcatgtcctcaaagacgggaggtggacaatctttaacgacagcaaggtcgcagtatctgttgacctgcccaaggaaatgggctacctctatttctttcagaggattagcaactaggcacgtcacacacaatggaaagaatggtgggctgttaggatactgtcttgctgattttaaagcgaacgtttactcacatcctgccatgctggttactgaatggtcaaccgggatatttgcttttttgttccttgagacctcgattggcatcttccggttacataagaacaaaatcgcaatgaaagaaagtagacaataagaca

SEQ ID NO: 72043 - DNA, 1819 bp, Zea Mays
taaaattctggttgaaacaaatgttaactttgattctataagagcatggcagcttgtaacatggatgacagaaatctggaaaatctatgactgagatgactactgctgagagggaacttgatgctaacacaaattatgactggaatagaatacaagaaagtggaaaagacgctgagcttctgtttggacccggctatactggtcttgcgaatcttgggaatagttgctatatggcttcaataatgcaagtcatgttttcaatccatcctttcatatcaaggtacttcgagaaacagagtttgaaagctgcatttgcaactgcacccgctgatccaacagtagacctaaacatgcaactgacaaaactagcgcatggtttgctctctggtaaatattctgctccagcaaaggaggggcaagaagggatacgttctcgcatgtttaagtcagttatcactgcgaaccatcctgaattttcaagcatgagacaacaggatgtccttgaattcttccttcaccttattgacagagttgagaaggcaaaccctggagaccgtgagctaaatcctttttccggtttcaagtttgttgttgaagagagggttcagtgcccttctgggaaggtttcttacaacaaacgatctgacaacgttctttctttgagcataccactgcatgaggcaactaataaagagcagctagaagcttttaatgagaagaaagctgcaatgaacttggatggaaaagaagtgtctaatgaggatattgtcaggcctagagtcccattggaggcatgcttgtcaagtttttcagggccagaggagattccagatttttatagcactgcattaaattcaaagactaccgtcactaagacagctggtttcactacctttcctgattaccttgtgctgcacatgcatgtttatatagatgtgccagatacaattgatatcacacatatgcgcagcaaaggattacagcctggggaagagctgctacctgaaggaggttctggtgacgacagtgccgagcctgctaatcctgttgccagtgaggatattgtaacccagcttgcaagcatgggcttcaactaccttcattgtcagaaagctgctattaacacatcaaacacaggagttgaggaagcgatgaattggctcctctcgcacatggatgatccagatataaacgacccaatatcaaaagattcacgtgcttatgagccatctgttgacgaagcaagtgttcaaactctcatctcctttggattccaggaagacattgccataaaggccctgaaagcttctggtggtaatatcgagaaagctacagactggattttcagccaccccgaagcatctacctcagcatctgctgattcttccactagcaatgtaaatgctgatgacacatatattccagatggaagtggcagatacaagctgatggcgttcgtgagccatatgggcacctctacccactgcgggcactacgtagctcatgtcctcaaagacgggaggtggacaatctttaacgacagcaaggtcgcagtatctgttgacctgcccaaggaaatgggctacctctatttctttcagaggattagcaactaggcacgtcacacacaatggaaagaatggtgggctgttaggatactgtcttgctgattttaaagcgaacgtttactcacatcctgccatgctggttactgaatggtcaaccgggatatttgcttttttgttccttgagacctcgattggcatcttccggttacataagaacaaaatcgcaatgaaagaaagtagacaataagaca

SEQ ID NO: 72044 - DNA, 927 bp, Zea Mays
catgacatttttcaggctgctctgagcaaatgtttatatagatgtgccagatacaattgatatcacacatatgcgcagcaaaggattacagcctggggaagagctgctacctgaaggaggttctggtgacgacagtgccgagcctgctaatcctgttgccagtgaggatattgtaacccagcttgcaagcatgggcttcaactaccttcattgtcagaaagctgctattaacacatcaaacacaggagttgaggaagcgatgaattggctcctctcgcacatggatgatccagatataaacgacccaatatcaaaagattcacgtgcttatgagccatctgttgacgaagcaagtgttcaaactctcatctcctttggattccaggaagacattgccataaaggccctgaaagcttctggtggtaatatcgagaaagctacagactggattttcagccaccccgaagcatctacctcagcatctgctgattcttccactagcaatgtaaatgctgatgacacatatattccagatggaagtggcagatacaagctgatggcgttcgtgagccatatgggcacctctacccactgcgggcactacgtagctcatgtcctcaaagacgggaggtggacaatctttaacgacagcaaggtcgcagtatctgttgacctgcccaaggaaatgggctacctctatttctttcagaggattagcaactaggcacgtcacacacaatggaaagaatggtgggctgttaggatactgtcttgctgattttaaagcgaacgtttactcacatcctgccatgctggttactgaatggtcaaccgggatatttgcttttttgttccttgagacctcgattggcatcttccggttacataagaacaaaatcgcaatgaaagaaagtagacaataagaca

SEQ ID NO: 72045 - DNA, 2219 bp, Zea Mays
ggaaaaatttagggtaaccgttgcagatagtctcacctcgccgccttagaacaccctggccgcgatggcgtcagcggcggcggaagctccgggcgcatcggcctcttccgcggagaacaggctcctgcagtccctcgcagagcgggggtggcgcttccgtgaccccaccgacgaggccatccaagccctgctcctcgcctcccccactccgtcgccggaggccgtggagtccgagctcgtcagcatggacctgaggatgtttggcggaaagtgccttcccgatcgggccgccgccggcggcacgtcgaagcggctttcgtacctccacggccccgtcgtcttgcagatagtctctttaagagatatatatcacagcagcattgatgcgtcctttaagaacccgcagcagcgtcgccttctgcgctttggtctcactgatgggatatgtgaagcagtagccatagagttttctcccatcccattcatcaccgaagagatagctccaggtaccaagattcgcctcgagaatagggttccaatcaataatggcatattgtgcttaagcgcgaaaaatgtgactgttattgggggggctgtccaatcattgtatgaagaatggcagatgaaccagaaatactctggcttatcccgtccatcattgaggttgtctccaagtgatgatggagttgggcctccaccatttgagaagttagacattgaagcacgcccctgcagggaaaccaaagttcaagcatatcctggtaatggttaataccctcgttttcactcctgcactcatgctgttcactaaatagatgtggaagttatgagttgcttgccttaagtaaaatacagaaacacaacaacacagcctttttatctccactcccaagcaagttggagtaggctagagatgcaacccaacatgaggcacccgcaaaaacgaaaaacctgtgtaaaaaacatcattaagtaaaatatagcaccagaagtcaatgaaaatttgcatttggttcaggcagtgaaatctgcatgaatggtacttcaggattattcctcatgaaaaggtgctataatgtatagtgctatacttgtcgctagaaatatattgattttgttgaaatttaataggaagtcactgtcaagtcgtgtaaatcttaacaagcaccattaatcggataacagacagactggttccttgtcattgttacgagctattattgcatatatgcttgcaaaacttttagatgtcctcatgacatgtgatctgtcttccttgcataaagctaggaagttggcagttactcatgaccatggaccagttaattctggtggcaagccaatgaatgagggttcaaacgatgagaacagagacaatattgagagtaaggttgaatctaagcaaattactcaagacagcaggccaaaagaggtcagcgaagctgttccagtccagaaccaagctgccgcgcagaagctactgcagaaaatgtcgcaggccgtgcctgaggacaggcgcggtcgcggtcatagattcaagggcaaaggcaaggaagaagatgctcaggtttttaccctcgatgaatgggagaagaggaaagccatcagttcgaagcccgctgcggaaagctacgtgcatgacactagccgagacgaggagctggcgaggcaactgcaggaacaactagacctagaagacttgcatggtggggcaggtgcaggcgttctccatggcggggccgagagctcggatgctgaacggttacggatgagcatgttcagcttcagtggccctgacgaagcaggtggtggtaggagagattttcgaggccgcggcaggggaaggggcggagggcgacgcaggggcagaggaagattttaggcccggccacacagttgtaggtttattggtttgttgcgtgttcagtgtagtccaccggttgtatgggtaaaagtggcgcgatgatatccttctcaaatcctgtttctgaatttctctagcctcatggcgagagcagatgctagtcagattaaggaacagtttgtagacttcctggagtttttgaactgttcttagatgcaggagcacatcgtacattgtttttggaagaacgagttaaaagtctgaaatttacatgacttgtatcttctgtttacgtgtgctgttcagccgtttgaaatatggtgctgtactgtatataatgctgtgttgcttctta

SEQ ID NO: 72046 - DNA, 1686 bp, Zea Mays
ggaaaaatttagggtaaccgttgcagatagtctcacctcgccgccttagaacaccctggccgcgatggcgtcagcggcggcggaagctccgggcgcatcggcctcttccgcggagaacaggctcctgcagtccctcgcagagcgggggtggcgcttccgtgaccccaccgacgaggccatccaagccctgctcctcgcctcccccactccgtcgccggaggccgtggagtccgagctcgtcagcatggacctgaggatgtttggcggaaagtgccttcccgatcgggccgccgccggcggcacgtcgaagcggctttcgtacctccacggccccgtcgtcttgcagatagtctctttaagagatatatatcacagcagcattgatgcgtcctttaagaacccgcagcagcgtcgccttctgcgctttggtctcactgatgggatatgtgaagcagtagccatagagttttctcccatcccattcatcaccgaagagatagctccagattcgcctcgagaatagggttccaatcaataatggcatattgtgcttaagcgcgaaaaatgtgactgttattgggggggctgtccaatcattgtatgaagaatggcagatgaaccagaaatactctggcttatcccgtccatcattgaggttgtctccaagtgatgatggagttgggcctccaccatttgagaagttagacattgaagcacgcccctgcagggaaaccaaagttcaagcatatcctgctaggaagttggcagttactcatgaccatggaccagttaattctggtggcaagccaatgaatgagggttcaaacgatgagaacagagacaatattgagagtaaggttgaatctaagcaaattactcaagacagcaggccaaaagaggtcagcgaagctgttccagtccagaaccaagctgccgcgcagaagctactgcagaaaatgtcgcaggccgtgcctgaggacaggcgcggtcgcggtcatagattcaagggcaaaggcaaggaagaagatgctcaggtttttaccctcgatgaatgggagaagaggaaagccatcagttcgaagcccgctgcggaaagctacgtgcatgacactagccgagacgaggagctggcgaggcaactgcaggaacaactagacctagaagacttgcatggtggggcaggtgcaggcgttctccatggcggggccgagagctcggatgctgaacggttacggatgagcatgttcagcttcagtggccctgacgaagcaggtggtggtaggagagattttcgaggccgcggcaggggaaggggcggagggcgacgcaggggcagaggaagattttaggcccggccacacagttgtaggtttattggtttgttgcgtgttcagtgtagtccaccggttgtatgggtaaaagtggcgcgatgatatccttctcaaatcctgtttctgaatttctctagcctcatggcgagagcagatgctagtcagattaaggaacagtttgtagacttcctggagtttttgaactgttcttagatgcaggagcacatcgtacattgtttttggaagaacgagttaaaagtctgaaatttacatgacttgtatcttctgtttacgtgtgctgttcagccgtttgaaatatggtgctgtactgtatataatgctgtgttgcttctta

SEQ ID NO: 72047 - DNA, 1682 bp, Zea Mays
ggaaaaatttagggtaaccgttgcagatagtctcacctcgccgccttagaacaccctggccgcgatggcgtcagcggcggcggaagctccgggcgcatcggcctcttccgcggagaacaggctcctgcagtccctcgcagagcgggggtggcgcttccgtgaccccaccgacgaggccatccaagccctgctcctcgcctcccccactccgtcgccggaggccgtggagtccgagctcgtcagcatggacctgaggatgtttggcggaaagtgccttcccgatcgggccgccgccggcggcacgtcgaagcggctttcgtacctccacggccccgtcgtcttgcagatagtctctttaagagatatatatcacagcagcattgatgcgtcctttaagaacccgcagcagcgtcgccttctgcgctttggtctcactgatgggatatgtgaagcagtagccatagagttttctcccatcccattcatcaccgaagagatagctccagattcgcctcgagaatagggttccaatcaataatggcatattgtgcttaagcgcgaaaaatgtgactgttattgggggggctgtccaatcattgtatgaagaatggcagatgaaccagaaatactctggcttatcccgtccatcattgaggttgtctccaagtgatgatggagttgggcctccaccatttgagaagttagacattgaagcacgcccctgcagggaaaccaaagttcaagcatatcctggaagttggcagttactcatgaccatggaccagttaattctggtggcaagccaatgaatgagggttcaaacgatgagaacagagacaatattgagagtaaggttgaatctaagcaaattactcaagacagcaggccaaaagaggtcagcgaagctgttccagtccagaaccaagctgccgcgcagaagctactgcagaaaatgtcgcaggccgtgcctgaggacaggcgcggtcgcggtcatagattcaagggcaaaggcaaggaagaagatgctcaggtttttaccctcgatgaatgggagaagaggaaagccatcagttcgaagcccgctgcggaaagctacgtgcatgacactagccgagacgaggagctggcgaggcaactgcaggaacaactagacctagaagacttgcatggtggggcaggtgcaggcgttctccatggcggggccgagagctcggatgctgaacggttacggatgagcatgttcagcttcagtggccctgacgaagcaggtggtggtaggagagattttcgaggccgcggcaggggaaggggcggagggcgacgcaggggcagaggaagattttaggcccggccacacagttgtaggtttattggtttgttgcgtgttcagtgtagtccaccggttgtatgggtaaaagtggcgcgatgatatccttctcaaatcctgtttctgaatttctctagcctcatggcgagagcagatgctagtcagattaaggaacagtttgtagacttcctggagtttttgaactgttcttagatgcaggagcacatcgtacattgtttttggaagaacgagttaaaagtctgaaatttacatgacttgtatcttctgtttacgtgtgctgttcagccgtttgaaatatggtgctgtactgtatataatgctgtgttgcttctta

SEQ ID NO: 72048 - DNA, 1690 bp, Zea Mays
ggaaaaatttagggtaaccgttgcagatagtctcacctcgccgccttagaacaccctggccgcgatggcgtcagcggcggcggaagctccgggcgcatcggcctcttccgcggagaacaggctcctgcagtccctcgcagagcgggggtggcgcttccgtgaccccaccgacgaggccatccaagccctgctcctcgcctcccccactccgtcgccggaggccgtggagtccgagctcgtcagcatggacctgaggatgtttggcggaaagtgccttcccgatcgggccgccgccggcggcacgtcgaagcggctttcgtacctccacggccccgtcgtcttgcagatagtctctttaagagatatatatcacagcagcattgatgcgtcctttaagaacccgcagcagcgtcgccttctgcgctttggtctcactgatgggatatgtgaagcagtagccatagagttttctcccatcccattcatcaccgaagagatagctccaggtaccaagattcgcctcgagaatagggttccaatcaataatggcatattgtgcttaagcgcgaaaaatgtgactgttattgggggggctgtccaatcattgtatgaagaatggcagatgaaccagaaatactctggcttatcccgtccatcattgaggttgtctccaagtgatgatggagttgggcctccaccatttgagaagttagacattgaagcacgcccctgcagggaaaccaaagttcaagcatatcctggaagttggcagttactcatgaccatggaccagttaattctggtggcaagccaatgaatgagggttcaaacgatgagaacagagacaatattgagagtaaggttgaatctaagcaaattactcaagacagcaggccaaaagaggtcagcgaagctgttccagtccagaaccaagctgccgcgcagaagctactgcagaaaatgtcgcaggccgtgcctgaggacaggcgcggtcgcggtcatagattcaagggcaaaggcaaggaagaagatgctcaggtttttaccctcgatgaatgggagaagaggaaagccatcagttcgaagcccgctgcggaaagctacgtgcatgacactagccgagacgaggagctggcgaggcaactgcaggaacaactagacctagaagacttgcatggtggggcaggtgcaggcgttctccatggcggggccgagagctcggatgctgaacggttacggatgagcatgttcagcttcagtggccctgacgaagcaggtggtggtaggagagattttcgaggccgcggcaggggaaggggcggagggcgacgcaggggcagaggaagattttaggcccggccacacagttgtaggtttattggtttgttgcgtgttcagtgtagtccaccggttgtatgggtaaaagtggcgcgatgatatccttctcaaatcctgtttctgaatttctctagcctcatggcgagagcagatgctagtcagattaaggaacagtttgtagacttcctggagtttttgaactgttcttagatgcaggagcacatcgtacattgtttttggaagaacgagttaaaagtctgaaatttacatgacttgtatcttctgtttacgtgtgctgttcagccgtttgaaatatggtgctgtactgtatataatgctgtgttgcttctta

SEQ ID NO: 72049 - DNA, 1418 bp, Zea Mays
taacacagctcagctcccccaaactccctgaatcgagggggtctgggagttattcagcaggtaacacacacacactgacaaacaatcaccaccaaccaatgcatccacgctcccccaccccccatccaatccaataccaatcctgccttcctcgaatccagcacaggcaggcagagctgctcagctcagcagctggtgtcgagcatgccgtcgtggaaggcggcgacgcggtccggggtgacgcactgcgtgatgagcctcgccccgggcttgtgcgcccacggcttcaccaggatgcacgtggcgatgtagtccaggttggtgagcggcacgacgtgcgcgggcgggccccagccgtagtccacctccgcgaagccgaggcgcgtccagtcggacaccagcagcgtgcggtagtcggccgtgatctggtacgggtcgacgccggcggcgccggcctcgcccgtcgcccaccgcgcgaactccgcgggcatccgccgcttgccgtccttgacgatcctcaccacctccgccaccgaggagcccgccaccttccccgcgggcgccgacacgcgcatgatgtagtagcagttgccgtagaacccggcgcctccgcgcgggagcgagccgtgcagcgcgggccgcgcgttcacggcgaagcagacgtggacgagggtgtccggctcgaaccccgccgcgcgggtgcggctccgccacgccttggcgatgagcacctcgaacgcggagcaccacccggcgcccgccgcgtgcgccgcgctgtactccgccttgtagtgcccgatgtagtcggcggagatgtccatggcgaggtacgccagccgcctggtgccggcgtcgggggtcgggagccgccccaccagcgccgccgccgggtccgggatcgcgtcgcggccccactgcggctccaccgacaccgcgccggcgccggcgcctccggcgctggcgcgggccagctccccgaccgcggtcatgaactgcgcggcgcccgggccgtcggcgacggcgtggctgaagcggaagcccacgacgaagccgccgcacgcgaaggcggtgacctggacgagcaggaccagcgcgcgctcgtcctcggcggccggggtgggcgggaggaggtcgtccttgggcaccatcagcggggcctccaggtagtccacgtcctcgagcgtgcacgcggcctgggcctccgtgaaccacacgccggcgttgctgcagtccacggcctgctgcgcgccggactccgacaggaccaggcggcccgccagagggtagtagtggaccaatgcgcgggcgagggcccgctcgatggacttgggcgccgccgccatggatgggtgggtcggtcacggggtggagatggagttgggggaggtgttgaaaagtggtgggtgatgggtcggggg

SEQ ID NO: 72050 - DNA, 676 bp, Zea Mays
ggaacatcggctgaaatgttgacagtgattatggcaattttctggctgcttagctatttgggtagctcataagcaggcagtgacaccggcactttaacagtacttactgcattagggttagaatcgacgagaacatggaggaaaccgtggctaacgtggagggagcgcagggccagctcctgaagtacctcaacagcatttcgtccaacaggtggctgatgatgaagatattctttgtgctgatggtgttcctcatgatcttcatattcttcgtcgcttgaccttctgtaatcattctgcccgagacgctctggctgctaaacgcatagcattcttttatttttaactcatactacaccgtgtacacaattttcacccctggatgatgagcagagtcgttcacccttttgtggtcatgtaaatcgggaggagttccagtacttaagtttactcttgattgatcgctcgctagcgctatacgggagtgtgcccagctacttccggcacatgctactctgactgttcctggtggctggtatctgctgtctctcttttcatacgctaacttcaggtaggctatctgtcatgtgtctactagctaattttgaggtaggaggatctcccagatatctgtcctgtctacgacaaacatagatggatcctggcatcatggacg

SEQ ID NO: 72051 - DNA, 783 bp, Zea Mays
ccttattagccccgaattagctcatgttgaatttattttcgtaaagtgggctaatttttagctctgtttgggatccaatcaagccctaagttcggaattggtgggagcatatatcttcctggatcttatccccaaacagctccattatcagtccacactgtccctattgtattgcagcgatgtgccctactggctatcttttattaactgacgtgttacctatgacagaatcgacgagaacatggaggaaaccgtggctaacgtggagggagcgcagggccagctcctgaagtacctcaacagcatttcgtccaacaggtggctgatgatgaagatattctttgtgctgatggtgttcctcatgatcttcatattcttcgtcgcttgaccttctgtaatcattctgcccgagacgctctggctgctaaacgcatagcattcttttatttttaactcatactacaccgtgtacacaattttcacccctggatgatgagcagagtcgttcacccttttgtggtcatgtaaatcgggaggagttccagtacttaagtttactcttgattgatcgctcgctagcgctatacgggagtgtgcccagctacttccggcacatgctactctgactgttcctggtggctggtatctgctgtctctcttttcatacgctaacttcaggtaggctatctgtcatgtgtctactagctaattttgaggtaggaggatctcccagatatctgtcctgtctacgacaaacatagatggatcctggcatcatggacg

SEQ ID NO: 72052 - DNA, 878 bp, Zea Mays
acgcttcccatgtcacttgggccacccagaccccagtaaaaaccctagttcccttctccatccgcaccctcgcttccttttccttctctatccgcgagcctcgtaccggcgcagccatggcggaggagcccgccgttgtcgtggcctcctccagctacgaggttgacctcgggaacctcatggcgtacgatccgtcgcatcacgtcgccaccgcctccagggaggagctgagacaggagtgcctgcggaagggtacagagctggcgcaggcggtggccgacgtcctcttcgcgctgccgcccaacgaggaccgcgacggccccattatccacctcccgccgcccaccttcagactcccgcgggagaagcatctacccaagcccaagccaccgaccaagtgggagctgtttgcaaaggcgaaaggaattaccaagcgcaaaaagaacaagcgtgagtgggatgagcaaactcaatcctggaagcggactcatggctatgaccgtgttaatgatgacaaagacattccaatcattgaagccaaattgactgacgagcctggtgttgatccatttgcgcaaagaagggatgagaagaagaagagggttgaaaagcaagaaaaaaacagactggataacttaaagaaagctgcaaaggttggcgctttgccaagtcatatacagcttgctgcgaaggcgttgcccatcacaggaacaaaagctgaccttccaaaaaaatctagaaaagaggatcttgagagtgttgtcggcatggcttcatcagcaacagcaagtggtgggaagtttgatgagaagttgcctggcgagaaacctccaaagcaccctggcaaacacagaaagttgccgaagggaagggaatgg

SEQ ID NO: 72053 - DNA, 1281 bp, Zea Mays
acgcttcccatgtcacttgggccacccagaccccagtaaaaaccctagttcccttctccatccgcaccctcgcttccttttccttctctatccgcgagcctcgtaccggcgcagccatggcggaggagcccgccgttgtcgtggcctcctccagctacgaggttgacctcgggaacctcatggcgtacgatccgtcgcatcacgtcgccaccgcctccagggaggagctgagacaggagtgcctgcggaagggtacagagctggcgcaggcggtggccgacgtcctcttcgcgctgccgcccaacgaggaccgcgacggccccattatccacctcccgccgcccaccttcagactcccgcgggagaagcatctacccaagcccaagccaccgaccaagtgggagctgtttgcaaaggcgaaaggaattaccaagcgcaaaaagaacaagcgtgagtgggatgagcaaactcaatcctggaagcggactcatggctatgaccgtgttaatgatgacaaagacattccaatcattgaagccaaattgactgacgagcctggtgttgatccatttgcgcaaagaagggatgagaagaagaagagggttgaaaagcaagaaaaaaacagactggataacttaaagaaagctgcaaagtcatatacagcttgctgcgaaggcgttgcccatcacaggaacaaaagctgaccttccaaaaaaatctagaaaagaggatcttgagagtgttgtcggcatggcttcatcagcaacagcaagtggtgggaagtttgatgagaagttgcctggcgagaaacctccaaagcaccctggcaaacacagaaagttcctcccagttgccgaagggaagggaatgggcagcctggagaaacagcagaatgacaaaatcctgaactctctacttgccagaaactctgatgaaccacttgatgtcggcaaggcaattacaatgtacaaggtgaaaaaggagaagcagagaaggaaagagaaaggcatgtcatcgaaatctgataagcttaagccccagaagaaaccccacaagaagtcatcgaagaaaaaggcttaggtccacatctttcaggtgaccacagttttgaaagctcaagcaaggaggcctgtcagcatattcaattgtatttttctgctttgaatctatgagagaaatattgttattccgtttactggctatgacacaaaaacctgaatgctgttataatatatgcccatcttgtaccttttcaaattatgtttgggatgtggtttgtat

SEQ ID NO: 72054 - DNA, 4919 bp, Zea Mays
ccattccccgctcttaaccggcaaacaaacaaaacggaaaacaagccacggaaaaaagaggaaaaaaagctcgagaagagcaaaccctaggttcccgtggcaccgacgaaatcctaattcgcccgcattggatcgcccaggcaaggggcttttggcacagatcggcgctcccccgtcctcggattcgattcctctgctcaatttggggccgatccgtggctcggaccttctcgccgctcggcgactctctcatcttttttccccgatccgtctgtgagacactaagcgctttgccgcggtcgcccctgctgacgccaccggcacaaggaggcttgtcgcccactctggtccgccaccgacgcttgacgcctccagggcttcaaggattgctgatgagaggatgattgaaattgtttctgttaacttgattcaactgaatccgtatgctccacgcttccgctcctgatctggggtcgggactctatgtatgatgggaggtgaaattctgcagaaatctgttctcttgacctgtgggctcgtgaatggaatccagtggcggtgataaacccactgcaacagatgctaccgaatcagtggtgggtttagatggcgaggagactttgtctgagagggaatctgttggagcaagacatggccctgccttgtctaatgggggtggaaaggaggctccttcgagcagttcatctgcagggaataagaggaagcacggcatcttgggttctaatcaaatggaactcaatgaaccagggatgccaagttccagctcaggtgattccacatggagtttagatagtctggatgaccgtcaccagatctcattgttgagaagtaagaatgaacactctgaacattcagttacttcagctggagttacagtgatcaggcagcctcgtggcgtcttgaggttaaggaagcgggatcagaatgtcagtactgagagttggactggtggtcataatattccacaagctaatggagttcctaggtcttcccaactcctgaggcggaacaagaaggggaaatcaactgtgttcgagcagaatagaattggtggtgatgaacctgtcagttgcttgagaactgagaatggtacttgtgatcaggataccggctccaagttctgttctgaaactgagttctcagctgaaaagctgtcacatctttcaggtgaagccccaaaagctgttcatgttgacaagggtgggtgtgaccatgtcaaagatgatgatggtgttagtctggaagaaaatgctgctatgatgctttgttctttatcagataacatatgtgctggatcaccaaggaagggaatgaaatcatctgatacgtcatcaaagagatgtattcctcagcattcaaatcattttaagagttcaaacaaaaaaatcaaggatgtacctagtcctgctagattgctgcggaagcgtgatggtaaagttccattcaggaagcgtcgtccgcgtcggcatttttatgaagttagccctagcgacgtggatccattttgcattgtaaaagagaggatcagagttttttggcctcttgatgagacttggtactttggcttggtcaaggaatataatccggacacaaggttacatcatgtcaggtatgatgataaagatgaagaatggatcaatcttcaaaatgagaggattaaactcctgttcttaccagcggaagctcgcaatagatctaaatgcaccaactcaaggtcagtgtttgacctgaagcatgaacagggtgacagagaagacatggatggaagcgaaggcaatacagaaagttctgagtcaggtcccattggctcatggttagctcgatcaaaccaagcaaaatctgctgcactttgtaacatcagcaagcaagatcacagtcattccaatattgttccaatttcatttgaccaaaagcagtgccgtggttctgatgctaaggagtctaatgattatataccatgtgattcatttggaaatgggagtgcaaaagttctcaaggatagaaccacacctgaggacaggaggtttcgctttgtttattctaggaaacggttttgcagaaaaacgaatggttttcttagcatttccgaacagcattctaattgtcagataagagcaagatttgctatggttcttgctgcatgtcctggtatggaatctagttctgcaactggtgcttcagtcacatatgtcatacctgcattgagcctcccactgaaacctgtttacaagttgctttgtgaagcctgttgtgtttcgttttccaataccttctttctccattgtggtacaatggttgctttatggcctgttgtacatctggacatactttttgataatgctttaggcttgaaacattttcttctcgacacatgcttgatatcggcagtatcacttctctgtttacttgctggaagcttcaagcagtgttctaggcagagaactaccaaggaagctagaataccttgtacttcgatcagatttcagatatctggtgggcatggtagaagcgaagtagtatttatgttattcaactttgttggtgtagagaaatcgaaatgggaacaccttcaaggaaagcttcaatatcactgttctaaatcggagttgtctaaagattccacaaaatgtactggtcgaagagccctttcttcaatggatctcttctccaagggttttgatgttcaggactttcttccagagtctaattattcagatcgcgaacctatcatttgttgtttggatgaacattgtagatttactcaaagtgttctggacatgacaactgcaccttcactactgccttggcaccataaaaaaatgttaacagaaagcaatttgactaatggttctcagcaatccatgtcatgtactttggatgaggatcagcagcagttggtaacagaacatgcatctgacacagtttttcatgctccacctcaagtttgttcacttaatctcggttcatcacctgatagtccattggatatggcttctgctagttgtgcaaatccatctagctctgctagtagggaatccaatattgctgaaaggaatgtaagcacagaatgtaatggcagcagtattggtgatgcaaatataattcacaggaagtgtgaagatcaaaatgggccttgtgctggtcctgacaagtcattttcctccaaccttagtgttatttgctcttcacagaagtctgcagagagtcgtctttccataaatattgacaaagcaaatgataaacctcttgacaacgatgaaaaagaaaagcaacctatatctaacttggttcaggaattgaatgaacatccaattggctgtgttacacctactgcccctagaactacttcccataggaaccggtttacatctatatcacgtgcttttggagatggttcaaaattactgccagaagaccacgtgttgactggctttgctggtggttctaagaaaccacgaagtcaagtttcatactcagtttctcctaaaagtgaggaacttggcataaaaaacaaaggtcatttccgcaagatacaatctcatgttagtgcaaagataaatgatgcaaagaaacttcctgatagttctagaagtgggcatagcagcccggagtcattgacttgcgttgcaaatgttcttgttacagtgggtgatagaggttggagggagtatgatacccagatcacaatggattccgatggtcagagtgaaaggaggatatgcgtgaaacttgctgaagggaccaagtatgctcacaaggtctgtcaagttttgcagcctggggccacaaaccgctatacacatgccatgatgtggaaaggtggtgctgaatggtgcctggaatttcctgacagaagccagtggttgattttcaagcaaatgcacgatgagtgctatagccataacatcagagctgcttctgtgagaaacattccaatccctggtgtccatttggttgaaatccatgatgataatgatgtggtatcctttgtgcaatctgaagcttatcttgttcacatcggaacagatgttgaaattgctcttgatcaatcccgtgtgttatatgacatggacagcgatgatgaagagtggatatcaagctggcggaaatccttagtaagagacaacaccaccacacttcagtttgcagaagatttgtttgagagggttatggacaaactagagaagtttgcatatagccacaactgtaatggactcagcattgatcagatgaaggaactggagactgatgatgtacctctgcacactattgaagtgatacatgcatattggcaagacaagaggcagaaaaggggaatgccacttattcgacattttcagtcggctatgtggaagatctacgagcagcagctgcatgaatgggaatcaaaagtatgcagaatgcagagttcgtcaaatgggtaccaagaaaagaaattgcctcccaagcctgcattgtttgccttctgtttgaggcctcgtggactccatgtaccatacaaggggccaaagcagcgttctcataagaagcttatgtccacaggctgccatagcttttcaagagagcatgatggcttttaccggcaagtatcaggcaggagatacaatgaatgcactggggatgggaggataagcgaatcgtatgacactggttctctttactccccaacagggtactctcccaggttctctacaagaacagattctcctcgggcattcgagtcctcagaacgaagctccacaccaagattttccaggaacaacagtagcaccaaaaggagcgcagcccttgctttctccgacgaccaccagccatcaccttcctgccgcccccagagagcgaaacggagcgcgcacgaccactggaacgctgctatccacgactggcagaactcgaag

SEQ ID NO: 72055 - DNA, 4498 bp, Zea Mays
aaacaaacaaaacggaaaacaagccacggaaaaaagaggaaaaaaagctcgagaagagcaaaccctaggttcccgtggcaccgacgaaatcctaattcgcccgcattggatcgcccaggcaaggggcttttggcacagatcggcgctcccccgtcctcggattcgattcctctgctcaatttggggccgatccgtggctcggaccttctcgccgctcggcgactctctcatcttttttccccgatccgtctgtgagacactaagcgctttgccgcggtcgcccctgctgacgccaccggcacaaggaggcttgtcgcccactctggtccgccaccgacgcttgacgcctccagggcttcaaggattgctgatgagaggatgattgaaattgtttctgttaacttgattcaactgaatccgtatgctccacgcttccgctcctgatctggggtcgggactctatgtatgatgggaggtgaaattctgcagaaatctgttctcttgacctgtgggctcgtgaatggaatccagtggcggtgataaacccactgcaacagatgctaccgaatcagtggtgggtttagatggcgaggagactttgtctgagagggaatctgttggagcaagacatggccctgccttgtctaatgggggtggaaaggaggctccttcgagcagttcatctgcagggaataagaggaagcacggcatcttgggttctaatcaaatggaactcaatgaaccagggatgccaagttccagctcaggtgattccacatggagtttagatagtctggatgaccgtcaccagatctcattgttgagaagtaagaatgaacactctgaacattcagttacttcagctggagttacagtgatcaggcagcctcgtggcgtcttgaggttaaggaagcgggatcagaatgtcagtactgagagttggactggtggtcataatattccacaagctaatggagttcctaggtcttcccaactcctgaggcggaacaagaaggggaaatcaactgtgttcgagcagaatagaattggtggtgatgaacctgtcagttgcttgagaactgagaatggtacttgtgatcaggataccggctccaagttctgttctgaaactgagttctcagctgaaaagctgtcacatctttcaggtgaagccccaaaagctgttcatgttgacaagggtgggtgtgaccatgtcaaagatgatgatggtgttagtctggaagaaaatgctgctatgatgctttgttctttatcagataacatatgtgctggatcaccaaggaagggaatgaaatcatctgatacgtcatcaaagagatgtattcctcagcattcaaatcattttaagagttcaaacaaaaaaatcaaggatgtacctagtcctgctagattgctgcggaagcgtgatggtaaagttccattcaggaagcgtcgtccgcgtcggcatttttatgaagttagccctagcgacgtggatccattttgcattgtaaaagagaggatcagagttttttggcctcttgatgagacttggtactttggcttggtcaaggaatataatccggacacaaggttacatcatgtcaggtatgatgataaagatgaagaatggatcaatcttcaaaatgagaggattaaactcctgttcttaccagcggaagctcgcaatagatctaaatgcaccaactcaaggtcagtgtttgacctgaagcatgaacagggtgacagagaagacatggatggaagcgaaggcaatacagaaagttctgagtcaggtcccattggctcatggttagctcgatcaaaccaagcaaaatctgctgcactttgtaacatcagcaagcaagatcacagtcattccaatattgttccaatttcatttgaccaaaagcagtgccgtggttctgatgctaaggagtctaatgattatataccatgtgattcatttggaaatgggagtgcaaaagttctcaaggatagaaccacacctgaggacaggaggtttcgctttgtttattctaggaaacggttttgcagaaaaacgaatggttttcttagcatttccgaacagcattctaattgtcagataagagcaagatttgctatggttcttgctgcatgtcctgagaaatcgaaatgggaacaccttcaaggaaagcttcaatatcactgttctaaatcggagttgtctaaagattccacaaaatgtactggtcgaagagccctttcttcaatggatctcttctccaagggttttgatgttcaggactttcttccagagtctaattattcagatcgcgaacctatcatttgttgtttggatgaacattgtagatttactcaaagtgttctggacatgacaactgcaccttcactactgccttggcaccataaaaaaatgttaacagaaagcaatttgactaatggttctcagcaatccatgtcatgtactttggatgaggatcagcagcagttggtaacagaacatgcatctgacacagtttttcatgctccacctcaagtttgttcacttaatctcggttcatcacctgatagtccattggatatggcttctgctagttgtgcaaatccatctagctctgctagtagggaatccaatattgctgaaaggaatgtaagcacagaatgtaatggcagcagtattggtgatgcaaatataattcacaggaagtgtgaagatcaaaatgggccttgtgctggtcctgacaagtcattttcctccaaccttagtgttatttgctcttcacagaagtctgcagagagtcgtctttccataaatattgacaaagcaaatgataaacctcttgacaacgatgaaaaagaaaagcaacctatatctaacttggttcaggaattgaatgaacatccaattggctgtgttacacctactgcccctagaactacttcccataggaaccggtttacatctatatcacgtgcttttggagatggttcaaaattactgccagaagaccacgtgttgactggctttgctggtggttctaagaaaccacgaagtcaagtttcatactcagtttctcctaaaagtgaggaacttggcataaaaaacaaaggtcatttccgcaagatacaatctcatgttagtgcaaagataaatgatgcaaagaaacttcctgatagttctagaagtgggcatagcagcccggagtcattgacttgcgttgcaaatgttcttgttacagtgggtgatagaggttggagggagtatgatacccagatcacaatggattccgatggtcagagtgaaaggaggatatgcgtgaaacttgctgaagggaccaagtatgctcacaaggtctgtcaagttttgcagcctggggccacaaaccgctatacacatgccatgatgtggaaaggtggtgctgaatggtgcctggaatttcctgacagaagccagtggttgattttcaagcaaatgcacgatgagtgctatagccataacatcagagctgcttctgtgagaaacattccaatccctggtgtccatttggttgaaatccatgatgataatgatgtggtatcctttgtgcaatctgaagcttatcttgttcacatcggaacagatgttgaaattgctcttgatcaatcccgtgtgttatatgacatggacagcgatgatgaagagtggatatcaagctggcggaaatccttagtaagagacaacaccaccacacttcagtttgcagaagatttgtttgagagggttatggacaaactagagaagtttgcatatagccacaactgtaatggactcagcattgatcagatgaaggaactggagactgatgatgtacctctgcacactattgaagtgatacatgcatattggcaagacaagaggcagaaaaggggaatgccacttattcgacattttcagtcggctatgtggaagatctacgagcagcagctgcatgaatgggaatcaaaagtatgcagaatgcagagttcgtcaaatgggtaccaagaaaagaaattgcctcccaagcctgcattgtttgccttctgtttgaggcctcgtggactccatgtaccatacaaggggccaaagcagcgttctcataagaagcttatgtccacaggctgccatagcttttcaagagagcatgatggcttttaccggcaagtatcaggcaggagatacaatgaatgcactggggatgggaggataagcgaatcgtatgacactggttctctttactccccaacagggtactctcccaggttctctacaagaacagattctcctcgggcattcgagtcctcagaacgaagctccacaccaagattttccaggaacaacagtagcaccaaaaggagcgcagcccttgctttctccgacgaccaccagccatcaccttcctgccgcccccagagagcgaaacggagcgcgcacgaccactggaacgctgctatccacgactggcagaactcgaag

SEQ ID NO: 72056 - DNA, 4891 bp, Zea Mays
aaacaaacaaaacggaaaacaagccacggaaaaaagaggaaaaaaagctcgagaagagcaaaccctaggttcccgtggcaccgacgaaatcctaattcgcccgcattggatcgcccaggcaaggggcttttggcacagatcggcgctcccccgtcctcggattcgattcctctgctcaatttggggccgatccgtggctcggaccttctcgccgctcggcgactctctcatcttttttccccgatccgtctgtgagacactaagcgctttgccgcggtcgcccctgctgacgccaccggcacaaggaggcttgtcgcccactctggtccgccaccgacgcttgacgcctccagggcttcaaggattgctgatgagaggatgattgaaattgtttctgttaacttgattcaactgaatccgtatgctccacgcttccgctcctgatctggggtcgggactctatgtatgatgggaggtgaaattctgcagaaatctgttctcttgacctgtgggctcgtgaatggaatccagtggcggtgataaacccactgcaacagatgctaccgaatcagtggtgggtttagatggcgaggagactttgtctgagagggaatctgttggagcaagacatggccctgccttgtctaatgggggtggaaaggaggctccttcgagcagttcatctgcagggaataagaggaagcacggcatcttgggttctaatcaaatggaactcaatgaaccagggatgccaagttccagctcaggtgattccacatggagtttagatagtctggatgaccgtcaccagatctcattgttgagaagtaagaatgaacactctgaacattcagttacttcagctggagttacagtgatcaggcagcctcgtggcgtcttgaggttaaggaagcgggatcagaatgtcagtactgagagttggactggtggtcataatattccacaagctaatggagttcctaggtcttcccaactcctgaggcggaacaagaaggggaaatcaactgtgttcgagcagaatagaattggtggtgatgaacctgtcagttgcttgagaactgagaatggtacttgtgatcaggataccggctccaagttctgttctgaaactgagttctcagctgaaaagctgtcacatctttcaggtgaagccccaaaagctgttcatgttgacaagggtgggtgtgaccatgtcaaagatgatgatggtgttagtctggaagaaaatgctgctatgatgctttgttctttatcagataacatatgtgctggatcaccaaggaagggaatgaaatcatctgatacgtcatcaaagagatgtattcctcagcattcaaatcattttaagagttcaaacaaaaaaatcaaggatgtacctagtcctgctagattgctgcggaagcgtgatggtaaagttccattcaggaagcgtcgtccgcgtcggcatttttatgaagttagccctagcgacgtggatccattttgcattgtaaaagagaggatcagagttttttggcctcttgatgagacttggtactttggcttggtcaaggaatataatccggacacaaggttacatcatgtcaggtatgatgataaagatgaagaatggatcaatcttcaaaatgagaggattaaactcctgttcttaccagcggaagctcgcaatagatctaaatgcaccaactcaaggtcagtgtttgacctgaagcatgaacagggtgacagagaagacatggatggaagcgaaggcaatacagaaagttctgagtcaggtcccattggctcatggttagctcgatcaaaccaagcaaaatctgctgcactttgtaacatcagcaagcaagatcacagtcattccaatattgttccaatttcatttgaccaaaagcagtgccgtggttctgatgctaaggagtctaatgattatataccatgtgattcatttggaaatgggagtgcaaaagttctcaaggatagaaccacacctgaggacaggaggtttcgctttgtttattctaggaaacggttttgcagaaaaacgaatggttttcttagcatttccgaacagcattctaattgtcagataagagcaagatttgctatggttcttgctgcatgtcctggtatggaatctagttctgcaactggtgcttcagtcacatatgtcatacctgcattgagcctcccactgaaacctgtttacaagttgctttgtgaagcctgttgtgtttcgttttccaataccttctttctccattgtggtacaatggttgctttatggcctgttgtacatctggacatactttttgataatgctttaggcttgaaacattttcttctcgacacatgcttgatatcggcagtatcacttctctgtttacttgctggaagcttcaagcagtgttctaggcagagaactaccaaggaagctagaataccttgtacttcgatcagatttcagatatctggtgggcatggtagaagcgaagtagtatttatgttattcaactttgttggtgtagagaaatcgaaatgggaacaccttcaaggaaagcttcaatatcactgttctaaatcggagttgtctaaagattccacaaaatgtactggtcgaagagccctttcttcaatggatctcttctccaagggttttgatgttcaggactttcttccagagtctaattattcagatcgcgaacctatcatttgttgtttggatgaacattgtagatttactcaaagtgttctggacatgacaactgcaccttcactactgccttggcaccataaaaaaatgttaacagaaagcaatttgactaatggttctcagcaatccatgtcatgtactttggatgaggatcagcagcagttggtaacagaacatgcatctgacacagtttttcatgctccacctcaagtttgttcacttaatctcggttcatcacctgatagtccattggatatggcttctgctagttgtgcaaatccatctagctctgctagtagggaatccaatattgctgaaaggaatgtaagcacagaatgtaatggcagcagtattggtgatgcaaatataattcacaggaagtgtgaagatcaaaatgggccttgtgctggtcctgacaagtcattttcctccaaccttagtgttatttgctcttcacagaagtctgcagagagtcgtctttccataaatattgacaaagcaaatgataaacctcttgacaacgatgaaaaagaaaagcaacctatatctaacttggttcaggaattgaatgaacatccaattggctgtgttacacctactgcccctagaactacttcccataggaaccggtttacatctatatcacgtgcttttggagatggttcaaaattactgccagaagaccacgtgttgactggctttgctggtggttctaagaaaccacgaagtcaagtttcatactcagtttctcctaaaagtgaggaacttggcataaaaaacaaaggtcatttccgcaagatacaatctcatgttagtgcaaagataaatgatgcaaagaaacttcctgatagttctagaagtgggcatagcagcccggagtcattgacttgcgttgcaaatgttcttgttacagtgggtgatagaggttggagggagtatgatacccagatcacaatggattccgatggtcagagtgaaaggaggatatgcgtgaaacttgctgaagggaccaagtatgctcacaaggtctgtcaagttttgcagcctggggccacaaaccgctatacacatgccatgatgtggaaaggtggtgctgaatggtgcctggaatttcctgacagaagccagtggttgattttcaagcaaatgcacgatgagtgctatagccataacatcagagctgcttctgtgagaaacattccaatccctggtgtccatttggttgaaatccatgatgataatgatgtggtatcctttgtgcaatctgaagcttatcttgttcacatcggaacagatgttgaaattgctcttgatcaatcccgtgtgttatatgacatggacagcgatgatgaagagtggatatcaagctggcggaaatccttagtaagagacaacaccaccacacttcagtttgcagaagatttgtttgagagggttatggacaaactagagaagtttgcatatagccacaactgtaatggactcagcattgatcagatgaaggaactggagactgatgatgtacctctgcacactattgaagtgatacatgcatattggcaagacaagaggcagaaaaggggaatgccacttattcgacattttcagtcggctatgtggaagatctacgagcagcagctgcatgaatgggaatcaaaagtatgcagaatgcagagttcgtcaaatgggtaccaagaaaagaaattgcctcccaagcctgcattgtttgccttctgtttgaggcctcgtggactccatgtaccatacaaggggccaaagcagcgttctcataagaagcttatgtccacaggctgccatagcttttcaagagagcatgatggcttttaccggcaaggcaggagatacaatgaatgcactggggatgggaggataagcgaatcgtatgacactggttctctttactccccaacagggtactctcccaggttctctacaagaacagattctcctcgggcattcgagtcctcagaacgaagctccacaccaagattttccaggaacaacagtagcaccaaaaggagcgcagcccttgctttctccgacgaccaccagccatcaccttcctgccgcccccagagagcgaaacggagcgcgcacgaccactggaacgctgctatccacgactggcagaactcgaag

SEQ ID NO: 72057 - DNA, 2588 bp, Zea Mays
aaacaaacaaaacggaaaacaagccacggaaaaaagaggaaaaaaagctcgagaagagcaaaccctaggttcccgtggcaccgacgaaatcctaattcgcccgcattggatcgcccaggcaaggggcttttggcacagatcggcgctcccccgtcctcggattcgattcctctgctcaatttggggccgatccgtggctcggaccttctcgccgctcggcgactctctcatcttttttccccgatccgtctgtgagacactaagcgctttgccgcggtcgcccctgctgacgccaccggcacaaggaggcttgtcgcccactctggtccgccaccgacgcttgacgcctccagggcttcaagggttttgatgttcaggactttcttccagagtctaattattcagatcgcgaacctatcatttgttgtttggatgaacattgtagatttactcaaagtgttctggacatgacaactgcaccttcactactgccttggcaccataaaaaaatgttaacagaaagcaatttgactaatggttctcagcaatccatgtcatgtactttggatgaggatcagcagcagttggtaacagaacatgcatctgacacagtttttcatgctccacctcaagtttgttcacttaatctcggttcatcacctgatagtccattggatatggcttctgctagttgtgcaaatccatctagctctgctagtagggaatccaatattgctgaaaggaatgtaagcacagaatgtaatggcagcagtattggtgatgcaaatataattcacaggaagtgtgaagatcaaaatgggccttgtgctggtcctgacaagtcattttcctccaaccttagtgttatttgctcttcacagaagtctgcagagagtcgtctttccataaatattgacaaagcaaatgataaacctcttgacaacgatgaaaaagaaaagcaacctatatctaacttggttcaggaattgaatgaacatccaattggctgtgttacacctactgcccctagaactacttcccataggaaccggtttacatctatatcacgtgcttttggagatggttcaaaattactgccagaagaccacgtgttgactggctttgctggtggttctaagaaaccacgaagtcaagtttcatactcagtttctcctaaaagtgaggaacttggcataaaaaacaaaggtcatttccgcaagatacaatctcatgttagtgcaaagataaatgatgcaaagaaacttcctgatagttctagaagtgggcatagcagcccggagtcattgacttgcgttgcaaatgttcttgttacagtgggtgatagaggttggagggagtatgatacccagatcacaatggattccgatggtcagagtgaaaggaggatatgcgtgaaacttgctgaagggaccaagtatgctcacaaggtctgtcaagttttgcagcctggggccacaaaccgctatacacatgccatgatgtggaaaggtggtgctgaatggtgcctggaatttcctgacagaagccagtggttgattttcaagcaaatgcacgatgagtgctatagccataacatcagagctgcttctgtgagaaacattccaatccctggtgtccatttggttgaaatccatgatgataatgatgtggtatcctttgtgcaatctgaagcttatcttgttcacatcggaacagatgttgaaattgctcttgatcaatcccgtgtgttatatgacatggacagcgatgatgaagagtggatatcaagctggcggaaatccttagtaagagacaacaccaccacacttcagtttgcagaagatttgtttgagagggttatggacaaactagagaagtttgcatatagccacaactgtaatggactcagcattgatcagatgaaggaactggagactgatgatgtacctctgcacactattgaagtgatacatgcatattggcaagacaagaggcagaaaaggggaatgccacttattcgacattttcagtcggctatgtggaagatctacgagcagcagctgcatgaatgggaatcaaaagtatgcagaatgcagagttcgtcaaatgggtaccaagaaaagaaattgcctcccaagcctgcattgtttgccttctgtttgaggcctcgtggactccatgtaccatacaaggggccaaagcagcgttctcataagaagcttatgtccacaggctgccatagcttttcaagagagcatgatggcttttaccggcaagtatcaggcaggagatacaatgaatgcactggggatgggaggataagcgaatcgtatgacactggttctctttactccccaacagggtactctcccaggttctctacaagaacagattctcctcgggcattcgagtcctcagaacgaagctccacaccaagattttccaggaacaacagtagcaccaaaaggagcgcagcccttgctttctccgacgaccaccagccatcaccttcctgccgcccccagagagcgaaacggagcgcgcacgaccactggaacgctgctatccacgactggcagaactcgaag

SEQ ID NO: 72058 - DNA, 251 bp, Zea Mays
agcatgatggcttttaccggcaagggtactctcccaggttctctacaagaacagattctcctcgggcattcgagtcctcagaacgaagctccacaccaagattttccaggaacaacagtagcaccaaaaggagcgcagcccttgctttctccgacgaccaccagccatcaccttcctgccgcccccagagagcgaaacggagcgcgcacgaccactggaacgctgctatccacgactggcagaactcgaag

SEQ ID NO: 72059 - DNA, 2256 bp, Zea Mays
cgcaaccaggcgtcttcctcttcccaatcgcagccaccccgacgacttcctgttctccgttaggtccttagatccgttggaggcacgcgcggggtgggagcaggcggggtgagctgccgtcgcggtgccgctcttcctctctgattcgaggcgccgctcttcctcctagatctgccgtcgcggcgccgctcttcctctctgattcgcgtcgccgctcttcctcactgattggaggcgccgctcttcctctctgattcgaggaccccgtctcgctccaccacttcatcgtcgccggcaggcagcggacgcaatgcatcgagggcagccaaaggaggtgcggtggcgtcccgtgccaccaattcacccaggcgctcaagagtaatataataagtctcttggattacagcagccacgggttggatgacactactgggtggtccctgccgccgcgcgggtccacgtgcagccgctgtagggagaggagcggatgggcgcgtagccgtcgtccacacgctgtcattcgtctccatcgttcctatgcgtcagcagttccaggcatggccgaaacagcgccacgctctgtgcggtacgacggtgagtactttcatcactttaatatttcctctccctggctcctggccatcttatttagccctgcactgagagtttgtcgacttcgtcttcctcgctgctcatcacttcggttttgccacccaccgtcgccatgggagcatttggtgtgctgctgttgcccgccacgacctacgcattgtgagcggcttcgtaaacccaggtcttgctctcggtgcttgctgtctgggtgacttttggcgcagtgtggacgagaccactcaccagtttgcccttccgatcagcgtgaattgggtgcttgcgtgcttgctgtttgggggaattttatcacagcttggaggagacccctcgccattttgcgtttccaattgtcggtactttggtgatgacgatgttggttcatcaaaacgaaaatacgtcacgatgcttgagtttgtaaggcgacacatgcactacagattggacgagccaaacccatatacgtgttacggtagattaagtgatcaaatagatgtcagatgcgtattcaactatcgagggaaacaggctacagttcatagcaagccaccaaagtgatctacggtcggaaactgttcagggcatagctgacgccattgataagggcttcgttaatgctgattcgattggcgatagggtagttgtccctgccagcttcactggtggtagaaggtaccatgtcatgaattaccaggacgcgatggctaatgccctttgttttagatggactgtgcttttctggaggctcaccctgtaagtggtacattaatcctgatgttcctgaagaaggtgccctcatggctagtgcgatgaaagcacatagtcccattaagtggaacgaagttctatcttcgaatcagcctatgtcccatgttcctaaggaacagaaaatcgcttatatcagagatctgcacccatttgagaataaggatagggaattcttggtgacagtcactgtaaaaaagattggtgataggtggtggtacaatgcatgcaaaaaatgcacccgcacagctgtggctcatggggattcctacaagtgcagcgatcaagtttgcgctaacattggcacgcctagccagaggtacaaactgcttctcgctgcaggggatgagacgggtgacatagacttcatcctctttggtcggatggcgcaacgcatcatcaagaagccgtgcgatatgctcattgtcaacaatccgatcgactttattcctgatccaatcacagatctgctcgagaagacgtatatatggaatgtcaacgcagtcgtggcagagataggtactgcaaaggacttcatccaagcatcttcatcaaggccaaaacagtcacaacctgtgttgttgcaagacgcacccagtggcgttgaagacactcctaacaaagcctctaacttggtcatgccttcgaccccgctcacaccacaaagttccgcaaccagtgtgcaagataagactttttgtgttggcagcagcactatggttccaggtgctattcccgctataacaaaggaactgacatccacgcctaggaagaggacaaggtcttcgccatcaaagacagttacaaagaggttgttcaccgacatagatggaggaatcactggctctaaggatgtcgcggatagcgctgctgcccctaggt

SEQ ID NO: 72060 - DNA, 490 bp, Zea Mays
cacgggttggatgacactactgggtggtccctgccgccgcgcgggtccacgtgcagccgctgtagggagaggagcggatgggcgcgtagccgtcgtccacacgctgtcattcgtctccatcgttcctatgcgtcagcagttccaggcatggccgaaacagcgccacgctctgtgcggtacgacggtgagtactttcatcactttaatatttcctctccctggctcctggccatcttatttagccctgcactgagagtttgtcgacttcgtcttcctcgctgctcatcacttcggttttgccacccaccgtcgccatgggagcatttggtgtgctgctgttgcccgccacgacctacgcattgtgagcggcttcgtaaacccaggacaaggtcttcgccatcaaagacagttacaaagaggttgttcaccgacatagatggaggaatcactggctctaaggatgtcgcggatagcgctgctgcccctaggt

SEQ ID NO: 72061 - DNA, 355 bp, Zea Mays
ccacgctctgtgcggtacgacggtgagtactttcatcactttaatatttcctctccctggctcctggccatcttatttagccctgcactgagagtttgtcgacttcgtcttcctcgctgctcatcacttcggttttgccacccaccgtcgccatgggagcatttggtgtgctgctgttgcccgccacgacctacgcattgtgagcggcttcgtaaacccagtgctctcggtgcttgctgtctgggtgacttttggcgcagtgtggacgagaccactcaccagtttgcccttccgatcagcgtgaattgggtgcttgcgtgcttgctgtttgggggaattttatcacagcttggag

SEQ ID NO: 72062 - DNA, 976 bp, Zea Mays
ggctaatgccctttgttttagatggactgtgcttttctggaggctcaccctgtaagtggtacattaatcctgatgttcctgaagaaggtgccctcatggctagtgcgatgaaagcacatagtcccattaagtggaacgaagttctatcttcgaatcagcctatgtcccatgttcctaaggaacagaaaatcgcttatatcagagatctgcacccatttgagaataaggatagggaattcttggtgacagtcactgtaaaaaagattggtgataggtggtggtacaatgcatgcaaaaaatgcacccgcacagctgtggctcatggggattcctacaagtgcagcgatcaagtttgcgctaacattggcacgcctagccagaggtacaaactgcttctcgctgcaggggatgagacgggtgacatagacttcatcctctttggtcggatggcgcaacgcatcatcaagaagccgtgcgatatgctcattgtcaacaatccgatcgactttattcctgatccaatcacagatctgctcgagaagacgtatatatggaatgtgagtttctctgaccacacaatcaatactggaaatatttgtttccaggtcaacgcagtcgtggcagagataggtactgcaaaggacttcatccaagcatcttcatcaaggccaaaacagtcacaacctgtgttgttgcaagacgcacccagtggcgttgaagacactcctaacaaagcctctaacttggtcatgccttcgaccccgctcacaccacaaagttccgcaaccagtgtgcaagataagcagcactatggttccaggtgctattcccgctataacaaaggaactgacatccacgcctaggaagaggacaaggtcttcgccatcaaagacagttacaaagaggttgttcaccgacatagatggaggaatcactggctctaaggatgtcgcggatagcgctgctgcccctaggt

SEQ ID NO: 72063 - DNA, 3293 bp, Zea Mays
cagcctgcaagcccagccttccctgcttggcttgcattccgacctgcttggcttggcttgcattcacagttgcacgccggccgccgccaaccccgcccccacgtcgcgcgcgctgtctccctctcgcctctctcgtggagacgactgggcgacagccgacagccgctgtcgcccaacgcaagctgcccaggtcttcttcgggctcttcgccggcgacgagcacagccaggtttaggtcgagcaggggccgatgggggaagaggcggagagcaactgcaagcgcaaggcgccggactcgagcgtggaagagcagccgagcctcgcgccggcgccggcgcagtcgcaggcggacccggcggccaagcgcccgaacatctcccgctcttgcgtccacgaggtagccgtcccgaatgggtacgagtcggttaaggacgaggcggtgcacgggacgcttgccagcccggccttcaatggggagatggccaagcagtacccgttcaagcttgaccccttccagagcgtatccatcgcttgcctggagcggaacgagtccgtgcttgtctccgcgcacacttccgcggggaagaccgtcgttgcggagtacgccattgccatggcgttcagggacaagcagagggtcatctacacctccccgctcaaggccctgagcaaccagaagtacagggagctcagtcaggagttcacagatgtcgggctgatgactggcgacgtcacgctccatccgaacgccacatgcctggtcatgacgacagagatcctcagggcgatgctctacaggggctccgaggtgatcaaggaggttgcctgggttatattcgatgagatacattacatgaaggatcgtgagagaggggtcgtgtgggaggagagcatcattttcttgccccctgccatcaagatggttttcctttcggctaccatgtcgaatgcgaccgaatttgctgaatggatatgcagcctgcacaagcagccctgtcatgttgtgtatacggacttcaggcccacaccattgcagcactatatgtttccaataggtggttctggtctttaccttgtagtagatgaaaatggccagtttagagaagataactttgcgaagctacaagactcctttgctaagccaaataatcaactggatggaaggaaaggtggtggacctaaagcgagtggccgaattgcaaaaggtggaagcgcctctgggaattctgacatatacagaattgttaagatgattatggagcgcaagtttcaaccagtcataattttcagctttagtagaagagaatgtgagcatcatgccatgtctatgtcaaaacttgacttcagcactgaagaagaaaaggaatgcattgagcaggttttctgtaatgctattggttgtttagtggaggaagacagaagtttacctgctatagagttgatgttgccacttcttaaacgaggtattgcagtacaccattctggactacttccaataattaaggagctagtggaattgctctttcaagaaggtcttgtgaaagctctctttgctaccgagacatttgccatgggtcttaatatgcctgcgaaaacggttgttttcacgtctgtcaaaaaatgggatggcgatagtaaccgctatattggttctggagaatatatacagatgagtggaagagctggccggcgtggcaaggatgaacgtggtatctgtgttataatgatagatgagaagatggaaatgagtgttatcaaggacatggtgttaggcaaaccagcacctctagtcagtactttccgtctgagctactacactattctgaacttaatgagccgtgtggagggccaatttaccgctgagcatgtgattaggcattcattccatgaatttcagtatgagaaggcattgccagaaatagctcaaaagattacacggttggagaatgaagctaccttgcttgattcttctggcgagactgatcttgctgaatatcacaaattggggcttgatatatctgaactggagaagaaaatcatgtctgagatgattagaccagagagggctttgttgtatttggttcctggaaggctggttagagtgagggatggttcaacagactggggatggggtgtggttgtaaatgtagtgaagaaacctccagcatctgggactctccctcctgcattaagtgcatcgcgcagcaacaactatacagtcgataccttgcttcactgctcctctaattccagcgagaatggatcacgttcaaagccatgccctcctcgcccaggggaaaaaggtgaaatgcatgtggtgcctgtaccattgcctttagtatctggtctaagcagtgttagaatcaacattcctcctgatctacgaccacctgaagcaagacagaatatactttctgcagtgcaagaactaggaaagcgctacccccaaggtcttccgaaactacatccaatcaatgacatgggtattcaagaacctgaactagttgacttggtacataaacttgaagaccttgagcagaaacaatgctctcaccgacttcataagtccggtcaaagtgaacaggaactatcatggtaccaaaaaaaagcagatctgaatactgaaattcagcaactcaagtcaaagatgcgggattcacagctacaaaaatttagagatgaacttaggaaccggtcccgtgttctgaagatgctggggcatattgatgctgacggtgttctccagttaaaaggacgtgctgcctgtctaatagacacaggggatgaactgcttatcactgaacttatgttcaatggtacatttaatgatcttgaccatcatcaagttgcctcccttgctagctgctttgtaccttgtgataaatcaagtgagcagatacgcctaagaaatgaactttctaggccgatgatgcagcttcaggaggctgcaagaaaaatagctgaggtacaacgagaatgcaaactggaagtaaatgtggaggaatatgttgaatcaacctgcagaccctaccttatggatgtcatatactgttggtcaaggggagccacctttgcggaggtgatggaaatgaccgacatatttgaaggaagtgtcataagacttgctagaaggctggatgaatttctgaatcagttgagagctgctgctgaagccgtgggggaggttaaccttgagaagaagttcaagaatgcaagtgagagtttgcgtcggggagagggcattgccagatagcctctgtaaccttgtactctagttcctagactaaattaat

SEQ ID NO: 72064 - DNA, 2601 bp, Zea Mays
gcttggcttggcttgcattcacagttgcacgccggccgccgccaaccccgcccccacgtcgcgcgcgctgtctccctctcgcctctctcgtggagacgactgggcgacagccgacagccgctgtcgcccaacgcaagctgcccaggtcttcttcgggctcttcgccggcgacgagcacagccagatgattatggagcgcaagtttcaaccagtcataattttcagctttagtagaagagaatgtgagcatcatgccatgtctatgtcaaaacttgacttcagcactgaagaagaaaaggaatgcattgagcaggttttctgtaatgctattggttgtttagtggaggaagacagaagtttacctgctatagagttgatgttgccacttcttaaacgaggtattgcagtacaccattctggactacttccaataattaaggagctagtggaattgctctttcaagaaggtcttgtgaaagctctctttgctaccgagacatttgccatgggtcttaatatgcctgcgaaaacggttgttttcacgtctgtcaaaaaatgggatggcgatagtaaccgctatattggttctggagaatatatacagatgagtggaagagctggccggcgtggcaaggatgaacgtggtatctgtgttataatgatagatgagaagatggaaatgagtgttatcaaggacatggtgttaggcaaaccagcacctctagtcagtactttccgtctgagctactacactattctgaacttaatgagccgtgtggagggccaatttaccgctgagcatgtgattaggcattcattccatgaatttcagtatgagaaggcattgccagaaatagctcaaaagattacacggttggagaatgaagctaccttgcttgattcttctggcgagactgatcttgctgaatatcacaaattggggcttgatatatctgaactggagaagaaaatcatgtctgagatgattagaccagagagggctttgttgtatttggttcctggaaggctggttagagtgagggatggttcaacagactggggatggggtgtggttgtaaatgtagtgaagaaacctccagcatctgggactctccctcctgcattaagtgcatcgcgcagcaacaactatacagtcgataccttgcttcactgctcctctaattccagcgagaatggatcacgttcaaagccatgccctcctcgcccaggggaaaaaggtgaaatgcatgtggtgcctgtaccattgcctttagtatctggtctaagcagtgttagaatcaacattcctcctgatctacgaccacctgaagcaagacagaatatactttctgcagtgcaagaactaggaaagcgctacccccaaggtcttccgaaactacatccaatcaatgacatgggtattcaagaacctgaactagttgacttggtacataaacttgaagaccttgagcagaaacaatgctctcaccgacttcataagtccggtcaaagtgaacaggaactatcatggtaccaaaaaaaagcagatctgaatactgaaattcagcaactcaagtcaaagatgcgggattcacagctacaaaaatttagagatgaacttaggaaccggtcccgtgttctgaagatgctggggcatattgatgctgacggtgttctccagttaaaaggacgtgctgcctgtctaatagacacaggggatgaactgcttatcactgaacttatgttcaatggtacatttaatgatcttgaccatcatcaagttgcctcccttgctagctgctttgtaccttgtgataaatcaagtgagcagatacgcctaagaaatgaactttctaggccgatgatgcagcttcaggaggctgcaagaaaaatagctgaggtacaacgagaatgcaaactggaagtaaatgtggaggaatatgttgaatcaacctgcagaccctaccttatggatgtcatatactgttggtcaaggggagccacctttgcggaggtgatggaaatgaccgacatatttgaaggaagtgtcataagacttgctagaaggctggatgaatttctgaatcagttgagagctgctgctgaagccgtggggggaggttaaccttgaagaagaagttcaagaatgcaagtgagagtttgcgtcggggtatcatgttctccaactcactgtatctgtaattagcactttagcagcaatagtaccatatgttagccgacaaatgctagcggcggggttttgacctgaagcaaaatatgcgttgtctgtaggagagggcattgccagatagcctctgtaaccttgtactctagttcctagactaaattaatttgttatcatgtatacatcagggtaggcgtgatgctgtcttaagaaatccaagtgataccaatttaagggcctgttattgaatagtgagggattctagctccctcaatcctctctgttactcttgcttccaaacaaatcctaaaggtctaatatcactgttggttatgctctaaagtttttttttggatgattgaaactgtatcgaagaatcgccataaatatatttgctcaagaactgtaaaaggctg

SEQ ID NO: 72065 - DNA, 3099 bp, Zea Mays
gcttggcttggcttgcattcacagttgcacgccggccgccgccaaccccgcccccacgtcgcgcgcgctgtctccctctcgcctctctcgtggagacgactgggcgacagccgacagccgctgtcgcccaacgcaagctgcccaggtcttcttcgggctcttcgccggcgacgagcacagccaggtttaggtcgagcaggggccgatgggggaagaggcggagagcaactgcaagcgcaaggcgccggactcgagcgtggaagagcagccgagcctcgcgccggcgccggcgcagtcgcaggcggacccggcggccaagcgcccgaacatctcccgctcttgcgtccacgaggtagccgtcccgaatgggtacgagtcggttaaggacgaggcggtgcacgggacgcttgccagcccggccttcaatggggagatggccaagcagtacccgttcaagcttgaccccttccagagcgtatccatcgcttgcctggagcggaacgagtccgtgcttgtctccgcgcacacttccgcggggaagaccgtcgttgcggagtacgccattgccatggcgttcagggacaagcagagggtcatctacacctccccgctcaaggccctgagcaaccagaagtacagggagctcagtcaggagttcacagatgtcgggctgatgactggcgacgtcacgctccatccgaacgccacatgcctggtcatgacgacagagatcctcagggcgatgctctacaggggctccgaggtgatcaaggaggttgcctgggttatattcgatgagatacattacatgaaggatcgtgagagaggggtcgtgtgggaggagagcatcattttcttgccccctgccatcaagatggttttcctttcggctaccatgtcgaatgcgaccgaatttgctgaatggatatgcagcctgcacaagcagccctgtcatgttgtgtatacggacttcaggcccacaccattgcagcactatatgtttccaataggtggttctggtctttaccttgtagtagatgaaaatggccagtttagagaagataactttgcgaagctacaagactcctttgctaagccaaataatcaactggatggaaggaaaggtggtggacctaaagcgagtggccgaattgcaaaaggtggaagcgcctctgggaattctgacatatacagaattgttaagatgattatggagcgcaagtttcaaccagtcataattttcagctttagtagaagagaatgtgagcatcatgccatgtctatgtcaaaacttgacttcagcactgaagaagaaaaggaatgcattgagcaggttttctgtaatgctattggttgtttagtggaggaagacagaagtttacctgctatagagttgatgttgccacttcttaaacgaggtattgcagtacaccattctggactacttccaataattaaggagctagtggaattgctctttcaagaaggtcttgtgaaagctctctttgctaccgagacatttgccatgggtcttaatatgcctgcgaaaacggttgttttcacgtctgtcaaaaaatgggatggcgatagtaaccgctatattggttctggagaatatatacagatgagtggaagagctggccggcgtggcaaggatgaacgtggtatctgtgttataatgatagatgagaagatggaaatgagtgttatcaaggacatggtgttaggcaaaccagcacctctagtcagtactttccgtctgagctactacactattctgaacttaatgagccgtgtggagggccaatttaccgctgagcatgtgattaggcattcattccatgaatttcagtatgagaaggcattgccagaaatagctcaaaagattacacggttggagaatgaagctaccttgcttgattcttctggcgagactgatcttgctgaatatcacaaattggggcttgatatatctgaactggagaagaaaatcatgtctgagatgattagaccagagagggctttgttgtatttggttcctggaaggctggttagagtgagggatggttcaacagactggggatggggtgtggttgtaaatgtagtgaagaaacctccagcatctgggactctccctcctgcattaagtgcatcgcgcagcaacaactatacagtcgataccttgcttcactgctcctctaattccagcgagaatggatcacgttcaaagccatgccctcctcgcccaggggaaaaaggtgaaatgcatgtggtgcctgtaccattgcctttagtatctggtctaagcagtgttagaatcaacattcctcctgatctacgaccacctgaagcaagacagaatatactttctgcagtgcaagaactaggaaagcgctacccccaaggtcttccgaaactacatccaatcaatgacatgggtattcaagaacctgaactagttgacttggtacataaacttgaagaccttgagcagaaacaatgctctcaccgacttcataagtccggtcaaagtgaacaggaactatcatggtaccaaaaaaaagcagatctgaatactgaaattcagcaactcaagtcaaagatgcgggattcacagctacaaaaatttagagatgaacttaggaaccggtcccgtgttctgaagatgctggggcatattgatgctgacggtgttctccagttaaaaggacgtgctgcctgtctaatagacacaggggatgaactgcttatcactgaacttatgttcaatggtacatttaatgatcttgaccatcatcaagttgcctcccttgctagctgctttgtaccttgtgataaatcaagtgagcagatacgcctaagaaatgaactttctaggccgatgatgcagcttcaggaggctgcaagaaaaatagctgagggagccacctttgcggaggtgatggaaatgaccgacatatttgaaggaagtgtcataagacttgctagaaggctggatgaatttctgaatcagttgagagctgctgctgaagccgtgggggaggttaaccttgagaagaagttcaagaatgcaagtgagagtttgcgtcggggtatcat

SEQ ID NO: 72066 - DNA, 3303 bp, Zea Mays
gcttggcttggcttgcattcacagttgcacgccggccgccgccaaccccgcccccacgtcgcgcgcgctgtctccctctcgcctctctcgtggagacgactgggcgacagccgacagccgctgtcgcccaacgcaagctgcccaggtcttcttcgggctcttcgccggcgacgagcacagccaggtttaggtcgagcaggggccgatgggggaagaggcggagagcaactgcaagcgcaaggcgccggactcgagcgtggaagagcagccgagcctcgcgccggcgccggcgcagtcgcaggcggacccggcggccaagcgcccgaacatctcccgctcttgcgtccacgaggtagccgtcccgaatgggtacgagtcggttaaggacgaggcggtgcacgggacgcttgccagcccggccttcaatggggagatggccaagcagtacccgttcaagcttgaccccttccagagcgtatccatcgcttgcctggagcggaacgagtccgtgcttgtctccgcgcacacttccgcggggaagaccgtcgttgcggagtacgccattgccatggcgttcagggacaagcagagggtcatctacacctccccgctcaaggccctgagcaaccagaagtacagggagctcagtcaggagttcacagatgtcgggctgatgactggcgacgtcacgctccatccgaacgccacatgcctggtcatgacgacagagatcctcagggcgatgctctacaggggctccgaggtgatcaaggaggttgcctgggttatattcgatgagatacattacatgaaggatcgtgagagaggggtcgtgtgggaggagagcatcattttcttgccccctgccatcaagatggttttcctttcggctaccatgtcgaatgcgaccgaatttgctgaatggatatgcagcctgcacaagcagccctgtcatgttgtgtatacggacttcaggcccacaccattgcagcactatatgtttccaataggtggttctggtctttaccttgtagtagatgaaaatggccagtttagagaagataactttgcgaagctacaagactcctttgctaagccaaataatcaactggatggaaggaaaggtggtggacctaaagcgagtggccgaattgcaaaaggtggaagcgcctctgggaattctgacatatacagaattgttaagatgattatggagcgcaagtttcaaccagtcataattttcagctttagtagaagagaatgtgagcatcatgccatgtctatgtcaaaacttgacttcagcactgaagaagaaaaggaatgcattgagcaggttttctgtaatgctattggttgtttagtggaggaagacagaagtttacctgctatagagttgatgttgccacttcttaaacgaggtattgcagtacaccattctggactacttccaataattaaggagctagtggaattgctctttcaagaaggtcttgtgaaagctctctttgctaccgagacatttgccatgggtcttaatatgcctgcgaaaacggttgttttcacgtctgtcaaaaaatgggatggcgatagtaaccgctatattggttctggagaatatatacagatgagtggaagagctggccggcgtggcaaggatgaacgtggtatctgtgttataatgatagatgagaagtgcatcctcattctgcagttgtatttctgtgtccagttgacaaaatctgatgtgagaattgatcactgatttccttgctatctattgttcttgctatttcaattgcagatggaaatgagtgttatcaaggacatggtgttaggcaaaccagcacctctagtcagtactttccgtctgagctactacactattctgaacttaatgagccgtgtggagggccaatttaccgctgagcatgtgattaggcattcattccatgaatttcagtatgagaaggcattgccagaaatagctcaaaagattacacggttggagaatgaagctaccttgcttgattcttctggcgagactgatcttgctgaatatcacaaattggggcttgatatatctgaactggagaagaaaatcatgtctgagatgattagaccagagagggctttgttgtatttggttcctggaaggctggttagagtgagggatggttcaacagactggggatggggtgtggttgtaaatgtagtgaagaaacctccagcatctgggactctccctcctgcattaagtgcatcgcgcagcaacaactatacagtcgataccttgcttcactgctcctctaattccagcgagaatggatcacgttcaaagccatgccctcctcgcccaggggaaaaaggtgaaatgcatgtggtgcctgtaccattgcctttagtatctggtctaagcagtgttagaatcaacattcctcctgatctacgaccacctgaagcaagacagaatatactttctgcagtgcaagaactaggaaagcgctacccccaaggtcttccgaaactacatccaatcaatgacatgggtattcaagaacctgaactagttgacttggtacataaacttgaagaccttgagcagaaacaatgctctcaccgacttcataagtccggtcaaagtgaacaggaactatcatggtaccaaaaaaaagcagatctgaatactgaaattcagcaactcaagtcaaagatgcgggattcacagctacaaaaatttagagatgaacttaggaaccggtcccgtgttctgaagatgctggggcatattgatgctgacggtgttctccagttaaaaggacgtgctgcctgtctaatagacacaggggatgaactgcttatcactgaacttatgttcaatggtacatttaatgatcttgaccatcatcaagttgcctcccttgctagctgctttgtaccttgtgataaatcaagtgagcagatacgcctaagaaatgaactttctaggccgatgatgcagcttcaggaggctgcaagaaaaatagctgaggtacaacgagaatgcaaactggaagtaaatgtggaggaatatgttgaatcaacctgcagaccctaccttatggatgtcatatactgttggtcaaggggagccacctttgcggaggtgatggaaatgaccgacatatttgaaggaagtgtcataagacttgctagaaggctggatgaatttctgaatcagttgagagctgctgctgaagccgtgggggaggttaaccttgagaagaagttcaagaatgcaagtgagagtttgcgtcggggtatcat

SEQ ID NO: 72067 - DNA, 3094 bp, Zea Mays
gcttggcttggcttgcattcacagttgcacgccggccgccgccaaccccgcccccacgtcgcgcgcgctgtctccctctcgcctctctcgtggagacgactgggcgacagccgacagccgctgtcgcccaacgcaagctgcccaggtcttcttcgggctcttcgccggcgacgagcacagccaggtttaggtcgagcaggggccgatgggggaagaggcggagagcaactgcaagcgcaaggcgccggactcgagcgtggaagagcagccgagcctcgcgccggcgccggcgcagtcgcaggcggacccggcggccaagcgcccgaacatctcccgctcttgcgtccacgaggtagccgtcccgaatgggtacgagtcggttaaggacgaggcggtgcacgggacgcttgccagcccggccttcaatggggagatggccaagcagtacccgttcaagcttgaccccttccagagcgtatccatcgcttgcctggagcggaacgagtccgtgcttgtctccgcgcacacttccgcggggaagaccgtcgttgcggagtacgccattgccatggcgttcagggacaagcagagggtcatctacacctccccgctcaaggccctgagcaaccagaagtacagggagctcagtcaggagttcacagatgtcgggctgatgactggcgacgtcacgctccatccgaacgccacatgcctggtcatgacgacagagatcctcagggcgatgctctacaggggctccgaggtgatcaaggaggttgcctgggttatattcgatgagatacattacatgaaggatcgtgagagaggggtcgtgtgggaggagagcatcattttcttgccccctgccatcaagatggttttcctttcggctaccatgtcgaatgcgaccgaatttgctgaatggatatgcagcctgcacaagcagccctgtcatgttgtgtatacggacttcaggcccacaccattgcagcactatatgtttccaataggtggttctggtctttaccttgtagtagatgaaaatggccagtttagagaagataactttgcgaagctacaagactcctttgctaagccaaataatcaactggatggaaggaaaggtggtggacctaaagcgagtggccgaattgcaaaaggtggaagcgcctctgggaattctgacatatacagaattgttaagatgattatggagcgcaagtttcaaccagtcataattttcagctttagtagaagagaatgtgagcatcatgccatgtctatgtcaaaacttgacttcagcactgaagaagaaaaggaatgcattgagcaggttttctgtaatgctattggttgtttagtggaggaagacagaagtttacctgctatagagttgatgttgccacttcttaaacgagtttgccatgggtcttaatatgcctgcgaaaacggttgttttcacgtctgtcaaaaaatgggatggcgatagtaaccgctatattggttctggagaatatatacagatgagtggaagagctggccggcgtggcaaggatgaacgtggtatctgtgttataatgatagatgagaagatggaaatgagtgttatcaaggacatggtgttaggcaaaccagcacctctagtcagtactttccgtctgagctactacactattctgaacttaatgagccgtgtggagggccaatttaccgctgagcatgtgattaggcattcattccatgaatttcagtatgagaaggcattgccagaaatagctcaaaagattacacggttggagaatgaagctaccttgcttgattcttctggcgagactgatcttgctgaatatcacaaattggggcttgatatatctgaactggagaagaaaatcatgtctgagatgattagaccagagagggctttgttgtatttggttcctggaaggctggttagagtgagggatggttcaacagactggggatggggtgtggttgtaaatgtagtgaagaaacctccagcatctgggactctccctcctgcattaagtgcatcgcgcagcaacaactatacagtcgataccttgcttcactgctcctctaattccagcgagaatggatcacgttcaaagccatgccctcctcgcccaggggaaaaaggtgaaatgcatgtggtgcctgtaccattgcctttagtatctggtctaagcagtgttagaatcaacattcctcctgatctacgaccacctgaagcaagacagaatatactttctgcagtgcaagaactaggaaagcgctacccccaaggtcttccgaaactacatccaatcaatgacatgggtattcaagaacctgaactagttgacttggtacataaacttgaagaccttgagcagaaacaatgctctcaccgacttcataagtccggtcaaagtgaacaggaactatcatggtaccaaaaaaaagcagatctgaatactgaaattcagcaactcaagtcaaagatgcgggattcacagctacaaaaatttagagatgaacttaggaaccggtcccgtgttctgaagatgctggggcatattgatgctgacggtgttctccagttaaaaggacgtgctgcctgtctaatagacacaggggatgaactgcttatcactgaacttatgttcaatggtacatttaatgatcttgaccatcatcaagttgcctcccttgctagctgctttgtaccttgtgataaatcaagtgagcagatacgcctaagaaatgaactttctaggccgatgatgcagcttcaggaggctgcaagaaaaatagctgaggtacaacgagaatgcaaactggaagtaaatgtggaggaatatgttgaatcaacctgcagaccctaccttatggatgtcatatactgttggtcaaggggagccacctttgcggaggtgatggaaatgaccgacatatttgaaggaagtgtcataagacttgctagaaggctggatgaatttctgaatcagttgagagctgctgctgaagccgtgggggaggttaaccttgagaagaagttcaagaatgcaagtgagagtttgcgtcggggtatcat

SEQ ID NO: 72068 - DNA, 3267 bp, Zea Mays
gcttggcttggcttgcattcacagttgcacgccggccgccgccaaccccgcccccacgtcgcgcgcgctgtctccctctcgcctctctcgtggagacgactgggcgacagccgacagccgctgtcgcccaacgcaagctgcccaggtcttcttcgggctcttcgccggcgacgagcacagccaggtttaggtcgagcaggggccgatgggggaagaggcggagagcaactgcaagcgcaaggcgccggactcgagcgtggaagagcagccgagcctcgcgccggcgccggcgcagtcgcaggcggacccggcggccaagcgcccgaacatctcccgctcttgcgtccacgaggtagccgtcccgaatgggtacgagtcggttaaggacgaggcggtgcacgggacgcttgccagcccggccttcaatggggagatggccaagcagtacccgttcaagcttgaccccttccagagcgtatccatcgcttgcctggagcggaacgagtccgtgcttgtctccgcgcacacttccgcggggaagaccgtcgttgcggagtacgccattgccatggcgttcagggacaagcagagggtcatctacacctccccgctcaaggccctgagcaaccagaagtacagggagctcagtcaggagttcacagatgtcgggctgatgactggcgacgtcacgctccatccgaacgccacatgcctggtcatgacgacagagatcctcagggcgatgctctacaggggctccgaggtgatcaaggaggttgcctgggttatattcgatgagatacattacatgaaggatcgtgagagaggggtcgtgtgggaggagagcatcattttcttgccccctgccatcaagatggttttcctttcggctaccatgtcgaatgcgaccgaatttgctgaatggatatgcagcctgcacaagcagccctgtcatgttgtgtatacggacttcaggcccacaccattgcagcactatatgtttccaataggtggttctggtctttaccttgtagtagatgaaaatggccagtttagagaagataactttgcgaagctacaagactcctttgctaagccaaataatcaactggatggaaggaaaggtggtggacctaaagcgagtggccgaattgcaaaaggtggaagcgcctctgggaattctgacatatacagaattgttaagatgattatggagcgcaagtttcaaccagtcataattttcagctttagtagaagagaatgtgagcatcatgccatgtctatgtcaaaacttgacttcagcactgaagaagaaaaggaatgcattgagcaggttttctgtaatgctattggttgtttagtggaggaagacagaagtttacctgctatagagttgatgttgccacttcttaaacgaggtattgcagtacaccattctggactacttccaataattaaggagctagtggaattgctctttcaagaaggtcttgtgaaagctctctttgctaccgagacatttgccatgggtcttaatatgcctgcgaaaacggttgttttcacgtctgtcaaaaaatgggatggcgatagtaaccgctatattggttctggagaatatatacagatgagtggaagagctggccggcgtggcaaggatgaacgtggtatctgtgttataatgatagatgagaagttgacaaaatctgatgtgagaattgatcactgatttccttgctatctattgttcttgctatttcaattgcagatggaaatgagtgttatcaaggacatggtgttaggcaaaccagcacctctagtcagtactttccgtctgagctactacactattctgaacttaatgagccgtgtggagggccaatttaccgctgagcatgtgattaggcattcattccatgaatttcagtatgagaaggcattgccagaaatagctcaaaagattacacggttggagaatgaagctaccttgcttgattcttctggcgagactgatcttgctgaatatcacaaattggggcttgatatatctgaactggagaagaaaatcatgtctgagatgattagaccagagagggctttgttgtatttggttcctggaaggctggttagagtgagggatggttcaacagactggggatggggtgtggttgtaaatgtagtgaagaaacctccagcatctgggactctccctcctgcattaagtgcatcgcgcagcaacaactatacagtcgataccttgcttcactgctcctctaattccagcgagaatggatcacgttcaaagccatgccctcctcgcccaggggaaaaaggtgaaatgcatgtggtgcctgtaccattgcctttagtatctggtctaagcagtgttagaatcaacattcctcctgatctacgaccacctgaagcaagacagaatatactttctgcagtgcaagaactaggaaagcgctacccccaaggtcttccgaaactacatccaatcaatgacatgggtattcaagaacctgaactagttgacttggtacataaacttgaagaccttgagcagaaacaatgctctcaccgacttcataagtccggtcaaagtgaacaggaactatcatggtaccaaaaaaaagcagatctgaatactgaaattcagcaactcaagtcaaagatgcgggattcacagctacaaaaatttagagatgaacttaggaaccggtcccgtgttctgaagatgctggggcatattgatgctgacggtgttctccagttaaaaggacgtgctgcctgtctaatagacacaggggatgaactgcttatcactgaacttatgttcaatggtacatttaatgatcttgaccatcatcaagttgcctcccttgctagctgctttgtaccttgtgataaatcaagtgagcagatacgcctaagaaatgaactttctaggccgatgatgcagcttcaggaggctgcaagaaaaatagctgaggtacaacgagaatgcaaactggaagtaaatgtggaggaatatgttgaatcaacctgcagaccctaccttatggatgtcatatactgttggtcaaggggagccacctttgcggaggtgatggaaatgaccgacatatttgaaggaagtgtcataagacttgctagaaggctggatgaatttctgaatcagttgagagctgctgctgaagccgtgggggaggttaaccttgagaagaagttcaagaatgcaagtgagagtttgcgtcggggtatcat

SEQ ID NO: 72069 - DNA, 3285 bp, Zea Mays
gcttggcttggcttgcattcacagttgcacgccggccgccgccaaccccgcccccacgtcgcgcgcgctgtctccctctcgcctctctcgtggagacgactgggcgacagccgacagccgctgtcgcccaacgcaagctgcccaggtcttcttcgggctcttcgccggcgacgagcacagccaggtttaggtcgagcaggggccgatgggggaagaggcggagagcaactgcaagcgcaaggcgccggactcgagcgtggaagagcagccgagcctcgcgccggcgccggcgcagtcgcaggcggacccggcggccaagcgcccgaacatctcccgctcttgcgtccacgaggtagccgtcccgaatgggtacgagtcggttaaggacgaggcggtgcacgggacgcttgccagcccggccttcaatggggagatggccaagcagtacccgttcaagcttgaccccttccagagcgtatccatcgcttgcctggagcggaacgagtccgtgcttgtctccgcgcacacttccgcggggaagaccgtcgttgcggagtacgccattgccatggcgttcagggacaagcagagggtcatctacacctccccgctcaaggccctgagcaaccagaagtacagggagctcagtcaggagttcacagatgtcgggctgatgactggcgacgtcacgctccatccgaacgccacatgcctggtcatgacgacagagatcctcagggcgatgctctacaggggctccgaggtgatcaaggaggttgcctgggttatattcgatgagatacattacatgaaggatcgtgagagaggggtcgtgtgggaggagagcatcattttcttgccccctgccatcaagatggttttcctttcggctaccatgtcgaatgcgaccgaatttgctgaatggatatgcagcctgcacaagcagccctgtcatgttgtgtatacggacttcaggcccacaccattgcagcactatatgtttccaataggtggttctggtctttaccttgtagtagatgaaaatggccagtttagagaagataactttgcgaagctacaagactcctttgctaagccaaataatcaactggatggaaggaaaggtggtggacctaaagcgagtggccgaattgcaaaaggtggaagcgcctctgggaattctgacatatacagaattgttaagatgattatggagcgcaagtttcaaccagtcataattttcagctttagtagaagagaatgtgagcatcatgccatgtctatgtcaaaacttgacttcagcactgaagaagaaaaggaatgcattgagcaggttttctgtaatgctattggttgtttagtggaggaagacagaagtttacctgctatagagttgatgttgccacttcttaaacgaggtattgcagtacaccattctggactacttccaataattaaggagctagtggaattgctctttcaagaaggtcttgtgaaagctctctttgctaccgagacatttgccatgggtcttaatatgcctgcgaaaacggttgttttcacgtctgtcaaaaaatgggatggcgatagtaaccgctatattggttctggagaatatatacagatgagtggaagagctggccggcgtggcaaggatgaacgtggtatctgtgttataatgatagatgagaagttgtatttctgtgtccagttgacaaaatctgatgtgagaattgatcactgatttccttgctatctattgttcttgctatttcaattgcagatggaaatgagtgttatcaaggacatggtgttaggcaaaccagcacctctagtcagtactttccgtctgagctactacactattctgaacttaatgagccgtgtggagggccaatttaccgctgagcatgtgattaggcattcattccatgaatttcagtatgagaaggcattgccagaaatagctcaaaagattacacggttggagaatgaagctaccttgcttgattcttctggcgagactgatcttgctgaatatcacaaattggggcttgatatatctgaactggagaagaaaatcatgtctgagatgattagaccagagagggctttgttgtatttggttcctggaaggctggttagagtgagggatggttcaacagactggggatggggtgtggttgtaaatgtagtgaagaaacctccagcatctgggactctccctcctgcattaagtgcatcgcgcagcaacaactatacagtcgataccttgcttcactgctcctctaattccagcgagaatggatcacgttcaaagccatgccctcctcgcccaggggaaaaaggtgaaatgcatgtggtgcctgtaccattgcctttagtatctggtctaagcagtgttagaatcaacattcctcctgatctacgaccacctgaagcaagacagaatatactttctgcagtgcaagaactaggaaagcgctacccccaaggtcttccgaaactacatccaatcaatgacatgggtattcaagaacctgaactagttgacttggtacataaacttgaagaccttgagcagaaacaatgctctcaccgacttcataagtccggtcaaagtgaacaggaactatcatggtaccaaaaaaaagcagatctgaatactgaaattcagcaactcaagtcaaagatgcgggattcacagctacaaaaatttagagatgaacttaggaaccggtcccgtgttctgaagatgctggggcatattgatgctgacggtgttctccagttaaaaggacgtgctgcctgtctaatagacacaggggatgaactgcttatcactgaacttatgttcaatggtacatttaatgatcttgaccatcatcaagttgcctcccttgctagctgctttgtaccttgtgataaatcaagtgagcagatacgcctaagaaatgaactttctaggccgatgatgcagcttcaggaggctgcaagaaaaatagctgaggtacaacgagaatgcaaactggaagtaaatgtggaggaatatgttgaatcaacctgcagaccctaccttatggatgtcatatactgttggtcaaggggagccacctttgcggaggtgatggaaatgaccgacatatttgaaggaagtgtcataagacttgctagaaggctggatgaatttctgaatcagttgagagctgctgctgaagccgtgggggaggttaaccttgagaagaagttcaagaatgcaagtgagagtttgcgtcggggtatcat

SEQ ID NO: 72070 - DNA, 2127 bp, Zea Mays
ttgatctcgtcacatgcagtgtaagtttgccatgggtcttaatatgcctgcgaaaacggttgttttcacgtctgtcaaaaaatgggatggcgatagtaaccgctatattggttctggagaatatatacagatgagtggaagagctggccggcgtggcaaggatgaacgtggtatctgtgttataatgatagatgagaagatggaaatgagtgttatcaaggacatggtgttaggcaaaccagcacctctagtcagtactttccgtctgagctactacactattctgaacttaatgagccgtgtggagggccaatttaccgctgagcatgtgattaggcattcattccatgaatttcagtatgagaaggcattgccagaaatagctcaaaagattacacggttggagaatgaagctaccttgcttgattcttctggcgagactgatcttgctgaatatcacaaattggggcttgatatatctgaactggagaagaaaatcatgtctgagatgattagaccagagagggctttgttgtatttggttcctggaaggctggttagagtgagggatggttcaacagactggggatggggtgtggttgtaaatgtagtgaagaaacctccagcatctgggactctccctcctgcattaagtgcatcgcgcagcaacaactatacagtcgataccttgcttcactgctcctctaattccagcgagaatggatcacgttcaaagccatgccctcctcgcccaggggaaaaaggtgaaatgcatgtggtgcctgtaccattgcctttagtatctggtctaagcagtgttagaatcaacattcctcctgatctacgaccacctgaagcaagacagaatatactttctgcagtgcaagaactaggaaagcgctacccccaaggtcttccgaaactacatccaatcaatgacatgggtattcaagaacctgaactagttgacttggtacataaacttgaagaccttgagcagaaacaatgctctcaccgacttcataagtccggtcaaagtgaacaggaactatcatggtaccaaaaaaaagcagatctgaatactgaaattcagcaactcaagtcaaagatgcgggattcacagctacaaaaatttagagatgaacttaggaaccggtcccgtgttctgaagatgctggggcatattgatgctgacggtgttctccagttaaaaggacgtgctgcctgtctaatagacacaggggatgaactgcttatcactgaacttatgttcaatggtacatttaatgatcttgaccatcatcaagttgcctcccttgctagctgctttgtaccttgtgataaatcaagtgagcagatacgcctaagaaatgaactttctaggccgatgatgcagcttcaggaggctgcaagaaaaatagctgaggtacaacgagaatgcaaactggaagtaaatgtggaggaatatgttgaatcaacctgcagaccctaccttatggatgtcatatactgttggtcaaggggagccacctttgcggaggtgatggaaatgaccgacatatttgaaggaagtgtcataagacttgctagaaggctggatgaatttctgaatcagttgagagctgctgctgaagccgtggggggaggttaaccttgaagaagaagttcaagaatgcaagtgagagtttgcgtcggggtatcatgttctccaactcactgtatctgtaattagcactttagcagcaatagtaccatatgttagccgacaaatgctagcggcggggttttgacctgaagcaaaatatgcgttgtctgtaggagagggcattgccagatagcctctgtaaccttgtactctagttcctagactaaattaatttgttatcatgtatacatcagggtaggcgtgatgctgtcttaagaaatccaagtgataccaatttaagggcctgttattgaatagtgagggattctagctccctcaatcctctctgttactcttgcttccaaacaaatcctaaaggtctaatatcactgttggttatgctctaaagtttttttttggatgattgaaactgtatcgaagaatcgccataaatatatttgctcaagaactgtaaaaggctg

SEQ ID NO: 72071 - DNA, 1980 bp, Zea Mays
aattgatcactgatttccttgctatctattgttcttgctatttcaattgcagatggaaatgagtgttatcaaggacatggtgttaggcaaaccagcacctctagtcagtactttccgtctgagctactacactattctgaacttaatgagccgtgtggagggccaatttaccgctgagcatgtgattaggcattcattccatgaatttcagtatgagaaggcattgccagaaatagctcaaaagattacacggttggagaatgaagctaccttgcttgattcttctggcgagactgatcttgctgaatatcacaaattggggcttgatatatctgaactggagaagaaaatcatgtctgagatgattagaccagagagggctttgttgtatttggttcctggaaggctggttagagtgagggatggttcaacagactggggatggggtgtggttgtaaatgtagtgaagaaacctccagcatctgggactctccctcctgcattaagtgcatcgcgcagcaacaactatacagtcgataccttgcttcactgctcctctaattccagcgagaatggatcacgttcaaagccatgccctcctcgcccaggggaaaaaggtgaaatgcatgtggtgcctgtaccattgcctttagtatctggtctaagcagtgttagaatcaacattcctcctgatctacgaccacctgaagcaagacagaatatactttctgcagtgcaagaactaggaaagcgctacccccaaggtcttccgaaactacatccaatcaatgacatgggtattcaagaacctgaactagttgacttggtacataaacttgaagaccttgagcagaaacaatgctctcaccgacttcataagtccggtcaaagtgaacaggaactatcatggtaccaaaaaaaagcagatctgaatactgaaattcagcaactcaagtcaaagatgcgggattcacagctacaaaaatttagagatgaacttaggaaccggtcccgtgttctgaagatgctggggcatattgatgctgacggtgttctccagttaaaaggacgtgctgcctgtctaatagacacaggggatgaactgcttatcactgaacttatgttcaatggtacatttaatgatcttgaccatcatcaagttgcctcccttgctagctgctttgtaccttgtgataaatcaagtgagcagatacgcctaagaaatgaactttctaggccgatgatgcagcttcaggaggctgcaagaaaaatagctgaggtacaacgagaatgcaaactggaagtaaatgtggaggaatatgttgaatcaacctgcagaccctaccttatggatgtcatatactgttggtcaaggggagccacctttgcggaggtgatggaaatgaccgacatatttgaaggaagtgtcataagacttgctagaaggctggatgaatttctgaatcagttgagagctgctgctgaagccgtggggggaggttaaccttgaagaagaagttcaagaatgcaagtgagagtttgcgtcggggtatcatgttctccaactcactgtatctgtaattagcactttagcagcaatagtaccatatgttagccgacaaatgctagcggcggggttttgacctgaagcaaaatatgcgttgtctgtaggagagggcattgccagatagcctctgtaaccttgtactctagttcctagactaaattaatttgttatcatgtatacatcagggtaggcgtgatgctgtcttaagaaatccaagtgataccaatttaagggcctgttattgaatagtgagggattctagctccctcaatcctctctgttactcttgcttccaaacaaatcctaaaggtctaatatcactgttggttatgctctaaagtttttttttggatgattgaaactgtatcgaagaatcgccataaatatatttgctcaagaactgtaaaaggctg

SEQ ID NO: 72072 - DNA, 1255 bp, Zea Mays
tttctgtcttgcaagaactaggaaagcgctacccccaaggtcttccgaaactacatccaatcaatgacatgggtattcaagaacctgaactagttgacttggtacataaacttgaagaccttgagcagaaacaatgctctcaccgacttcataagtccggtcaaagtgaacaggaactatcatggtaccaaaaaaaagcagatctgaatactgaaattcagcaactcaagtcaaagatgcgggattcacagctacaaaaatttagagatgaacttaggaaccggtcccgtgttctgaagatgctggggcatattgatgctgacggtgttctccagttaaaaggacgtgctgcctgtctaatagacacaggggatgaactgcttatcactgaacttatgttcaatggtacatttaatgatcttgaccatcatcaagttgcctcccttgctagctgctttgtaccttgtgataaatcaagtgagcagatacgcctaagaaatgaactttctaggccgatgatgcagcttcaggaggctgcaagaaaaatagctgaggtacaacgagaatgcaaactggaagtaaatgtggaggaatatgttgaatcaacctgcagaccctaccttatggatgtcatatactgttggtcaaggggagccacctttgcggaggtgatggaaatgaccgacatatttgaaggaagtgtcataagacttgctagaaggctggatgaatttctgaatcagttgagagctgctgctgaagccgtggggggaggttaaccttgaagaagaagttcaagaatgcaagtgagagtttgcgtcggggtatcatgttctccaactcactgtatctgtaattagcactttagcagcaatagtaccatatgttagccgacaaatgctagcggcggggttttgacctgaagcaaaatatgcgttgtctgtaggagagggcattgccagatagcctctgtaaccttgtactctagttcctagactaaattaatttgttatcatgtatacatcagggtaggcgtgatgctgtcttaagaaatccaagtgataccaatttaagggcctgttattgaatagtgagggattctagctccctcaatcctctctgttactcttgcttccaaacaaatcctaaaggtctaatatcactgttggttatgctctaaagtttttttttggatgattgaaactgtatcgaagaatcgccataaatatatttgctcaagaactgtaaaaggctg

SEQ ID NO: 72073 - DNA, 710 bp, Zea Mays
atgccggccatgaagatgtcgtcgtcgtggaaggaggaggaggaggagcaggaggacagcggggacgcgccgctcgtgctgttctcggcttcctcttcctccagctgcatctcctggtcccggcagtcggcgctgcagaatgccttctcgccgctgcaacaccacgcaaccaagattggtgagaatgtggacgaattatacgatggcgagtgttcagttcagctggatggaatggaagggcctgtgctctgctaacggacggttcagttttcgtttgtgctggattggtgggtcggaacgattattgtttctctaatttatataaactttgattaactggaacaatttcgggtgcaatccgacgtaatcgaacaaggccttactcagcttggaaccgcctctaataaaaaaattgatggtatttggtaatgatgcagcatgttgtctagctcgattttaacattttttttcattctccgaaaaaaaactagcattgctgtcagctgaacactgcatgaatcagtttggtgcgcagttctacttcactcggatcaacgtctcattctgataaagccagtatctcttctctgaaacccttccccccgtcaggtcaggtcagattagattagataatggcataccggtagatgtaaatgtcgttgccgtcgagcttcttgttgcaggcgaagcaggagctgaggaaaccatcg

SEQ ID NO: 72074 - DNA, 295 bp, Zea Mays
aaaccaggtccatttataccgcgaattaaccctaaccgccagccgcgccttttcctctcctcccggtgccagccgccgtgcgcgctctcttcgccctacggaaggtgcggaggtgccgagatcttgctcgatctcttcggcggcgaagagcgccaaccagatccgccctgtttgttggtgtggcgccggagcaggagtaggtcgcggccacagaaccctaggagcgaccatggcgactttcgcgaagcctgagaacgcgctcaagagagccgaaggcacttgcgaattacgataa

SEQ ID NO: 72075 - DNA, 2618 bp, Zea Mays
aagcagacaagcgtcctgaggacctcatgctcagtttgttagtggggagaaagagaaggaccgatcagataaagaggtgtaactccatggtttaagttcttctgagagacatacaggactgttctagagatactgaggaacaattcaaagcttgaagcgttatatgctatggctgctcatagggcttttcaattctgtaaacagtataagaggacaactgaattccgtaggttgtgtgagataatcagaaatcatctcgccaatctgaacaaatatcgcgatcaaagggatcgtcctgatctgactgcacctgaaagtttacaactatatcttgatacacgtgttgagcagcttaaagttgctacagagctttgcctttggcaggaagccttccgatccgtggaagatatccatggtctgatgagcatggtgaagaaaatgccaaaaccttctatcttggtggtgtattatgcaaagctgaccgaaatcttctgggtatctgatagccacctttatcatgcgtatgcgtggctcaagcttttcaacctgcaaaagaactacaataaaaacttgtctcagaaggatctacaattaatagcatcttccgtcttacttgctgcactatctgtggcaccttatgacaaaaaatatggtgcatctcatcttgagacagagaatgagaaggagcgtaacatgaggatggccaaccttgttaacttctcgcttgattccaagcgtgaaaatagggaaatgccttcaagagcatctcttctatctgagttggcctccaaaggagtcctttcatgtgcttcccaagaagtgcgagatttgtacaaccttttggaacatgagtttctacctctggaccttgcatcaaaagtgcagccacttctttcgaagatttcaaagatgggagggaagctttcatcagcttcttctgttccagaggttaagttatctcagtatatttcagcattggagaagctgacagcattgagagtgttacaacaggcctcttgtattttccagtcgatgaagattgatatgctctcaagaatgattccgttctttgacttttttgttgtggagaagatttctgttgttgctgtgagacgcaattttgttgctataaaagttaaccatttatcaggagctgttcattttggtactgtggacatagaatctgatggcttaagtgatcaccttagtgttgttgcggattcattaaataaagcgaagattcatatttgtccaccagttaaaaagccatctaaactcggtgaaagttttattagtttggctggaatagtggagaatgagcataagaggcttcttgcaaggaagtccataattgaaaaacgcaaagaagagcttgagcgtcaaatattggagaaggaaaaagaagaagaaaaaaagagaatgagcagtcaaaagaaaaccgcagatgaggaaagggtgaggcttctcaatgaacagagacagagggagcaggaccggattcgtagagagatagaggaaaaaaataaagccgaagcaaaaaagttgctagaagacttgaagaaggcagggaaaaaacatgtcgttgttgaaggggagcttactaaggaggccataatggaattgacacgaaatgaacagttgaaggagcgccacgaaatggagaaaaaactgcagaagtttgcaaaaacaatggattatctggaaagagcaaaaaggcaggaagaggcaccactgattgagcaagctttccaaaaacgtcttcaggaagagaagatccttcacgagcaagagcagcttcgggagattgaactcagcaaacaacaccatgctggcgacttgcaagagaaaaacagactttctcgaatgttggaacacaagaatgctttgcaggagagaattgtccaacttcgtgaagctgagtttggtcgtctgaagaaagagagagacgaacggttcagtcagttgatatcatcgagaaagcgtgaaagggagagagtgaggaagttgatgtattatctgaaccgggaggaacagcggattgaaatgcttcaggaggaagagagaagaggctgaaaggaaagctaatcttgatgctattgctgaaaagcagcgattgagagagatagagttggaggagaaggcaaaggcgaatagggagaagctcttaaaggggtctgaggcaggtgctgctccctcttctaataaatatattcccaaatttaaaaggcaagatggtcttcctgcacgacaggatgcacccccaccccgccaagatggccctcctccgtctactgaccgctggcgtccatcaagatattcctcaacctcttcgtcaacctgggggcgggcacataactgatccttttttttttattttgctgactacatttataattttggagcttgtctcataggctatcgcaccttaccgttcactatactccatgcatattgtcggtagttgctgactgcattttatgatgtttttattggttcatatatttgttctcatgtctttggatgttgatgtctggcacgagttccgttttgcagttgggttgtgatacggtttggttgtctaactataaagtcgtcaattatcgtatcttgtacccaaa

SEQ ID NO: 72076 - DNA, 2494 bp, Zea Mays
aagcagacaagcgtcctgaggacctcatgctcagtttgttagtggggagaaagagaaggaccgatcagataaagaggtgtaactccatggtttaagttcttctgagagacatacaggactgttctagagatactgaggaacaattcaaagcttgaagcgttatatgctatggctgctcatagggcttttcaattctgtaaacagtataagaggacaactgaattccgtaggttgtgtgagataatcagaaatcatctcgccaatctgaacaaatatcgcgatcaaagggatcgtcctgatctgactgcacctgaaagtttacaactatatcttgatacacgtgttgagcagcttaaagttgctacagagctttgcctttggcaggaagccttccgatccgtggaagatatccatggtctgatgagcatggtgaagaaaatgccaaaaccttctatcttggtggtgtattatgcaaagctgaccgaaatcttctgggtatctgatagccacctttatcatgcgtatgcgtggctcaagcttttcaacctgcaaaagaactacaataaaaacttgtctcagaaggatctacaattaatagcatcttccgtcttacttgctgcactatctgtggcaccttatgacaaaaaatatggtgcatctcatcttgagacagagaatgagaaggagcgtaacatgaggatggccaaccttgttaacttctcgcttgattccaagcgtgaaaatagggaaatgccttcaagagcatctcttctatctgagttggcctccaaaggagtcctttcatgtgcttcccaagaagtgcgagatttgtacaaccttttggaacatgagtttctacctctggaccttgcatcaaaagtgcagccacttctttcgaagatttcaaagatgggagggaagctttcatcagcttcttctgttccagaggttaagttatctcagtatatttcagcattggagaagctgacagcattgagagtgttacaacaggacatagaatctgatggcttaagtgatcaccttagtgttgttgcggattcattaaataaagcgaagattcatatttgtccaccagttaaaaagccatctaaactcggtgaaagttttattagtttggctggaatagtggagaatgagcataagaggcttcttgcaaggaagtccataattgaaaaacgcaaagaagagcttgagcgtcaaatattggagaaggaaaaagaagaagaaaaaaagagaatgagcagtcaaaagaaaaccgcagatgaggaaagggtgaggcttctcaatgaacagagacagagggagcaggaccggattcgtagagagatagaggaaaaaaataaagccgaagcaaaaaagttgctagaagacttgaagaaggcagggaaaaaacatgtcgttgttgaaggggagcttactaaggaggccataatggaattgacacgaaatgaacagttgaaggagcgccacgaaatggagaaaaaactgcagaagtttgcaaaaacaatggattatctggaaagagcaaaaaggcaggaagaggcaccactgattgagcaagctttccaaaaacgtcttcaggaagagaagatccttcacgagcaagagcagcttcgggagattgaactcagcaaacaacaccatgctggcgacttgcaagagaaaaacagactttctcgaatgttggaacacaagaatgctttgcaggagagaattgtccaacttcgtgaagctgagtttggtcgtctgaagaaagagagagacgaacggttcagtcagttgatatcatcgagaaagcgtgaaagggagagagtgaggaagttgatgtattatctgaaccgggaggaacagcggattgaaatgcttcgtgaggaagaggaagctagaaaacatgaagaggaagagaggaggaagagagaagaggctgaaaggaaagctaatcttgatgctattgctgaaaagcagcgattgagagagatagagttggaggagaaggcaaaggcgaatagggagaagctcttaaaggggtctgaggcaggtgctgctccctcttctaataaatatattcccaaatttaaaaggcaagatggtcttcctgcacgacaggatgcacccccaccccgccaagatggccctcctccgtctactgaccgctggcgtccatcaagatattcctcaacctcttcgtcaacctgggggcgggcacataactgatccttttttttttattttgctgactacatttataattttggagcttgtctcataggctatcgcaccttaccgttcactatactccatgcatattgtcggtagttgctgactgcattttatgatgtttttattggttcatatatttgttctcatgtctttggatgttgatgtctggcacgagttccgttttgcagttgggttgtgatacggtttggttgtctaactataaagtcgtcaattatcgtatcttgtacccaaa

SEQ ID NO: 72077 - DNA, 2648 bp, Zea Mays
aagcagacaagcgtcctgaggacctcatgctcagtttgttagtggggagaaagagaaggaccgatcagataaagaggtgtaactccatggtttaagttcttctgagagacatacaggactgttctagagatactgaggaacaattcaaagcttgaagcgttatatgctatggctgctcatagggcttttcaattctgtaaacagtataagaggacaactgaattccgtaggttgtgtgagataatcagaaatcatctcgccaatctgaacaaatatcgcgatcaaagggatcgtcctgatctgactgcacctgaaagtttacaactatatcttgatacacgtgttgagcagcttaaagttgctacagagctttgcctttggcaggaagccttccgatccgtggaagatatccatggtctgatgagcatggtgaagaaaatgccaaaaccttctatcttggtggtgtattatgcaaagctgaccgaaatcttctgggtatctgatagccacctttatcatgcgtatgcgtggctcaagcttttcaacctgcaaaagaactacaataaaaacttgtctcagaaggatctacaattaatagcatcttccgtcttacttgctgcactatctgtggcaccttatgacaaaaaatatggtgcatctcatcttgagacagagaatgagaaggagcgtaacatgaggatggccaaccttgttaacttctcgcttgattccaagcgtgaaaatagggaaatgccttcaagagcatctcttctatctgagttggcctccaaaggagtcctttcatgtgcttcccaagaagtgcgagatttgtacaaccttttggaacatgagtttctacctctggaccttgcatcaaaagtgcagccacttctttcgaagatttcaaagatgggagggaagctttcatcagcttcttctgttccagaggttaagttatctcagtatatttcagcattggagaagctgacagcattgagagtgttacaacaggcctcttgtattttccagtcgatgaagattgatatgctctcaagaatgattccgttctttgacttttttgttgtggagaagatttctgttgttgctgtgagacgcaattttgttgctataaaagttaaccatttatcaggagctgttcattttggacatagaatctgatggcttaagtgatcaccttagtgttgttgcggattcattaaataaagcgaagattcatatttgtccaccagttaaaaagccatctaaactcggtgaaagttttattagtttggctggaatagtggagaatgagcataagaggcttcttgcaaggaagtccataattgaaaaacgcaaagaagagcttgagcgtcaaatattggagaaggaaaaagaagaagaaaaaaagagaatgagcagtcaaaagaaaaccgcagatgaggaaagggtgaggcttctcaatgaacagagacagagggagcaggaccggattcgtagagagatagaggaaaaaaataaagccgaagcaaaaaagttgctagaagacttgaagaaggcagggaaaaaacatgtcgttgttgaaggggagcttactaaggaggccataatggaattgacacgaaatgaacagttgaaggagcgccacgaaatggagaaaaaactgcagaagtttgcaaaaacaatggattatctggaaagagcaaaaaggcaggaagaggcaccactgattgagcaagctttccaaaaacgtcttcaggaagagaagatccttcacgagcaagagcagcttcgggagattgaactcagcaaacaacaccatgctggcgacttgcaagagaaaaacagactttctcgaatgttggaacacaagaatgctttgcaggagagaattgtccaacttcgtgaagctgagtttggtcgtctgaagaaagagagagacgaacggttcagtcagttgatatcatcgagaaagcgtgaaagggagagagtgaggaagttgatgtattatctgaaccgggaggaacagcggattgaaatgcttcgtgaggaagaggaagctagaaaacatgaagaggaagagaggaggaagagagaagaggctgaaaggaaagctaatcttgatgctattgctgaaaagcagcgattgagagagatagagttggaggagaaggcaaaggcgaatagggagaagctcttaaaggggtctgaggcaggtgctgctccctcttctaataaatatattcccaaatttaaaaggcaagatggtcttcctgcacgacaggatgcacccccaccccgccaagatggccctcctccgtctactgaccgctggcgtccatcaagatattcctcaacctcttcgtcaacctgggggcgggcacataactgatccttttttttttattttgctgactacatttataattttggagcttgtctcataggctatcgcaccttaccgttcactatactccatgcatattgtcggtagttgctgactgcattttatgatgtttttattggttcatatatttgttctcatgtctttggatgttgatgtctggcacgagttccgttttgcagttgggttgtgatacggtttggttgtctaactataaagtcgtcaattatcgtatcttgtacccaaa

SEQ ID NO: 72078 - DNA, 780 bp, Zea Mays
agaatgctttgcaggagagaattgtccaacttcgtgaagctgagtttggtcgtctgaagaaagagagagacgaacggttcagtcagttgatatcatcgagaaagcgtgaaagggagagagtgaggaagttgatgtattatctgaaccgggaggaacagcggattgaaatgcttcgtgaggaagaggaagctagaaaacatgaagaggaagagaggaggaagagagaagaggctgaaaggaaagctaatcttgatgctattgctgaaaagcagcgattgagagagatagagttggaggagaaggcaaaggcgaatagggagaagctcttaaaggggtctgaggcaggtgctgctccctcttctaataaatatattcccaaatttaaaaggcaagatggtcttcctgcacgacaggatgcacccccaccccgccaagatggccctcctccgtctactgaccgctggcgtccatcaagatattcctcaacctcttcgtcaacctgggggcgggcacataactgatccttttttttttattttgctgactacatttataattttggagcttgtctcataggctatcgcaccttaccgttcactatactccatgcatattgtcggtagttgctgactgcattttatgatgtttttattggttcatatatttgttctcatgtctttggatgttgatgtctggcacgagttccgttttgcagttgggttgtgatacggtttggttgtctaactataaagtcgtcaattatcgtatcttgtacccaaa

SEQ ID NO: 72079 - DNA, 695 bp, Zea Mays
agaatgctttgcaggagagaattgtccaacttcgtgaagctgagtttggtcgtctgaagaaagagagagacgaacggttcagtcagttgatatcatcgagaaagcgtgaaagggagagaaggaagagaggaggaagagagaagaggctgaaaggaaagctaatcttgatgctattgctgaaaagcagcgattgagagagatagagttggaggagaaggcaaaggcgaatagggagaagctcttaaaggggtctgaggcaggtgctgctccctcttctaataaatatattcccaaatttaaaaggcaagatggtcttcctgcacgacaggatgcacccccaccccgccaagatggccctcctccgtctactgaccgctggcgtccatcaagatattcctcaacctcttcgtcaacctgggggcgggcacataactgatccttttttttttattttgctgactacatttataattttggagcttgtctcataggctatcgcaccttaccgttcactatactccatgcatattgtcggtagttgctgactgcattttatgatgtttttattggttcatatatttgttctcatgtctttggatgttgatgtctggcacgagttccgttttgcagttgggttgtgatacggtttggttgtctaactataaagtcgtcaattatcgtatcttgtacccaaa

SEQ ID NO: 72080 - DNA, 980 bp, Zea Mays
caccgatttctcacagctttaccagccttgctgtcagcgaagaccatggaacatgttaataatataattgttttacccatctgatcgcatacaacaagaggcgtttgcatctcgatgacttgagttgcccctctgcccatctcaacaaacatcaagggccagggcatggtagcaaaagaacaacaaatccacatccccccatgtctctttaggttagctttcacattgcttataaacaaactctatggtgtctaaatcctacaaagaatggatcaagaacaccttttatatatacaacagaacaccgtttgcaactgcacatgatcagcgggggatgcggaagtacgcatctatataacctctgtagttccttcttttgcctggtcaataaagaaaggcctttgcccgcactcttccttttatcaactcccaaaaaatcgagttgtaaaaagcttcccagaaggaccctcagttacaacaggggtcatgactgccaaaatatgtttgggtcattgctatataccgcacggtcttgaatctctaaattagcaacgtgccaatcaacaagccttgcttgaatgcatttcaacagcatgagtccggttgggaagagccaccaaccgctttcatccctggaaagatttcatggcaagtggcttaactgcatataacttttagaagatgctagtgaacagccgacagaaattatgcttacgttcccaggttccagggctgcacgctcgggtgtgttttggttgataacttataatgtacaaaaccacatatgaaagccacaacctagatattaacaagcacaggaaggttatagaggcgcaacacttgatagaaaaaaaaaactcattcaattgcagccattacgtgtgatagataccgatataacattgaaatgtaggtgggtgaagaatacttacaacattgaccagtgaagttatgttccacaatgcatacacacgagcaag

SEQ ID NO: 72081 - DNA, 100 bp, Zea Mays
caaagctctagcggtagcttgcaacttcctggagagagtgacaaaaggacagggacctggcgccaccgaactccaagccagagccacagtatcatgaaag

SEQ ID NO: 72082 - DNA, 205 bp, Zea Mays
aacgcgactccagagcaaggggacagcaactttggcacgatttcttacaaaaacatttgtccacagtggttgatttggaaactctaaaagaagagtatctgtctgtgtactcaaattgttgttgctgacaataagactctttggtactgcttcataaagagttccagcagctcctgcattatctggacagcctgaactccttccc

SEQ ID NO: 72083 - DNA, 1613 bp, Zea Mays
cattaaaacttcctctaacctgccacgaaaaagtccgattagttaacgcgatccagcgctgtatgagtgtatgtatataagcggcccccgcgcgcgctgcgagcgacaagcatcgtcatcgcccccgtaagagtgaggcccagaaatcgaggggcaaaaaggagagggagagaccgaatacagccgcttctgttctgtgagggggaaaaaaagagaaagagagggacagagagagagagagggagtgccaggccagctgtggggtgtgtgtgtgcctgtgtgggggaactgctggggatggagagcgagatggcggacgcgcccgccgaggcggcggtggggtccaccctcaccatggagcgcgtcgccgccgcgaagaagttcatcgagaaccactaccgttcgcagatgaagaccatccaggagcgcaaggagaggtactgtaccgtgccggccgtgctgatcccgtgatccggtcccccccactcgcccgcggcgccggccgccaattggagctgctgctcgcgcgcggctggggctagatctcgcgcgccgcgacctcgatcgaggggcctgggctggggttagtcgtcggcgtcgtccgagctcgcgccgctggagcttgcccgtcggggcgcgccagcttttcgctgcctgctcgtgggacgaagggtaccgtgtattagtacgagtatactagcaccctggtggccatggcttcagaagttctagagtagcctgtggtgtagtgcgaagttataggttctggtgaattgacacctctgcctgcaatctgaggtccggcgttgcatggtgtatggatggttgatagttccagctcggggaggaccggagacctggttgcacttgctattttcgaatgcttagcgtctgctaaacgcatcaggcaagattagttcaaattgcttgcatgtagtagctttttttggcgctaaaaactgttacgctgagcttctagtgctccccgctgtttgacttggatgcccatagcattgttgtcgagaagcttgtttgaggacaattgagcgaaaaacaatgcggtgattccgcatctgcctttgacatagagttgctcaagtggcgcaagagtttgtcgcaccctcgcacgcgctccttttgtttccccccatttttttggtttggtagcgtgtagtcggagttgtttgtgctggtttcgaatcactatcagactcagtcctggtgtaactataacatgtttcctgctgcttgtgaactgagattggactgctgggtattcttctcatggtctttccattaataggcagtggatgacgatgcatgctctctaaaacacacttgttctacttactaatcatgctataaattatcttatagcaataacccattaattacatcacaatatttccagctttggcatacatttccctttttacctatgggaatagttgatatctgtttccctttttgttgacaaggaaacaatgcatcagatgccagctgtatagatactttcctgaacattggacgcatatgtaatcaagtagaattattttctactccctccgtcccaaaatataattcgttttagacaaagtatacatttcattcat

SEQ ID NO: 72084 - DNA, 1828 bp, Zea Mays
ttttttttatcagaatcactctaatgtttttcagagaccatttaaagattaactaatcaacaccctgctgtattgtatgcgataaaatcaaaattattctgatgtttttaaaatgaccataaaagaacgatttccttccattatttgagagttgtgttaatggagttctttattattgcctctattaggtggaacatgttagagccgaaagaaacttgttggcggaagttgctagtcactgcattgtgaagctttactattctttccaagacaccgagtatctttacctaattatggagtacctccctggtggtgatatcatgacccttctcatgagagaggataccttgactgaacatgtagcgcgattctacattgctgagacaattcttgctatccaatccatccataaacataactacatccacagagatattaagcctgataatttgcttctagataaaaatggtcacatgaagctgtcagattttgggctgtcaaatggtagaagatggagaagtcaacacgaacagcttcagcactggcagatgaacagaagaaaactggcattctcaactgtcgggacaccgggattatattgctccagaggttctgctgaagaagggatatggaatggaatgtgattggtggtctctaggcgcgatcatgtatgagatgctagttgggtatccaccattttatgccgatgatccaataactacatgccgaaagattgtgcactggagaaaccatttgaagtttcctgaggatgcaaagttgtcaaatgaagcaagagatctcatttgccggttattatgtgatgttgaccacaggattggcagtgcaggggcagatcaaataaaggcacatccttggttccaaggagttgcatgggataaactttatgaaatggaagcagcatttaagcctcaagtaaatgatgagctggatacacagaatttcatgaaatttgaggaactggaaaatcctccagccaaaacaggctctgggccttcaagaaagatgatgctgaactccaaagatctgagctttgtggggtatacatacaaaaactttgatgcagtgaaagcaataaaaatttcagatctgcaaaggaattcatctctaacaaggccttccattggttcgatattcggtccatcaggcatggattctcccatggaaccaaacggaagggacacacacatgcacacagtttcatctggtgacccaatgattccctaaccttcagtgccgtctgtcctcagcaaatttccgaactaaatcagcgtgcaaacgccagggtgatgtggctccagctggacaacatgcttatttttagccaggtctctgctctctttatcgtgggcaagcggtttgtagaaatccaccaaagtttctagttgtaaaatagtatgccacagacttcaacaaaggtcccatgcattattggctcatcagacatgggggcagtttttttttggagaaattgcaccttgcggctggctgcccaggttggcagagcaaattgcggccttctcttgtggcagttcccggtctgcaggaaagggaaatacgacggtgttgttgcagcaggaattctcatggttagtgtcgttgttggtgtttgatatgtatcaggaattttcacatttgaagtagggtttctgttagcagagttgtagctattgacaagcaacatccttttacggagttgctttttttcgttgatgtatggaaaacgagacattgtagaaatcgaagttcgatctagccttgtatgctgcttatctgattcaacgtgtttctcagtatttttgtctaaaaa

SEQ ID NO: 72085 - DNA, 1157 bp, Zea Mays
aaattattgaagttgcaaatcttagccataaaagatggtttctgcagttccttggaaacatattgtgcactggagaaaccatttgaagtttcctgaggatgcaaagttgtcaaatgaagcaagagatctcatttgccggttattatgtgatgttgaccacaggattggcagtgcaggggcagatcaaataaaggcacatccttggttccaaggagttgcatgggataaactttatgaaatggaagcagcatttaagcctcaagtaaatgatgagctggatacacagaatttcatgaaatttgaggaactggaaaatcctccagccaaaacaggctctgggccttcaagaaagatgatgctgaactccaaagatctgagctttgtggggtatacatacaaaaactttgatgcagtgaaagcaataaaaatttcagatctgcaaaggaattcatctctaacaaggccttccattggttcgatattcggtccatcaggcatggattctcccatggaaccaaacggaagggacacacacatgcacacagtttcatctggtgacccaatgattccctaaccttcagtgccgtctgtcctcagcaaatttccgaactaaatcagcgtgcaaacgccagggtgatgtggctccagctggacaacatgcttatttttagccaggtctctgctctctttatcgtgggcaagcggtttgtagaaatccaccaaagtttctagttgtaaaatagtatgccacagacttcaacaaaggtcccatgcattattggctcatcagacatgggggcagtttttttttggagaaattgcaccttgcggctggctgcccaggttggcagagcaaattgcggccttctcttgtggcagttcccggtctgcaggaaagggaaatacgacggtgttgttgcagcaggaattctcatggttagtgtcgttgttggtgtttgatatgtatcaggaattttcacatttgaagtagggtttctgttagcagagttgtagctattgacaagcaacatccttttacggagttgctttttttcgttgatgtatggaaaacgagacattgtagaaatcgaagttcgatctagccttgtatgctgcttatctgattcaacgtgtttctcagtatttttgtctaaaaa

SEQ ID NO: 72086 - DNA, 2249 bp, Zea Mays
cctgcccgcgctcttcttcttgtgttgcctgtcgcctcggggcggttgaaaattaaccgaagcggacaccgcgacgaggccgcggcggacacacagccggaccggacaccagcgccagcgtagcggcagcggcacgcccgaggaagcaagcaagccactacgcccctgcgtcgtcgcgtcggtgcccaaggggcagccgccgggagggagggaggggcatcgaagcggaggccacggcggtcgggatggtggtggcgagaaaaccgcagcagcagcccgcaggcgtcgcccgccggcgcggtggcggcgtcagggtggggcccgcgaggctcgagggcctccccgcggcgtgggcgggcgccgccgccgccgccgtcaaggtcaagtggcccgcgcccgggggcgcgctgtcgcagatgctgacggggcggtgggcgcgcggggtgaccgccgtcgaggccgtcggcgccggcgggaccgtccgctgggagccgcgcgacggcaaccggttcaggctcgacgacgtcgtcggccccgccggccggccggagcgcggggtcttcttctccgtcctctatggattccaagaacaaggccggggcaacaaggagctggtgaggctggaggagatcgggacagccatgataagcctggaggagtgctgctgggagatgcagctgcagcagcacgaccaccagctggtggctgtccccgtcagggtcaggaaggacggatgggcaagcgatgccatgctttatgtggacgtggagctcgtggacgcgaacacacgcccggacgtcgatagggcagtctcgttcagggagaagccgagaacgtacatggcgcctccgccgacaatgcgaggtagccgcaagagcttggagtcagcgacgtgccatgatgtccttgacctgaagcagctgcttgatctggctgagaaggaaggccgggtggccgtgtatggcaacataaggagctccgacaccagcagcgtgagcagcactagcagcagcagcagcacgattagcgtcagcagtgctagcaccagcggcggcgcgagcccggaaccggcctcgacgtcgaagcgccggttcctgccatggacgaggaggagcagggacttcgacaagaggaccgccgagtcgctctcccaagaactgcccacaaagtgcacggacgacggtccgggtccggccggcggctgggagacgcgcgagttcacgagcagggacgccgagacgaggctgaggacgccggtgttcttcgcgtccatcgaccagcgcgacggcagcgctgggggggagggcgcgtgcgcggcgctcgccgccgtcctcgcggcggcgctccacgccggccacccggcgatgcccacccgcccggagctggacgcgctcatccgggacggctcgtcggagtggaggcggctctgcgacgacgaggcgcgcgcggcgcggttccccaaccggcacctcgacctggacaccgtgctggcgtcccgggcgtggcccatcgcggtgcggcacgacagggccttcgtcggcttcttccagccggagagcttcgcgtcgctgtccggcgccatgtcgttcgacgacatctggcgcgagatcgccggcggcggcggacgtgggcgcgggccgggcggccgcgcggacgtgtacatcgtcagctggaacgaccacttcttcgcgctcaaggtggagagcgactgctactacgtcgtcgacacgctcggcgagaggctgcacgagggctgcgacaaggcctacatgctgaggttcgacggctcgtcggagatgcgggccgaaggcaccgaagaggtggtcgtcgccgggaaggaatgctgcagggagttcatcaagaggttcctggccgccatcccgctgagggaggagctggagatcgagaaaaagggcggcagcggcatcgacggtggcggcgcgccgcaccagcggctgcagatcgagttccacttcacagcctttacaagacgacaatagatgatgagttggcgatccgacagcagttgggggatgttccttcctcctccctgatcacagcatcatactaaccttgtgtaaattcgtctgtatatctgtatacagtttacaagataaaaatttacagggtaggatttggttctcgtttcacaattttagataggaaacaaaacatgaagaggaataccattttgtaagcgagctcagtattacatgattttgcttctgttgaatgatgactcaggcagg

SEQ ID NO: 72087 - DNA, 1342 bp, Zea Mays
agcaaatgtccattttccttacgtaacttatcttccttatcctatctccatcgccccatttcctatcctcccagccgatcccctctccctcacggcgccctctcccatggccgtcggccctccccgccatggacgtcgctcttccttcctacaccgccatggcagtgcctccctgcagcagtccggtgaccgggccctccccttcccacgtcatgctggtgccatgtcttctccctcaccggccaacctcgccagccaccaggaaggtgtctccctctcggcagctcccatggccaccatcagccctagctgcgcttgccctggttccagcagctcgacgccagcccctctcaatcttccatcgctgccgctcagcttgtcccagatatattgatgttgacaattggaaatccatgtagcaaataaatgattttggaactagggacaggtcagagtctagagcatgttcattccacacattggaggtggattttcctcaattggagatattgacaaattggaaaaaatgtgacttgacctgtgctgcaacaaccttaaactaggaggggcttctaattcttcatctctaccaacagtcctctcctgttactttttaaaccaataactttttcaagtttgtgcagatgcacacatccttgagccaaaatagaaaaaaaatcatagaagagttctttggctgtcacgtgattcaagagtattaatgatatacaaaagtttgctttatggcaagtcaagtaaccaccaattttgggcaatgacagggatgtgcagtggtggtctcttaaaagaattttgtgttccagcgtagctatttccactgcaaactatcaaatcattacaaactggcattccatggcttccactagttgagtccccatgataaccaatccttgttatcatatacttcttcaagtttgacgtcagcaacgtggtcatggtgaccggcgggaggaacaccgggcgtgtaggagtgatcaagaactgggagaagcacaagggcagcttcgaggtcatcgacgtgctgcttggaggcttttgcatgctatttctagttttctcttatttgttgtacaagaaaacatagaatggaattcaaatttggtggtcgcaaaagtgtggagacttgaattcatataaagttaggcttaacattagtgcaaaaagttgtattttagttttgatttagagtacacttatgtatgccttgtttgacaatacttatttatgatatattgaatggtacctattgtaatcgtctattattgtaggatattcgagacagtttgataaatactttatgacttataatgtttgttttctc

SEQ ID NO: 72088 - DNA, 1073 bp, Zea Mays
caaatgtccattttccttacgtaacttatcttccttatcctatctccatcgccccatttcctatcctcccagccgatcccctctccctcacggcgccctctcccatggccgtcggccctccccgccatggacgtcgctcttccttcctacagatgttgacaattggaaatccatgtagcaaataaatgattttggaactagggacagacattggaggtggattttcctcaattggagatattgacaaattggaaaaaatgtgacttgacctgtgctgcaacaaccttaaactaggaggggcttctaattcttcatctctaccaacagtcctctcctgttactttttaaaccaataactttttcaagtttgtgcagatgcacacatccttgagccaaaatagaaaaaaaatcatagaagagttctttggctgtcacgtgattcaagagtattaatgatatacaaaagtttgctttatggcaagtcaagtaaccaccaattttgggcaatgacagggatgtgcagtggtggtctcttaaaagaattttgtgttccagcgtagctatttccactgcaaactatcaaatcattacaaactggcattccatggcttccactagttgagtccccatgataaccaatccttgttatcatatacttcttcaagtttgacgtcagcaacgtggtcatggtgaccggcgggaggaacaccgggcgtgtaggagtgatcaagaactgggagaagcacaagggcagcttcgaggtcatcgacgtgctgcttggaggcttttgcatgctatttctagttttctcttatttgttgtacaagaaaacatagaatggaattcaaatttggtggtcgcaaaagtgtggagacttgaattcatataaagttaggcttaacattagtgcaaaaagttgtattttagttttgatttagagtacacttatgtatgccttgtttgacaatacttatttatgatatattgaatggtacctattgtaatcgtctattattgtaggatattcgagacagtttgataaatactttatgacttataatgtttgttttctc

SEQ ID NO: 72089 - DNA, 1104 bp, Zea Mays
attttccttacgtaacttatcttccttatcctatctccatcgccccatttcctatcctcccagccgatcccctctccctcacggcgccctctcccatggccgtcggccctccccgccatggacgtcgctcttccttcctacagatgttgacaattggaaatccatgtagcaaataaatgattttggaactagggacagtaaagcaaggtttgtgacctggatttattgggtgctgtagacattggaggtggattttcctcaattggagatattgacaaattggaaaaaatgtgacttgacctgtgctgcaacaaccttaaactaggaggggcttctaattcttcatctctaccaacagtcctctcctgttactttttaaaccaataactttttcaagtttgtgcagatgcacacatccttgagccaaaatagaaaaaaaatcatagaagagttctttggctgtcacgtgattcaagagtattaatgatatacaaaagtttgctttatggcaagtcaagtaaccaccaattttgggcaatgacagggatgtgcagtggtggtctcttaaaagaattttgtgttccagcgtagctatttccactgcaaactatcaaatcattacaaactggcattccatggcttccactagttgagtccccatgataaccaatccttgttatcatatacttcttcaagtttgacgtcagcaacgtggtcatggtgaccggcgggaggaacaccgggcgtgtaggagtgatcaagaactgggagaagcacaagggcagcttcgaggtcatcgacgtgctgcttggaggcttttgcatgctatttctagttttctcttatttgttgtacaagaaaacatagaatggaattcaaatttggtggtcgcaaaagtgtggagacttgaattcatataaagttaggcttaacattagtgcaaaaagttgtattttagttttgatttagagtacacttatgtatgccttgtttgacaatacttatttatgatatattgaatggtacctattgtaatcgtctattattgtaggatattcgagacagtttgataaatactttatgacttataatgtttgttttctc

SEQ ID NO: 72090 - DNA, 941 bp, Zea Mays
attttccttacgtaacttatcttccttatcctatctccatcgccccatttcctatcctcccagccgatcccctctccctcacggcgccctctcccatggccgtcggccctccccgccatggacgtcgctcttccttcctacaccgccatggcagtgcctccctgcagcagtccggtgaccgggccctccccttcccacgtcatgctggtgccatgtcttctccctcaccggccaacctcgccagccaccaggaaggtgtctccctctcggcagctcccatggccaccatcagccctagctgcgcttgccctggttccagcagctcgacgccagcccctctcaatcttccatcgctgccgctcagcttgtcccagatatattggatgtgcagtggtggtctcttaaaagaattttgtgttccagcgtagctatttccactgcaaactatcaaatcattacaaactggcattccatggcttccactagttgagtccccatgataaccaatccttgttatcatatacttcttcaagtttgacgtcagcaacgtggtcatggtgaccggcgggaggaacaccgggcgtgtaggagtgatcaagaactgggagaagcacaagggcagcttcgaggtcatcgacgtgctgcttggaggcttttgcatgctatttctagttttctcttatttgttgtacaagaaaacatagaatggaattcaaatttggtggtcgcaaaagtgtggagacttgaattcatataaagttaggcttaacattagtgcaaaaagttgtattttagttttgatttagagtacacttatgtatgccttgtttgacaatacttatttatgatatattgaatggtacctattgtaatcgtctattattgtaggatattcgagacagtttgataaatactttatgacttataatgtttgttttctc

SEQ ID NO: 72091 - DNA, 1089 bp, Zea Mays
ttccttacgtaacttatcttccttatcctatctccatcgccccatttcctatcctcccagccgatcccctctccctcacggcgccctctcccatggccgtcggccctccccgccatggacgtcgctcttccttcctacagatgttgacaattggaaatccatgtagcaaataaatgattttggaactagggacaggtcagagtctagagcatgttcattccacacattggaggtggattttcctcaattggagatattgacaaattggaaaaaatgtgacttgacctgtgctgcaacaaccttaaactaggaggggcttctaattcttcatctctaccaacagtcctctcctgttactttttaaaccaataactttttcaagtttgtgcagatgcacacatccttgagccaaaatagaaaaaaaatcatagaagagttctttggctgtcacgtgattcaagagtattaatgatatacaaaagtttgctttatggcaagtcaagtaaccaccaattttgggcaatgacagggatgtgcagtggtggtctcttaaaagaattttgtgttccagcgtagctatttccactgcaaactatcaaatcattacaaactggcattccatggcttccactagttgagtccccatgataaccaatccttgttatcatatacttcttcaagtttgacgtcagcaacgtggtcatggtgaccggcgggaggaacaccgggcgtgtaggagtgatcaagaactgggagaagcacaagggcagcttcgaggtcatcgacgtgctgcttggaggcttttgcatgctatttctagttttctcttatttgttgtacaagaaaacatagaatggaattcaaatttggtggtcgcaaaagtgtggagacttgaattcatataaagttaggcttaacattagtgcaaaaagttgtattttagttttgatttagagtacacttatgtatgccttgtttgacaatacttatttatgatatattgaatggtacctattgtaatcgtctattattgtaggatattcgagacagtttgataaatactttatgacttataatgtttgttttctc

SEQ ID NO: 72092 - DNA, 744 bp, Zea Mays
acttatcttccttatcctatctccatcgccccatttcctatcctcccagccgatcccctctccctcacggcgccctctcccatggccgtcggccctccccgccatggacgtcgctcttccttcctacagatgttgacaattggaaatccatgtagcaaataaatgattttggaactagggacagggatgtgcagtggtggtctcttaaaagaattttgtgttccagcgtagctatttccactgcaaactatcaaatcattacaaactggcattccatggcttccactagttgagtccccatgataaccaatccttgttatcatatacttcttcaagtttgacgtcagcaacgtggtcatggtgaccggcgggaggaacaccgggcgtgtaggagtgatcaagaactgggagaagcacaagggcagcttcgaggtcatcgacgtgctgcttggaggcttttgcatgctatttctagttttctcttatttgttgtacaagaaaacatagaatggaattcaaatttggtggtcgcaaaagtgtggagacttgaattcatataaagttaggcttaacattagtgcaaaaagttgtattttagttttgatttagagtacacttatgtatgccttgtttgacaatacttatttatgatatattgaatggtacctattgtaatcgtctattattgtaggatattcgagacagtttgataaatactttatgacttataatgtttgttttctc

SEQ ID NO: 72093 - DNA, 688 bp, Zea Mays
acttatcttccttatcctatctccatcgccccatttcctatcctcccagccgatcccctctccctcacggcgccctctcccatggccgtcggccctccccgccatggacgtcgctcttccttcctacaggatgtgcagtggtggtctcttaaaagaattttgtgttccagcgtagctatttccactgcaaactatcaaatcattacaaactggcattccatggcttccactagttgagtccccatgataaccaatccttgttatcatatacttcttcaagtttgacgtcagcaacgtggtcatggtgaccggcgggaggaacaccgggcgtgtaggagtgatcaagaactgggagaagcacaagggcagcttcgaggtcatcgacgtgctgcttggaggcttttgcatgctatttctagttttctcttatttgttgtacaagaaaacatagaatggaattcaaatttggtggtcgcaaaagtgtggagacttgaattcatataaagttaggcttaacattagtgcaaaaagttgtattttagttttgatttagagtacacttatgtatgccttgtttgacaatacttatttatgatatattgaatggtacctattgtaatcgtctattattgtaggatattcgagacagtttgataaatactttatgacttataatgtttgttttctc

SEQ ID NO: 72094 - DNA, 1004 bp, Zea Mays
acttatcttccttatcctatctccatcgccccatttcctatcctcccagccgatcccctctccctcacggcgccctctcccatggccgtcggccctccccgccatggacgtcgctcttccttcctacagatgttgacaattggaaatccatgtagcaaataaatgattttggaactagggacagtaaagcaaggtttgtgacctggatttattgggtgctgtagacattggaggtggattttcctcaattggagatattgacaaattggaaaaaatgtgacttgacctgtgctgcaacaaccttaaactaggaggggcttctaattcttcatctctaccaacagtcctctcctgttactttttaaaccaataactttttcaagtttgtgcagatgcacacatccttgagccaaaatagaaaaaaaatcatagaagagttctttgggatgtgcagtggtggtctcttaaaagaattttgtgttccagcgtagctatttccactgcaaactatcaaatcattacaaactggcattccatggcttccactagttgagtccccatgataaccaatccttgttatcatatacttcttcaagtttgacgtcagcaacgtggtcatggtgaccggcgggaggaacaccgggcgtgtaggagtgatcaagaactgggagaagcacaagggcagcttcgaggtcatcgacgtgctgcttggaggcttttgcatgctatttctagttttctcttatttgttgtacaagaaaacatagaatggaattcaaatttggtggtcgcaaaagtgtggagacttgaattcatataaagttaggcttaacattagtgcaaaaagttgtattttagttttgatttagagtacacttatgtatgccttgtttgacaatacttatttatgatatattgaatggtacctattgtaatcgtctattattgtaggatattcgagacagtttgataaatactttatgacttataatgtttgttttctc

SEQ ID NO: 72095 - DNA, 1111 bp, Zea Mays
acttatcttccttatcctatctccatcgccccatttcctatcctcccagccgatcccctctccctcacggcgccctctcccatggccgtcggccctccccgccatggacgtcgctcttccttcctacagtacgtcagcgacctcgtctccctcccttcccgtggacgcctgctgcaggagttgttcctcccctgcgctcgcctaagatggccggactcgcccatgatggctttcccctgtcgatgctgttctttagccgccatggcagtgcctccctgcagcagtccggtgaccgggccctccccttcccacgtcatgctggtgccatgtcttctccctcaccggccaacctcgccagccaccaggaaggtgtctccctctcggcagctcccatggccaccatcagccctagctgcgcttgccctggttccagcagctcgacgccagcccctctcaatcttccatcgctgccgctcagcttgtcccagatatattgatgttgacaattggaaatccatgtagcaaataaatgattttggaactagggacagggatgtgcagtggtggtctcttaaaagaattttgtgttccagcgtagctatttccactgcaaactatcaaatcattacaaactggcattccatggcttccactagttgagtccccatgataaccaatccttgttatcatatacttcttcaagtttgacgtcagcaacgtggtcatggtgaccggcgggaggaacaccgggcgtgtaggagtgatcaagaactgggagaagcacaagggcagcttcgaggtcatcgacgtgctgcttggaggcttttgcatgctatttctagttttctcttatttgttgtacaagaaaacatagaatggaattcaaatttggtggtcgcaaaagtgtggagacttgaattcatataaagttaggcttaacattagtgcaaaaagttgtattttagttttgatttagagtacacttatgtatgccttgtttgacaatacttatttatgatatattgaatggtacctattgtaatcgtctattattgtaggatattcgagacagtttgataaatactttatgacttataatgtttgttttctc

SEQ ID NO: 72096 - DNA, 1361 bp, Zea Mays
acttatcttccttatcctatctccatcgccccatttcctatcctcccagccgatcccctctccctcacggcgccctctcccatggccgtcggccctccccgccatggacgtcgctcttccttcctacagtacgtcagcgacctcgtctccctcccttcccgtggacgcctgctgcaggagttgttcctcccctgcgctcgcctaagatggccggactcgcccatgatggctttcccctgtcgatgctgttctttagccgccatggcagtgcctccctgcagcagtccggtgaccgggccctccccttcccacgtcatgctggtgccatgtcttctccctcaccggccaacctcgccagccaccaggaaggtgtctccctctcggcagctcccatggccaccatcagccctagctgcgcttgccctggttccagcagctcgacgccagcccctctcaatcttccatcgctgccgctcagcttgtcccagatatattacattggaggtggattttcctcaattggagatattgacaaattggaaaaaatgtgacttgacctgtgctgcaacaaccttaaactaggaggggcttctaattcttcatctctaccaacagtcctctcctgttactttttaaaccaataactttttcaagtttgtgcagatgcacacatccttgagccaaaatagaaaaaaaatcatagaagagttctttggctgtcacgtgattcaagagtattaatgatatacaaaagtttgctttatggcaagtcaagtaaccaccaattttgggcaatgacagggatgtgcagtggtggtctcttaaaagaattttgtgttccagcgtagctatttccactgcaaactatcaaatcattacaaactggcattccatggcttccactagttgagtccccatgataaccaatccttgttatcatatacttcttcaagtttgacgtcagcaacgtggtcatggtgaccggcgggaggaacaccgggcgtgtaggagtgatcaagaactgggagaagcacaagggcagcttcgaggtcatcgacgtgctgcttggaggcttttgcatgctatttctagttttctcttatttgttgtacaagaaaacatagaatggaattcaaatttggtggtcgcaaaagtgtggagacttgaattcatataaagttaggcttaacattagtgcaaaaagttgtattttagttttgatttagagtacacttatgtatgccttgtttgacaatacttatttatgatatattgaatggtacctattgtaatcgtctattattgtaggatattcgagacagtttgataaatactttatgacttataatgtttgttttctc

SEQ ID NO: 72097 - DNA, 1013 bp, Zea Mays
acttatcttccttatcctatctccatcgccccatttcctatcctcccagccgatcccctctccctcacggcgccctctcccatggccgtcggccctccccgccatggacgtcgctcttccttcctacaccgccatggcagtgcctccctgcagcagtccggtgaccgggccctccccttcccacgtcatgctggtgccatgtcttctccctcaccggccaacctcgccagccaccaggaaggtgtctccctctcggcagctcccatggccaccatcagccctagctgcgcttgccctggttccagcagctcgacgccagcccctctcaatcttccatcgctgccgctcagcttgtcccagatatattgctgtcacgtgattcaagagtattaatgatatacaaaagtttgctttatggcaagtcaagtaaccaccaattttgggcaatgacagggatgtgcagtggtggtctcttaaaagaattttgtgttccagcgtagctatttccactgcaaactatcaaatcattacaaactggcattccatggcttccactagttgagtccccatgataaccaatccttgttatcatatacttcttcaagtttgacgtcagcaacgtggtcatggtgaccggcgggaggaacaccgggcgtgtaggagtgatcaagaactgggagaagcacaagggcagcttcgaggtcatcgacgtgctgcttggaggcttttgcatgctatttctagttttctcttatttgttgtacaagaaaacatagaatggaattcaaatttggtggtcgcaaaagtgtggagacttgaattcatataaagttaggcttaacattagtgcaaaaagttgtattttagttttgatttagagtacacttatgtatgccttgtttgacaatacttatttatgatatattgaatggtacctattgtaatcgtctattattgtaggatattcgagacagtttgataaatactttatgacttataatgtttgttttctc

SEQ ID NO: 72098 - DNA, 1289 bp, Zea Mays
acttatcttccttatcctatctccatcgccccatttcctatcctcccagccgatcccctctccctcacggcgccctctcccatggccgtcggccctccccgccatggacgtcgctcttccttcctacaccgccatggcagtgcctccctgcagcagtccggtgaccgggccctccccttcccacgtcatgctggtgccatgtcttctccctcaccggccaacctcgccagccaccaggaaggtgtctccctctcggcagctcccatggccaccatcagccctagctgcgcttgccctggttccagcagctcgacgccagcccctctcaatcttccatcgctgccgctcagcttgtcccagatatattgatgttgacaattggaaatccatgtagcaaataaatgattttggaactagggacagacattggaggtggattttcctcaattggagatattgacaaattggaaaaaatgtgacttgacctgtgctgcaacaaccttaaactaggaggggcttctaattcttcatctctaccaacagtcctctcctgttactttttaaaccaataactttttcaagtttgtgcagatgcacacatccttgagccaaaatagaaaaaaaatcatagaagagttctttggctgtcacgtgattcaagagtattaatgatatacaaaagtttgctttatggcaagtcaagtaaccaccaattttgggcaatgacagggatgtgcagtggtggtctcttaaaagaattttgtgttccagcgtagctatttccactgcaaactatcaaatcattacaaactggcattccatggcttccactagttgagtccccatgataaccaatccttgttatcatatacttcttcaagtttgacgtcagcaacgtggtcatggtgaccggcgggaggaacaccgggcgtgtaggagtgatcaagaactgggagaagcacaagggcagcttcgaggtcatcgacgtgctgcttggaggcttttgcatgctatttctagttttctcttatttgttgtacaagaaaacatagaatggaattcaaatttggtggtcgcaaaagtgtggagacttgaattcatataaagttaggcttaacattagtgcaaaaagttgtattttagttttgatttagagtacacttatgtatgccttgtttgacaatacttatttatgatatattgaatggtacctattgtaatcgtctattattgtaggatattcgagacagtttgataaatactttatgacttataatgtttgttttctc

SEQ ID NO: 72099 - DNA, 1329 bp, Zea Mays
acttatcttccttatcctatctccatcgccccatttcctatcctcccagccgatcccctctccctcacggcgccctctcccatggccgtcggccctccccgccatggacgtcgctcttccttcctacaccgccatggcagtgcctccctgcagcagtccggtgaccgggccctccccttcccacgtcatgctggtgccatgtcttctccctcaccggccaacctcgccagccaccaggaaggtgtctccctctcggcagctcccatggccaccatcagccctagctgcgcttgccctggttccagcagctcgacgccagcccctctcaatcttccatcgctgccgctcagcttgtcccagatatattgatgttgacaattggaaatccatgtagcaaataaatgattttggaactagggacagtaaagcaaggtttgtgacctggatttattgggtgctgtagacattggaggtggattttcctcaattggagatattgacaaattggaaaaaatgtgacttgacctgtgctgcaacaaccttaaactaggaggggcttctaattcttcatctctaccaacagtcctctcctgttactttttaaaccaataactttttcaagtttgtgcagatgcacacatccttgagccaaaatagaaaaaaaatcatagaagagttctttggctgtcacgtgattcaagagtattaatgatatacaaaagtttgctttatggcaagtcaagtaaccaccaattttgggcaatgacagggatgtgcagtggtggtctcttaaaagaattttgtgttccagcgtagctatttccactgcaaactatcaaatcattacaaactggcattccatggcttccactagttgagtccccatgataaccaatccttgttatcatatacttcttcaagtttgacgtcagcaacgtggtcatggtgaccggcgggaggaacaccgggcgtgtaggagtgatcaagaactgggagaagcacaagggcagcttcgaggtcatcgacgtgctgcttggaggcttttgcatgctatttctagttttctcttatttgttgtacaagaaaacatagaatggaattcaaatttggtggtcgcaaaagtgtggagacttgaattcatataaagttaggcttaacattagtgcaaaaagttgtattttagttttgatttagagtacacttatgtatgccttgtttgacaatacttatttatgatatattgaatggtacctattgtaatcgtctattattgtaggatattcgagacagtttgataaatactttatgacttataatgtttgttttctc

SEQ ID NO: 72100 - DNA, 1605 bp, Zea Mays
caattttggtggtctataagtcaggttatggctgtttgaaatgtgatgtttgaagctgtcaaaatctggacaacaatgcttgtttgtattaactgacttcgatacacattgaatcaccttgagatgattataaatgaactgtagacaattctattagctttctaaaaagtctaggatcacctgatttggacttctaaaactccagttatgaattaatgaagtaagtagtcgaattctgtccaaatctggacagaaattgcgtttagtactgtttgacatttctaaatgtcgaatctcatggtgatgataataccaaaattttagaggactttataagcttttcaaaaagtcttagtttactatttttggatgaatattgtgtaagttatgaataaaacaactagctctacaactttcatttaatcaagcgtgtttctgctttatcttgctatgctctgaccgaagctttagtttttgtgcgactggtatttctgtgttctgcagatcatttagctcaagtaattggtagttcaaatgtcataatgtttggtttgagatttctatccgtggatggttcgtctggcttatctatgcttttaggtgcttcatctggcttatctatgtttttgcgctctcgcttttgcatgtgttgcaggatgttgacaattggaaatccatgtagcaaataaatgattttggaactagggacaggtcagagtctagagcatgttcattccacacattggaggtggattttcctcaattggagatattgacaaattggaaaaaatgtgacttgacctgtgctgcaacaaccttaaactaggaggggcttctaattcttcatctctaccaacagtcctctcctgttactttttaaaccaataactttttcaagtttgtgcagatgcacacatccttgagccaaaatagaaaaaaaatcatagaagagttctttggctgtcacgtgattcaagagtattaatgatatacaaaagtttgctttatggcaagtcaagtaaccaccaattttgggcaatgacagggatgtgcagtggtggtctcttaaaagaattttgtgttccagcgtagctatttccactgcaaactatcaaatcattacaaactggcattccatggcttccactagttgagtccccatgataaccaatccttgttatcatatacttcttcaagtttgacgtcagcaacgtggtcatggtgaccggcgggaggaacaccgggcgtgtaggagtgatcaagaactgggagaagcacaagggcagcttcgaggtcatcgacgtgctgcttggaggcttttgcatgctatttctagttttctcttatttgttgtacaagaaaacatagaatggaattcaaatttggtggtcgcaaaagtgtggagacttgaattcatataaagttaggcttaacattagtgcaaaaagttgtattttagttttgatttagagtacacttatgtatgccttgtttgacaatacttatttatgatatattgaatggtacctattgtaatcgtctattattgtaggatattcgagacagtttgataaatactttatgacttataatgtttgttttctc

SEQ ID NO: 72101 - DNA, 1733 bp, Zea Mays
ggcccttgcccctcaggcgcattgtttttttttgtgtctctggcgccgttgggtggggcaccgtgggcggtgagctgaccgccgcgccgtcggtgggcgtgggttgggggtgggggtgcttattctgggcggctccgcctccacgtatatattacacgcgcgcgcatgtacgcgaagaattttagtggggagccaacgaaggcaaggcaagccagaccagcagcgggggagagaggaggcagaaggagattctagggagttaagggaggcgaccgccatgggggactccagcgactccgtgtcggtcgacgtcgagcggatcttctttggcggcaaggggcatcgagtgaggacgaggcacggccctctatcggtttctgtatacggagacgaggacaagcccgcgctcgtaacttatccggatttagccttgaatcacatgtcttgcttccaaggattgttcttctgtccagaggctgcgtcgctgttgcttcacaatttctgtgtgtaccacatcacacctcaagggcacgagttaggagcggctccaatttcagctgatgtgcatgtgccgtctgtcgatgaccttgcagatcaggtcgctgatgtcctcgattttttcagtttgggttcggtcatgtgcttgggtgtcaccgctggtgcctatgtgctcaccctctttgcgacgaagtatcgggagagggttcttggcctaatgttggtttcacctgtatgcaaagccccctcttggagcgagtggttgtacaataagagtgttaacctcagaatccggtgtcccaggtattgttaaacttgctttattactatgggacgcgtgggatagtcaaggaaagtttgcttcagcggtatttcagcatggacgtccttggtaacggacaggatccagaatcagagattgtccaagcctgcagaagtttacttgacgataggcaggggactaatgtctggcggttccttcaggcaattaataggcgacatgatctaacagaatcgttggagaagcttcagtgccagacgctgatttttgttggggaaaactcacagttccatgctgacgctgtccacatgaccacaaagctagaccggagatactgcgccctagtcgaggttcaggcatgtggttcacttgtcacagaagagcaaccccatgcgatggtgatcccgatggagtacttccttatgggatacgggctttacaggccatcgcagcaggaaagcagcccccggagcacactgagcccgttctgcatctcgcccgagcttctgtcgccggagagcatgggagtgaagctgaagcccatcaagacgcgcatctcacgtaacgtttagtgtggggtggatctcggttggccatggcatattggcatggcaatcacaactcatcaaagtgaaggactcccttgggctgagctgatcaaccacgaaattttgatgcctttcggcatctagcgtgagaagatttacagggtgaaggcaatttttgtcgatgcagggaggttgtagataatgagggggaatggttgtttgttcatatacatatatgtgtaagttagtacacatgtacacctaaacacggcatcgttccatacagtacagaatacagagaaagaaaatgggaaagctgaatcgtcgtccgatactgacatgaactctcaagcccgaggacattgtgttaaaatatagcagttgaagcttcaaacaaaaaatgcgtc

SEQ ID NO: 72102 - DNA, 1712 bp, Zea Mays
ggcccttgcccctcaggcgcattgtttttttttgtgtctctggcgccgttgggtggggcaccgtgggcggtgagctgaccgccgcgccgtcggtgggcgtgggttgggggtgggggtgcttattctgggcggctccgcctccacgtatatattacacgcgcgcgcatgtacgcgaagaattttagtggggagccaacgaaggcaaggcaagccagaccagcagcgggggagagaggaggcagaaggagattctagggagttaagggaggcgaccgccatgggggactccagcgactccgtgtcggtcgacgtcgagcggatcttctttggcggcaaggggcatcgagtgaggacgaggcacggccctctatcggtttctgtatacggagacgaggacaagcccgcgctcgtaacttatccggatttagccttgaatcacatgtcttgcttccaaggattgttcttctgtccagaggctgcgtcgctgttgcttcacaatttctgtgtgtaccacatcacacctcaagggcacgagtattgcagttaggagcggctccaatttcagctgatgtgcatgtgccgtctgtcgatgaccttgcagatcaggtcgctgatgtcctcgattttttcagtttgggttcggtcatgtgcttgggtgtcaccgctggtgcctatgtgctcaccctctttgcgacgaagtatcgggagagggttcttggcctaatgttggtttcacctgtatgcaaagccccctcttggagcgagtggttgtacaataaggtattgttaaacttgctttattactatgggacgcgtgggatagtcaaggaaagtttgcttcagcggtatttcagcatggacgtccttggtaacggacaggatccagaatcagagattgtccaagcctgcagaagtttacttgacgataggcaggggactaatgtctggcggttccttcaggcaattaataggcgacatgatctaacagaatcgttggagaagcttcagtgccagacgctgatttttgttggggaaaactcacagttccatgctgacgctgtccacatgaccacaaagctagaccggagatactgcgccctagtcgaggttcaggcatgtggttcacttgtcacagaagagcaaccccatgcgatggtgatcccgatggagtacttccttatgggatacgggctttacaggccatcgcagcaggaaagcagcccccggagcacactgagcccgttctgcatctcgcccgagcttctgtcgccggagagcatgggagtgaagctgaagcccatcaagacgcgcatctcacgtaacgtttagtgtggggtggatctcggttggccatggcatattggcatggcaatcacaactcatcaaagtgaaggactcccttgggctgagctgatcaaccacgaaattttgatgcctttcggcatctagcgtgagaagatttacagggtgaaggcaatttttgtcgatgcagggaggttgtagataatgagggggaatggttgtttgttcatatacatatatgtgtaagttagtacacatgtacacctaaacacggcatcgttccatacagtacagaatacagagaaagaaaatgggaaagctgaatcgtcgtccgatactgacatgaactctcaagcccgaggacattgtgttaaaatatagcagttgaagcttcaaacaaaaaatgcgtc

SEQ ID NO: 72103 - DNA, 1506 bp, Zea Mays
ggcccttgcccctcaggcgcattgtttttttttgtgtctctggcgccgttgggtggggcaccgtgggcggtgagctgaccgccgcgccgtcggtgggcgtgggttgggggtgggggtgcttattctgggcggctccgcctccacgtatatattacacgcgcgcgcatgtacgcgaagaattttagtggggagccaacgaaggcaaggcaagccagaccagcagcgggggagagaggaggcagaaggagattctagggagttaagggaggcgaccgccatgggggactccagcgactccgtgtcggtcgacgtcgagcggatcttctttggcggcaagttaggagcggctccaatttcagctgatgtgcatgtgccgtctgtcgatgaccttgcagatcaggtcgctgatgtcctcgattttttcagtttgggttcggtcatgtgcttgggtgtcaccgctggtgcctatgtgctcaccctctttgcgacgaagtatcgggagagggttcttggcctaatgttggtttcacctgtatgcaaagccccctcttggagcgagtggttgtacaataaggtattgttaaacttgctttattactatgggacgcgtgggatagtcaaggaaagtttgcttcagcggtatttcagcatggacgtccttggtaacggacaggatccagaatcagagattgtccaagcctgcagaagtttacttgacgataggcaggggactaatgtctggcggttccttcaggcaattaataggcgacatgatctaacagaatcgttggagaagcttcagtgccagacgctgatttttgttggggaaaactcacagttccatgctgacgctgtccacatgaccacaaagctagaccggagatactgcgccctagtcgaggttcaggcatgtggttcacttgtcacagaagagcaaccccatgcgatggtgatcccgatggagtacttccttatgggatacgggctttacaggccatcgcagcaggaaagcagcccccggagcacactgagcccgttctgcatctcgcccgagcttctgtcgccggagagcatgggagtgaagctgaagcccatcaagacgcgcatctcacgtaacgtttagtgtggggtggatctcggttggccatggcatattggcatggcaatcacaactcatcaaagtgaaggactcccttgggctgagctgatcaaccacgaaattttgatgcctttcggcatctagcgtgagaagatttacagggtgaaggcaatttttgtcgatgcagggaggttgtagataatgagggggaatggttgtttgttcatatacatatatgtgtaagttagtacacatgtacacctaaacacggcatcgttccatacagtacagaatacagagaaagaaaatgggaaagctgaatcgtcgtccgatactgacatgaactctcaagcccgaggacattgtgttaaaatatagcagttgaagcttcaaacaaaaaatgcgtc

SEQ ID NO: 72104 - DNA, 1062 bp, Zea Mays
ggcaacatagaaaaatgttaatcgttaaagtccttcgtccttcgaagcattattcctctcaggatataatgattttcggacgaaggttatgaagggtgtaccttcataaatacaatgacggaggatggattataaggaatataaagaatatcatagacaattgcacattattattattaatttatctttgcattattattatgtaaaaacagaaataacattgaattacaaatgtaccttcagcttgaaagagatgaaagtacaagcgtgacgcaaaagcgattgtcagatcagcgtgaacagtacgggggtactgttcacctatttataggcacaggacacaacccatacaaaattacatttatgccctttacatttgataataattctatagtaatctatcgaggtctgaatagccttttcatctttaagtcggtttcatttgttgctaccacgccgaagcttcccggttcacaccttcggcgctgtatcaaccttcgtattattctggtctgctgtgacaccgacttgagtccgaagatacctgttcacacattatactccagcaatactgttaaatcctgtttttgaggaccttcgtaagccgaaggcccccaacagtacctttactcattactgttctgaattaatttgtgtacattcattccaaatacgtatttacatacatggacatctacatggtgttcaatagaacatgagtgaatcgctacaattagccaaagaacatgaaaaacaagatacatgttttatttttttattgagagaggcataccttctacaacaattactcttgaagttataatatatactcttacaaaatccattgtagtgaaaaaattatcacctatttacatttgcagattgagtcttcagtgtttgggtaagcctttcatattctggtcgttaaatgcattgttactttcaattgtataattcacaaccagtttcatgttttttagttgatgttagattcgtatgattcacaatcagtttcataattttgaggcaatgttagagtcggttttctatgcgtgtgtgaga

SEQ ID NO: 72105 - DNA, 1246 bp, Zea Mays
ttacatttgcagattgagtcttcagtgtttggagtaccggctgacagcggctgcggcgaagctatctgagcggtagcggagtactaagggggtggagagagggagcactgtctcatgcatgaaagaaagtctccaaaacaaaagatttggtccagagcgcggccacacgggcccagcaatagcaacgtcacatggtggttgccatcgtcacgtcgagctctccctctccaccaactaatagttcctgacggtggagcagaaattcattaagagcatatagggattcacaagtgattttgagcccaacaatcttgctgccatcgatactcctgatgcaagtggaggatttggtgacatgttttgctgtgaagtttgcgaaccatggtaaaccaacacctattgctttgatataatcatctcgatcactggttgatgtatttgaacaggacatgaatgatggcaaagttgtatgcgtcgttggatttgcctttctgtttgcagttgatgtaaggaaatgctatgttgaaacttttgccacttttgtgttatcatgattaagcagtgcttcccggctgggaaatgaaagtcttggattgtctttggtggtatggttattctgctcatggaagatctacagggaagaaactgaggtagcatataactgccgcaagggaaaatatggtgtagcagatgaggatataatcttatatggtcaatgtgtttgaattggtccaaccattgatatttcttcgcggttgctagacttgagagtcgcagttttgcatagtcctatattctatctgcactaagagtaatatatacagccaagcggatgtttggtttaacatttacaaggtatgtttggtccttttgtttttggaattaatggttgtccgatgcttgccattcatatgagttctaatatcatgcccccttaaagtactcatcatcaaaagtttccatgtgaatgttttaaatgtagatttaaagggttgaaagacatgaaacagttattcaaacaggatcttaagtgtcgtgaaagactacaggtgaggttcaacttggcaaattgtttttctagtaactaaggagcaacaatgctatgtattttagcttgacttatatatctaagtacttacatttttggaatcgggcaaacagtgatagtttgaatcacatgttttgccaaaaggaattattagaactgttcaaagttgggaaaaaatacatatttatgctttcttat

SEQ ID NO: 72106 - DNA, 2464 bp, Zea Mays
ccaagtacaacaataaattgtaactgacattattgaacacattacacatggctggtgcctggtgctgaactgttgatgcacggttgttagcggtggcagacaaaaggaatttagaagcaactaaaatcttattgctaccttgcttctagaaagtcggattgattctataaattgcgaccgcaaagtcggattgctaccttgcgtgaatgatgcagcctgccttaatctgttaacttaaactttaatgttaccaaactctggaggcttagcgctaaccggcacagactaggcacttacaatgatgcatgttcgggaggggtgatcatagatggagctgatcttcacaaacctaaaaaaactttgcagagtaccggctgacagcggctgcggcgaagctatctgagcggtagcggagtactaagggggtggagagagggagcactgtctcatgcatgaaagaaagtctccaaaacaaaagatttggtccagaggtaaaaatgtctgaccaaaggctggcattcagataaatcagttttatgtttcaaataactcataaatggcatttaaattctagcagtgcaaagaacaaaatcaaacaagataataatcagttttgtcataaattattttttagaataaaaacatgtttaagaactgtataagcacacctacaattagcaacctctgaagatttgtatgaactaatatttatgtgtaaccatgacaacatcacacgttagacccttgaaagaagccatatcatgtttccaaatattaggctaaatgtctgaataaaagaagaaaaaacactaggtacagtttttgccaagatagtgccgacgaggaaacaacagacacattgtaagtgattcttgcagtaccaatattcccatgaacttattactaaagaagatgtctttgtgatggtacatttgtccatatttcttaatcatatatggcacactgtacattttccctcctagtgttttggaatccttatttatggtactaataagtagcattctaatctgcatatggttgttttgttacaaagtcatattctgtcaccataatttattaaagagaaaaatgtttggttgcacaattacaagcttgctttgtttgattctacttgcagcgcggccacacgggcccagcaatagcaacgtcacatggtggttgccatcgtcacgtcgagctctccctctccaccaactaatagttcctgacggtggagcagaaattcattaagagcatatagggattcacaagtgattttgagcccaacaatcttgctgccatcgatactcctgatgcaagtggaggatttggtgacatgttttgctgtgaagtttgcgaaccatggtaaaccaacacctattgctttgatataatcatctcgatcactggttgatgtatttgaacaggacatgaatgatggcaaagttgtatgcgtcgttggatttgcctttctgtttgcagttgatgtgacatcaaatccttgtgtttcttgtgagattaatttctttcacatgaaaaaatggcgggctacatagattattagttatgcaccagataggaaatgcacagactttgtaggtgtgacaaagaggcaagataatatattttgtggatgtatcttagattttacaatgctgatgaggtggtgccttgcattttgtgacatggttagtgggtctttctacgtggattgcattatgcagggacgactagttccttacccaaatgtggttaaagttaggaacagtcttctccctgaaattgatttagtgatttcaaacagacttatatgtgtgatgcaggtatggttattctgctcatggaagatctacagggaagaaactgaggtagcatataactgccgcaagggaaaatatggtgtagcagatgaggatataatcttatatggtcaatgtgtttgaattggtccaaccattgatatttcttcgcggttgctagacttgagagtcgcagttttgcatagtcctatattctatctgcactaagagtaatatatacagccaagcggatgtttggtttaacatttacaaggtatgtttggtccttttgtttttggaattaatggttgtccgatgcttgccattcatatgagttctaatatcatgcccccttaaagtactcatcatcaaaagtttccatgtgaatgttttaaatgtagatttaaagggttgaaagacatgaaacagttattcaaacaggatcttaagtgtcgtgaaagactacaggtgaggttcaacttggcaaattgtttttctagtaactaaggagcaacaatgctatgtattttagcttgacttatatatctaagtacttacatttttggaatcgggcaaacagtgatagtttgaatcacatgttttgccaaaaggaattattagaactgttcaaagttgggaaaaaatacatatttatgctttcttat

SEQ ID NO: 72107 - DNA, 1597 bp, Zea Mays
gagcggtagcggagtactaagggggtggagagagggagcactgtctcatgcatgaaagaaagtctccaaaacaaaagatttggtccagagcgcggccacacgggcccagcaatagcaacgtcacatggtggttgccatcgtcacgtcgagctctccctctccaccaactaatagttcctgacggtggagcagaaattcattaagagcatatagggattcacaagtgattttgagcccaacaatcttgctgccatcgatactcctgaaagacacaattccattttggcagatgcaagtggaggatttggtgacatgttttgctgtgaagtttgcgaaccatggtaaaccaacacctattgctttgatataatcatctcgatcactggttgatgtatttgaacaggacatgaatgatggcaaagttgtatgcgtcgttggatttgcctttctgtttgcagttgatgtaaggaaatgctatgttgaaacttttgccacttttgtgttatcatgattaagcagtgcttcccggctgggaaatgaaagtcttggattgtctttggtgataggaaatgcacagactttgtaggtgtgacaaagaggcaagataatatattttgtggatgtatcttagattttacaatgctgatgaggtggtgccttgcattttgtgacatggttagtgggtctttctacgtggattgcattatgcagggacgactagttccttacccaaatgtggttaaagttaggaacagtcttctccctgaaattgatttagtgatttcaaacagacttatatgtgtgatgcaggtatggttattctgctcatggaagatctacagggaaggtatcttttgttcttatattttggttgcttaacaaataccttatgtagaaactataatcttctctctaaccatatcttagtggaaagtttattcttccattgaacatcccactgagtgtaatgcatatgcagaaatgcatatgcagaaactgaggtagcatataactgccgcaagggaaaatatggtgtagcagatgaggatataatcttatatggtcaatgtgtttgaattggtccaaccattgatatttcttcgcggttgctagacttgagagtcgcagttttgcatagtcctatattctatctgcactaagagtaatatatacagccaagcggatgtttggtttaacatttacaaggtatgtttggtccttttgtttttggaattaatggttgtccgatgcttgccattcatatgagttctaatatcatgcccccttaaagtactcatcatcaaaagtttccatgtgaatgttttaaatgtagatttaaagggttgaaagacatgaaacagttattcaaacaggatcttaagtgtcgtgaaagactacaggtgaggttcaacttggcaaattgtttttctagtaactaaggagcaacaatgctatgtattttagcttgacttatatatctaagtacttacatttttggaatcgggcaaacagtgatagtttgaatcacatgttttgccaaaaggaattattagaactgttcaaagttgggaaaaaatacatatttatgctttcttat

SEQ ID NO: 72108 - DNA, 1435 bp, Zea Mays
cgctccgcatgcctgacaccttcccaccacgcccccacccttcgccctttttccccatccccacccccaccaggtcgagcgaaccctcactgaccacgggccacccccagatcgtgggcgccaggacttgacggcgttagcttatcggggactccgtcgtctgccttatccacggttagctaaccgcggtcgggcccgggtcaggcgcgcgaccgtccgctttataagcgcgcagcccttggactcgtctccctcgtccccaacccacacactgcccaccggtctttctcacacaacacagccacacagggatataagctcagtccacgagatctcccgtagaccagtggcgagggaaggaacgaaacagagcccgatcctagcgacaggccaggcgttcgagacctacctcaccaagagcatcgtgtcctcgtcgccgaccagcacgctcctgtcgccgcccaagacgcccccgtccgagtcgccgccgctgtcgccggacggggccgccgccgccttccgccgcgggtcctggcccggcgccgggtcccccgtcaacgacgtcctggcctcgctccgccagctccgcctcggcacggccagctcgtccccgtccggcgggtggggcggctacccggcgtccgcggctgcctacgggtcgcccacagcgggcgggctctacagcctgccctccaccccgacagccctcgccaccgcctccggctacatgcccaacctggagccgcttgacgtcagcttcggcggcgacgaggagcccgtggagagggtggagtccgggcgggccctccgcgccaaggtgttcgagcggctcagcagggagggcgctgtttcctgctacccagctgccggaaccggtggccccgacgtcgggtgggtctccgacctcatcaactgaggcggcttcggcggcgggtcggtgctgcatagcagtggagaaaaggtggtggtaactggtagcggaaaatttccaaggaaaagaaaatatgtaaggaagtgtagatgtcgtaggcggcggcggcggcggcggtttgtgccctcttgtgtgctgcgaagcatggcgagggccgacggtgacgacgaagactggccggatttccagctttggtgttcctgtgattccgcaacaagttcagtttgatgttgtttcaagttcttccgtcgcctgtgcactatgcatccggctagttggcgattgcaacctgcttgtggattactacccccattttgttgttgatgttgatgtaatctgtttattaagacccagcattcccctacagcttattttgttgtacttactatatatctttagtaggtgccgaaatctcagttcacccgctattggaggtgaatttgccgtgtaatctttggatcaagtaaatggtttaatgtccgtcgcccagcgtgtgtttgtcgt

SEQ ID NO: 72109 - DNA, 1154 bp, Zea Mays
gactttcttcttttttttttcaagctaaaccacgagcgggcgcggggcgactgggcgaggcgagctgccaaggattcgaccgttgcgttctccgcccaaatcttagaaatcccaatcccagatcgtcctccaatttcaaacttctcgactcgcccctccccgtccggccgtcccacccacgcttcctccccctccgcgccgctcctacaggctctaaccatggcggtcgccaccgagtcgcgcggcagcgaggacagggcttcagcccatgcgaaccaggagaagcggtgggtgctgtctgatttcgaggttgggaaacctcttgggaggggcaagtttggccatgtttatcttgccagagaaaaaaggagtagtgagattgtggctttgaaagttcttttcaagagccagctcaagcaatcacaggttgagcatcagctgcgacgtgaagtggagattcagagtcatcttcgtcatcctaatattcttcgcctgtatgggtacttctatgatcagaccagggtttacctaatcctggaatacgctgccaagggtgaactgtataaggaactgacaaggtgtaaacatttttcagagcgacgcacagcgacttatgtcgcttcgttggctagagctttgatctaccttcatggcaagcatgttatccatcgggacattaaaccagagaatcttttagttggagttcagggcgagatcaaaattgccgactttggctggtctgtgcacaccttcaacagaagacggactatgtgcggaactctggattacctgccacctgaaatggtggagaaggcagaacatgattaccatgttgatatatggagccttggtgttctgtgctatgagttcctttacggggtcccacctttcgaagctaaggagcactcagaaacctacagaaggatagtgaaagtcgacttgaagttcccactgaaaccattcgtttcacctgccgcaaaggacttgatttctcagatgctggtcaagagctcggcgcagcggctgcctctccacaaggttcttgagcacccgtggatcgtccagaacgccgacccttccggcgtgtacagagaaggacgaacaccattaaactcctcggtcctcacctctatgccgacgacgctggagacgcc

SEQ ID NO: 72110 - DNA, 2473 bp, Zea Mays
aattagtccctctaaaccaaacaccccctaagcatcgaagggaaggaagaagcatgtgcttgttgaagcccgtgccctgatgatgatgatgtcgagagaagtcctcatggcgcgcatgggaggggggatgacctgtgctgtctgcccaagtcccgagcacgaccggccctagcagcaggctagccggccggtgcgatcaactgtaaaaaccgcgacgcgccaacgctctcggctcctggagctgatcggccgttctcgtcttcctctcgcccaggtcgcgccgcgcaaagggagctgcgaccgatggaccgttgaacaacgcgtctgctctgctacatatacattgattcagctgaacggtcgtgtttcagagagagatgacggctaagagcctaagctacagcgcagcaagcagacggggaaacaagaatcatcccttccgtatatactactactactactactcaatactcatgcatgcgcactgcctcccggtgcggcgtatgaaccagacatgaacagggagcacagcagcagcagcagctccaagctcatcaacgagaagctcgaggaacaccggatctccaccgcgaagcactgcccccactgcggcgagaaaatcgacagcaaaccagattgggtggggctgccggcaggcgtcaagttcgatccaactgatcaggagctgatcgagcacctcgaggcgaaagtgaaggacgaaggctcgagatctcaccctctcatcgacgagttcatacccacaatagatggggaggacggcatatgctacacccaccccgagaaacttccaggtgtgacgagggatggcctaagcaagcacttcttccaccggccgtccaaggcctacacgacgggcacgaggaagaggaggaagatacagacggattgcgacgtccacaagggggagacgaggtggcacaagaccggcaagacgcggccggtgatggtgagcggccggcagaaggggtgcaagaagatactggtgctgtacaccaacttcggcaagcaccgcaagccggagaagacgaactgggtgatgcaccagtaccatctcggtgacctagaggaggagaaagagggggagctggtggtgtgcaagatcttctaccagacgcagcccaggcagtccagctggtccgccgcctctgaccggggggccgccactgccatggtggcagcaacgacggcggcggcgcaggagcagcataggagggatagcggcagcggcagctgctcgtctagggaccacgaggcggtgtcagcgacatcgttcccggccggatacacagtcaccacggccgtcgagatgcagcagcatatgaagcagccagctgcggaccatttcagcttcgcgcctttcaggaaaaccttcgatcaggaggttggtataggtggtgatcaggtgccatctaatcagctcggacgatcagagacgcatcatgccggccgggggcagcagccgcacggcccggtgctcgcgacgacggccgtgcctgctacagctttcctgatcagtaggccatcgaaccccgtctcgactatagtgccacctgcaatgcagcacgcatcagttgtcctcgataatgatcagttccatgtgccagcaatccttctccaccaccatgacaaattccagccgcatcagcaccaacaggaacagacacaacaaaagcttgatcgcaggtctgccagtgccggcttggaagaattgataatgggctgcacgtcgtccacaaacacaaaaggagaaacttcaattgctcacccccaagagacagagtggccttacccgtactggccatctgataaccaagatcatcatggatagtagtgacaggacagataaataatggcgatgaatgctaaaggaacactaaccacaaccacttctactggaatgggttttgtctgcttgaatatgcagcgttgcttttcttggaggatgtacacctacgttcgatctatagtggagggatcggaagaccagagaaaaaacagatctctgtagatctccctcaaaaagaaaatgagaatcaaattactcgtgtgtgctctccaagacagaagagacaaaatggccaacgaaaagaggagaaaagatcgatgggaggaaaggtatcgtttgtgctgacattgaagggatcatgtgtgggcccctagatgtattagagaccatcttagtcaagtagtacaactataatcagttcacggtttattgtagtttttttattcgtgctacctaatttccaattgtaaaaagtattgtttgcctcccttttaatattttttgctttccaaattgatgctgattttagtttccctcggtcaatttgtgctaatatgcatcacggagaaataaacttagtaagaagctggaaattcctttcttttaggagcacaaacattgtttatttgttgttattgttaatgtagtttttttgcaagcagaatt

SEQ ID NO: 72111 - DNA, 2314 bp, Zea Mays
cttgttgaagcccgtgccctgatgatgatgatgtcgagagaagtcctcatggcgcgcatgggaggggggatgacctgtgctgtctgcccaagtcccgagcacgaccggccctagcagcaggtcgcgccgcgcaaagggagctgcgaccgatggaccgttgaacaacgcgtctgctctgctacatatacattgattcagctgaacggtcgtgtttcagagagagatgacggctaagagcctaagctacagcaagcagacggggaaacaagaatcatcccttccgtatatactactactactactactcaatactcatgcatgcgcactgcctcccggtgcggcgtatgaaccagacatgaacagggagcacagcagcagcagcagctccaagctcatcaacgagaagctcgaggaacaccggatctccaccgcgaagcactgcccccactgcggcgagaaaatcgacagcaaaccagattgggtggggctgccggcaggcgtcaagttcgatccaactgatcaggagctgatcgagcacctcgaggcgaaagtgaaggacgaaggctcgagatctcaccctctcatcgacgagttcatacccacaatagatggggaggacggcatatgctacacccaccccgagaaacttccaggtgtgacgagggatggcctaagcaagcacttcttccaccggccgtccaaggcctacacgacgggcacgaggaagaggaggaagatacagacggattgcgacgtccacaagggggagacgaggtggcacaagaccggcaagacgcggccggtgatggtgagcggccggcagaaggggtgcaagaagatactggtgctgtacaccaacttcggcaagcaccgcaagccggagaagacgaactgggtgatgcaccagtaccatctcggtgacctagaggaggagaaagagggggagctggtggtgtgcaagatcttctaccagacgcagcccaggcagtccagctggtccgccgcctctgaccggggggccgccactgccatggtggcagcaacgacggcggcggcgcaggagcagcataggagggatagcggcagcggcagctgctcgtctagggaccacgaggcggtgtcagcgacatcgttcccggccggatacacagtcaccacggccgtcgagatgcagcagcatatgaagcagccagctgcggaccatttcagcttcgcgcctttcaggaaaaccttcgatcaggaggttggtataggtggtgatcaggtgccatctaatcagctcggacgatcagagacgcatcatgccggccgggggcagcagccgcacggcccggtgctcgcgacgacggccgtgcctgctacagctttcctgatcagtaggccatcgaaccccgtctcgactatagtgccacctgcaatgcagcacgcatcagttgtcctcgataatgatcagttccatgtgccagcaatccttctccaccaccatgacaaattccagccgcatcagcaccaacaggaacagacacaacaaaagcttgatcgcaggtctgccagtgccggcttggaagaattgataatgggctgcacgtcgtccacaaacacaaaaggagaaacttcaattgctcacccccaagagacagagtggccttacccgtactggccatctgataaccaagatcatcatggatagtagtgacaggacagataaataatggcgatgaatgctaaaggaacactaaccacaaccacttctactggaatgggttttgtctgcttgaatatgcagcgttgcttttcttggaggatgtacacctacgttcgatctatagtggagggatcggaagaccagagaaaaaacagatctctgtagatctccctcaaaaagaaaatgagaatcaaattactcgtgtgtgctctccaagacagaagagacaaaatggccaacgaaaagaggagaaaagatcgatgggaggaaaggtatcgtttgtgctgacattgaagggatcatgtgtgggcccctagatgtattagagaccatcttagtcaagtagtacaactataatcagttcacggtttattgtagtttttttattcgtgctacctaatttccaattgtaaaaagtattgtttgcctcccttttaatattttttgctttccaaattgatgctgattttagtttccctcggtcaatttgtgctaatatgcatcacggagaaataaacttagtaagaagctggaaattcctttcttttaggagcacaaacattgtttatttgttgttattgttaatgtagtttttttgcaagcagaatt

SEQ ID NO: 72112 - DNA, 2215 bp, Zea Mays
aggaattctgctctcttgtattaaaccggtgaaagcagctgcctgcctgcctcgattttttttatatgtacttctccccctcactgctcgctctctcctttgcacccctagctactactgggctcctcctccgacttgctcttcgcgcagcaagcagacggggaaacaagaatcatcccttccgtatatactactactactactactcaatactcatgcatgcgcactgcctcccggtgcggcgtatgaaccagacatgaacagggagcacagcagcagcagcagctccaagctcatcaacgagaagctcgaggaacaccggatctccaccgcgaagcactgcccccactgcggcgagaaaatcgacagcaaaccagattgggtggggctgccggcaggcgtcaagttcgatccaactgatcaggagctgatcgagcacctcgaggcgaaagtgaaggacgaaggctcgagatctcaccctctcatcgacgagttcatacccacaatagatggggaggacggcatatgctacacccaccccgagaaacttccaggtgtgacgagggatggcctaagcaagcacttcttccaccggccgtccaaggcctacacgacgggcacgaggaagaggaggaagatacagacggattgcgacgtccacaagggggagacgaggtggcacaagaccggcaagacgcggccggtgatggtgagcggccggcagaaggggtgcaagaagatactggtgctgtacaccaacttcggcaagcaccgcaagccggagaagacgaactgggtgatgcaccagtaccatctcggtgacctagaggaggagaaagagggggagctggtggtgtgcaagatcttctaccagacgcagcccaggcagtccagctggtccgccgcctctgaccggggggccgccactgccatggtggcagcaacgacggcggcggcgcaggagcagcataggagggatagcggcagcggcagctgctcgtctagggaccacgaggcggtgtcagcgacatcgttcccggccggatacacagtcaccacggccgtcgagatgcagcagcatatgaagcagccagctgcggaccatttcagcttcgcgcctttcaggaaaaccttcgatcaggaggttggtataggtggtgatcaggtgccatctaatcagctcggacgatcagagacgcatcatgccggccgggggcagcagccgcacggcccggtgctcgcgacgacggccgtgcctgctacagctttcctgatcagtaggccatcgaaccccgtctcgactatagtgccacctgcaatgcagcacgcatcagttgtcctcgataatgatcagttccatgtgccagcaatccttctccaccaccatgacaaattccagccgcatcagcaccaacaggaacagacacaacaaaagcttgatcgcaggtctgccagtgccggcttggaagaattgataatgggctgcacgtcgtccacaaacacaaaaggagaaacttcaattgctcacccccaagagacagagtggccttacccgtactggccatctgataaccaagatcatcatggatagtagtgacaggacagataaataatggcgatgaatgctaaaggaacactaaccacaaccacttctactggaatgggttttgtctgcttgaatatgcagcgttgcttttcttggaggatgtacacctacgttcgatctatagtggagggatcggaagaccagagaaaaaacagatctctgtagatctccctcaaaaagaaaatgagaatcaaattactcgtgtgtgctctccaagacagaagagacaaaatggccaacgaaaagaggagaaaagatcgatgggaggaaaggtatcgtttgtgctgacattgaagggatcatgtgtgggcccctagatgtattagagaccatcttagtcaagtagtacaactataatcagttcacggtttattgtagtttttttattcgtgctacctaatttccaattgtaaaaagtattgtttgcctcccttttaatattttttgctttccaaattgatgctgattttagtttccctcggtcaatttgtgctaatatgcatcacggagaaataaacttagtaagaagctggaaattcctttcttttaggagcacaaacattgtttatttgttgttattgttaatgtagtttttttgcaagcagaatt

SEQ ID NO: 72113 - DNA, 2183 bp, Zea Mays
cagctgcctgcctgcctcgattttttttatatgtacttctccccctcactgctcgctctctcctttgcacccctagctactactgggctcctcctccgacttgctcttcgcgcagcaagcagacggggaaacaagaatcatcccttccgtatatactactactactactactcaatactcatgcatgcgcactgcctcccggtgcggcgtatgaaccagacatgaacagggagcacagcagcagcagcagctccaagctcatcaacgagaagctcgaggaacaccggatctccaccgcgaagcactgcccccactgcggcgagaaaatcgacagcaaaccaaaggattgggtggggctgccggcaggcgtcaagttcgatccaactgatcaggagctgatcgagcacctcgaggcgaaagtgaaggacgaaggctcgagatctcaccctctcatcgacgagttcatacccacaatagatggggaggacggcatatgctacacccaccccgagaaacttccaggtgtgacgagggatggcctaagcaagcacttcttccaccggccgtccaaggcctacacgacgggcacgaggaagaggaggaagatacagacggattgcgacgtccacaagggggagacgaggtggcacaagaccggcaagacgcggccggtgatggtgagcggccggcagaaggggtgcaagaagatactggtgctgtacaccaacttcggcaagcaccgcaagccggagaagacgaactgggtgatgcaccagtaccatctcggtgacctagaggaggagaaagagggggagctggtggtgtgcaagatcttctaccagacgcagcccaggcagtccagctggtccgccgcctctgaccggggggccgccactgccatggtggcagcaacgacggcggcggcgcaggagcagcataggagggatagcggcagcggcagctgctcgtctagggaccacgaggcggtgtcagcgacatcgttcccggccggatacacagtcaccacggccgtcgagatgcagcagcatatgaagcagccagctgcggaccatttcagcttcgcgcctttcaggaaaaccttcgatcaggaggttggtataggtggtgatcaggtgccatctaatcagctcggacgatcagagacgcatcatgccggccgggggcagcagccgcacggcccggtgctcgcgacgacggccgtgcctgctacagctttcctgatcagtaggccatcgaaccccgtctcgactatagtgccacctgcaatgcagcacgcatcagttgtcctcgataatgatcagttccatgtgccagcaatccttctccaccaccatgacaaattccagccgcatcagcaccaacaggaacagacacaacaaaagcttgatcgcaggtctgccagtgccggcttggaagaattgataatgggctgcacgtcgtccacaaacacaaaaggagaaacttcaattgctcacccccaagagacagagtggccttacccgtactggccatctgataaccaagatcatcatggatagtagtgacaggacagataaataatggcgatgaatgctaaaggaacactaaccacaaccacttctactggaatgggttttgtctgcttgaatatgcagcgttgcttttcttggaggatgtacacctacgttcgatctatagtggagggatcggaagaccagagaaaaaacagatctctgtagatctccctcaaaaagaaaatgagaatcaaattactcgtgtgtgctctccaagacagaagagacaaaatggccaacgaaaagaggagaaaagatcgatgggaggaaaggtatcgtttgtgctgacattgaagggatcatgtgtgggcccctagatgtattagagaccatcttagtcaagtagtacaactataatcagttcacggtttattgtagtttttttattcgtgctacctaatttccaattgtaaaaagtattgtttgcctcccttttaatattttttgctttccaaattgatgctgattttagtttccctcggtcaatttgtgctaatatgcatcacggagaaataaacttagtaagaagctggaaattcctttcttttaggagcacaaacattgtttatttgttgttattgttaatgtagtttttttgcaagcagaatt

SEQ ID NO: 72114 - DNA, 3151 bp, Zea Mays
caaaatttgagagaaaccggaaaagaccacaatttttatgatcctggctcctcgataaagaacattattcttttggtttctctgccccttgcgaggagccgtttttttagatggccaacgctttttttatggacggtaaccgaagctgaagccataccaaatgtgccacttgtttcctcctgaaagctaaaggcctgattgtttcgcccatcgacagaggttggtttcaggggggtcacagcaggctcttttgcagtgaacgaatttgcgagctcaccgtgctccacaagtgaaaggagacaggcaccgcgagagggacacttgacaaagccagacaccaactcatgcggcgttgcgtacttgtgttatcctttgcgtcaccatggcagagggcccagctagagctagttgctgctttgccattgcctttctccttctgggagaaactggagaaaattgcttctgaaggtcgccaagacagcaggagttcagaagcatcacaggtcatggagcacacagtttgagatagagcaatgaacatcctcgttgataaacaacggcagccgactggtcaaccgggacggtccagcgaccgcgttttcctcgctttgggtactacttgtatacacagattatcagtgccacagagagagcgataattgccagaactgtgaagatgagagcctgcaaggaacgatcaaagtgtggctgttagactggactccagctgttatcaggttcaagcaagcaagatatttcaagcaagtgcccacatatttcaagcaagtgcaagttcatcagaataaaaaatacagaatgcaaagaactgtatcaagttaagtgattttgcttttaacattgtgacaccagatgttaggcaccgcaccgcctactttcttagctgggtgtatggttatcacctgtcagagacccattttcttgccaaaacattaactaaggtgtggtgaagaaattgttggccatatcttagaacattgtttgccgaaaaggcatggctgtgtctctataggttcaagggcgcaactagaggcatggaatcggcacgtaatcaaactgttttcaatttattaatgaaatgacatgcagttctcctgcgtgttcgaggaaagaagacatggcacgtcaggtagtgatccagacatatcctaagttgtattgcatcatataagcaataatatttgatatccaaatagccaaacaaaaactacggatatccacaacatatggaccttctaacagatatcagatacctgagtatagtttttaaggggaaattggattactcgttgttgttagaatgcaacaccatggtaccaagggtatcaaaaagaatcagagaggggaacgtagatctaataccgtgcaatagagagatgacatattaatatgcttatatgcacacacacggtgtagaaaggttcgagctgtctgaatgcaataacccacgttctctttgtgagtttgtggtggatgtaaagatgcaagagtgggttgagcttacatactcagatgatgattgagataaggagcggaactgagaaccaagagattttaaactcgatggtgccggcagcccctgaatgtcgatggcagcagcccttgaacactagttgtccgatggtcctcaacctgacatagcctactagtgggaaaccgttactatgttgctccataatccccttttatagcacaagggaggagagagttacaaccctatctacacggtgggccccacccaacaaaggtccaactactacgcattgcacatctccggtgtgccatagtggcgagcatggcataccacatatgcagttatgagagcccacgttgtcgcctacggcgtaattggtagccacagtagactcacacggtacatagtgcttgcaggtacgcctgcggtctcagacgtggccacggcaatgccttttgatcacaatgtcgcaataaatatgaagaaccttatctcgaccaccaggatctacgcaatcgacctagttcaggggcgcatatgatatcaaggttgtcctgccctaggggcatcttggggagtgtcacggcctcctgcataaagccctcagcttgtagggcatggcctcgggacacagggcccaatggatgccagactggcaccaaagccccattgtaggtctaccttctactgatgaagttctagagagtgttttaccagcatctaggggtatgacttccccaaacgctgacactcgcccaggccccaaattctatacaaaatgttttggaattcaatttattagagaaaaaatcgcccacgcgctatcaaacaaaactacaaatcaacacaagtgaaatcatatcgctatatcaactaccaggacacatgatgttttatagacatgaatagttgcactttcacagggaaacacattggacatctatttcattcatactggcctactgggaataaacatgttcagggtttggacgaaccgcaacagctgatgcagctagaccagggcgctctcgaggatccttgttgtagtacttgcagcagtaaagtatggctgcaaagtaccaaatcaaaggacacaagaaacctaaaagaaaactgcaaccacagtatgctcaatgagcgattgtgaattgaagttgatatgaagactgcagtagtaaagcatacttacgtagaccatcctatcccacaaccacagcaaggcagccgcctctcaaagattgccaatcgtgggttttcttcgtctctgagtagtgcatacttgccagcacacccctggcaatggcaaaattcatccgagtgtgctatgcaaatcaaagaaagaatatgatcagcaacagaagtttctttttaaatctggcaatttaagacaatgtacagaggcagtatcccacatcctgtctcgaagtgttaatgaagagcattttaaaaagatatgtcagtagccagattaagataggaacattgtccagttgagaagcacatttttataagcatgaagtcaataatataagtatatatatttgattgcagttagcttataccatgctgatgtttacacatgacaggtataccaacatccaattctgaaggtacaataacatcgcaattttacaatgacagactaatgttgcaaaggct

SEQ ID NO: 72115 - DNA, 667 bp, Zea Mays
atgaagacttggtcacttccctgcaacctaaagtcaggatgtgaacactatggataaaaatgatgttgtattgatgagatgttgaaattagactagatgcaaatagagtctattaatacttaatatggcgttaaaagattgaaagtaaggactcactttagtaagctatttctgcaaaagtatctaagttgattcttgctaaagcctctccttgattcctatttatccagcatacccttgagagtcttttccttagtcgggtaagacttgctgagtaattccatactcagggttttattccctgttgtttttcaggttttaactttgtgctgctgttgatggtgttaagtgccggtgggctcggccatcttataagcctaagtaactcttctatacttcttattgaggatggtcacttgagctagcatatatttcaaacttatacttttgtaatcactccgataaactaatgtaaaatttttgtaacttgtaaaatttggtagtaagatttccgctgcaataatactggtgtgtgtgatttgtattacttaatcccgcgatcttggttgtaagtggtttatccgatgtccttggggcaatcggacagatcctgttaagttatctggtgcacatgcatagccgtctgaagtctttgggacaaggacag

SEQ ID NO: 72116 - DNA, 719 bp, Zea Mays
acaccaagaatcacatcacacagcgaaccgagaaaccaacacaacaagcaaagcagcgatccgacatccgagagatggacgcggtgatgttcgggctggagactcccctgatggccgcgctgcagcacctgctggacgtgcccgacggcgacgccggcgcgggcggcgacaacaagacgggcagcggcggcagcgccacgcgcacctacgtccgcgacgcgcgcgccatggcggccaccccggccgacgtgaaggagctgcccggcgcgtacgcgttcgtggtggacatgccggggctgggcacgggcgacatccgggtgcaggtggaggacgagcgggtgctggtggtcagcggcgagcggcgccgggaggagcgcgaggacgacgccaagtacctgcgcatggagcggcggatgggcaagttcatgcgcaagttcgtgctgccggacaacgccgacgtcgacaaggtcgccgccgtgtgcagggacggcgtgctcacggtgaccgtcgagaagctgcccccgccggagcccaagaagcccaagaccatcgaggtcaaggtcgcatgtctcttgtaaccttttctggtgaagatcgtgtcgcgatgaatctataagttaccgtttgttttcttttattttgatgatttagaatagaataggctatttttttagaaatatgttatcccaccactttctaaacttatcatataagtctat

SEQ ID NO: 72117 - DNA, 784 bp, Zea Mays
aaacgtccacgaccactagaagccgccagccagcctgcctatttgcctaaacctaatccactagcagttcggcactgcggctgcggggatgcggcggccggcggcagcggcactacggagccctcagccagcaccaggttgcggcaacggcaacaaccagcaagtggccagcgattcacgggttcaggcgttcagcgccacgccgtcgtcgccccaagccagacctccagtcaggaaccaccgattgtgatttgtgaagaactgtgaattgattaactgaagatgtcaaatagtggaggcaagggatgtcgttcccgtgctagatcaatgccacccgagaagcaactaggtatttcaagtttcttgcctgaacctccaccgccgcctccttctacgaaaggtagtaccaacggtcagccctgcatggatgatgaggaacaagatgctgaaagtgatcccgacgtcatgaatgattatggtgagctttgaccgtgagtcagcgactagtcatggtgcttaatgcttgacaacatgtttggaactttagataaatatgttgctgtgtccatgtgcggatgtgcctgtttctgtgtgttgtgtgtaatgaaccttgaacttttttggaacattggggcaagaaaaggtgccagccgcatggagcacccttctgtgtggctgtgtgtaatgaaccttgagcactattctatgcgacaacaactttgtcattgtgtgttcttaaatatgtgtgcccgtgtgatgtgtgcatatctgaacaaaaaaaaag

SEQ ID NO: 72118 - DNA, 4635 bp, Zea Mays
aagttttataacaacaaggaggtggcaaatgcaccggggcttgcctgggataacactaagtgttgttagatgatgaccacttggtgagcatcttccatcctggcacttgatcagatcatccattcctctggtttattcgttagcatcactttgaggttaatccaacacttttcctccacatcgtgcgatcaaataacgtaccacatcatgatccgacttgatttttcttgcaagaacgacgacagttccttggtctcccatttcgtcgaacacccggcgggcgtcatattggactgtgcttcttctccactaaatccgatgactatgaattgcacaagtcaacaactaggcatccatggagggaggtgctgctgttcctagcagagaggggctgggcgagctcctgcagaggggagtacgccgagcaggaggagccaccatgggcgagctcaccatgggaggaagtgagggcgcagctagctgccatcaatggagagctggagacgtcatgtgcagctcacatcaggaagggatgagcgccatgctgctagcaagggtataggggatggtggcgagcagaggggctaggagatgagagggcacggtggaggggatgggggataggcggccatgggagaagccagggaagacaacggcagctgctgctccacaactgcaatcagagaaggagacaccgtgtgggggaagcaagggaggacggcatggtggaggtagccagggcagagcgccgtgaggagatgaagcctggcttcggtcggctgggagaattccagaaggaagaccacgtgggggaggaggtggcagtctaggaagagaataagaattcaaattttttgtttctccaaatttttcttttacaaaagactacaaaatttaactctgttcttaagtggggatttttagtgagatgcaaatggaccaaccaaaataatattggttataagatttcagacgtggttgatttggttaaaatcagttgtacattcatctgatcaataaatttttaaacaggcaccagactcgacatatcgcgaaataaatacgcgggatcgatgtagcatcgaaattgtgatcctttcggaagcgacgtcacgcatcattcacggggcgagaagctgggcgctgtccagacaccggttagcacccgccacacgcgtcacggtgtcaggccacagagagacacgtgcaacgcaagcgtgaaagaatttcaaatgaagtttaagaagctacttttgatttcaaaaattatagtttaggcaagacgtcgagggctcaacccaaacgatactggattcgatgttccaaagattaccaaaggctgaattttaaaagaaatggatttggaaaaatttagacagacggaggcagacacgagatcaaaatcgtgataaacgaggttgattaaaaattagtgtccaatttatttaccgatatcccgcgcttaaatccatagtcgctgttgaacgggagacaaacacctggggtgttacaaccttcccccttaaaagaatctcgtcccgagattcagaacgaaagacttctaagagtagagaggcatgtaactcttgtccatatcagttataatcataagacagttccaagcaaaggcgagtgtctcagaatgttgtttctctagtggacatatcatgtatagccttacgctaatttagagatgtccaccaatagagacgatgtctgccagaagaacacataaggtttcacgtgtgcagtttgttttttttctgatgacactgtactatctgagtctgttgagcaagcgacagatatgcgattttacccaaacagaatcagatgcaacctcttgggtagaaatccatttggtcaggttgttcatccgtttcttccatgcgaaatgaacagacttggttcgggaatacatggataaaataagagagcgaatgaacaaactcctgcatctcagcagctgggaaagtcaatctccattttgagagctaaccagttgttttcccacactaaaaagctccaaggcttcacctttacaaaaaggacataaagggaacttgtatgagtagtcactaccaagatcaaaagaaaagagatcacatatgaaagtggtatgctcgtttgatccaacagagacgataaatgttgcttgatcacttcacaaacaacatagaaattgtttcaaggaagtagtttacggaagacaacatatcagtgtagttccacaatggatcatgactagagaccttgataccagcatccgacgagtagcacatccctgtgtgcgcattcaaaggaggctctcagtttcgctgcggcaccataagtccttaatcgtgacaccactaccgaactgacaccaataacaatctcacatagcaaaaatagattgtgccaagataacacattgacatagtctcataatggattacaactactaactgtgataccagcgcgtgccgagtagcacaaccatgtgtgcgcacccacagaaggccctcgatttcgtcgcagcaccatcggttttagtcataacaccattactagatgtaaccaataagaaatctcatgcggtacaaatggattgagcaagggtgacaatatacaatgagatactccacatgtaagaatgattacaagtagagatccaaatagatcatggcccgatgaactgaacaaggcatggccatgacctaaacttattggtgagcgagtacgatgggagactgatacttcatccccaagcatatttctatgcccatcgcagaaattacaaggtcaaggattattatctgattagatacggagggaaaacaatcataggattaagttggtatgcctttgatagatatgagaaaaccaaaggcaccgaactcagtaaaatgatcggacatatctttcctaagttaggtcgataaagtcacatggcggtccataaaaacaggcaaactcgataaggtacatcagcttgcaccaaccgaacaaaggtatgttttaggatgaaaataggaccataagagctacaagttggctgttaagatcaggggactcgagattattatttttttaagtttgagtgcatcttaggtccaataaggggattacctaaacatctatttatatgaccttgatcacaaagtaacgatggaaaaattcagactcgtccgcatttggaaactggggaaaatttcaggggattaacatcgatttgggtcatggctcctagatgaggacatgtccaaatttttagtttacacaaacataccaccaacattctatcagcagaaacacaccagaacaaacacaagttagactagcggtcaaattaagaagaacctcaggccacataaaaacatgtctaaaggacacatcaaacaaagctagaaattacttataggacagtaatgcttcacacagttttcagttatttattatcagaataaagatgagaaaagcatgttcatttacaatcacctattattagaataaaggtgagggaagcatttctgtgcgcaaacaacaaacacaatgcaacaatcaagatgcatgctcgtcctattcgtcctcacgaattttgccaacttaatatggcaatagcgctctatatcggtggcatatctacgtctctctcgatatattgctagtcgtcagctacacatacgagttcgaagttagtgtacctgtagaaaaatccattacagcccaattcccaatgatgcaattcacacatgacagtttatcacagtttatactccatatattgctatatggaggccagctcctcattaagcgccgagccacgcataggcgccgctgccacactttaaccacagggcagcccattgtggtacattaccttcttacctaagcgtaggtgtgtcgttgcaagtacattacacttctcagtattcccatgtctgtatacccatacacatccatggggtactgaatcccaaaaagtaattactccacttcgcagccttcatatatacatatgtgtaacatgtatataatcaagcgctttttatgctcttccctagaccgacggttgttcggtcatgctctcacatctcaccttaccttgagcgtcgatccattcaaaactgaatgacctcaaaaataacattacacatgtatgcattacccttcccagattgtgggttagtattctgaactaagccacctaatagtccttaatttagggcttaacagaggatgtcgctagcattatagtttttcaaatatgtttttcaaaaccaaacaatgtgtttagttgaaaatagatttttcaaaaccaaaattttgttttaaaaatacgtatgtgaccgtatcatacttaatcaagctccgatgccagctgtcgcagaacctcccaagttatcgggcccacatgcacctgtccttgtctcaaagacctcagacagctatgcatgtgcaccaaacaacttaacaggatctgtacgagtgccccgaggaccccggataaatgacttaccgccaagatcgcaagattaagtaaacacaaatcacacaccaatatttgcagcgaaaataaattatttattacaaaatggttacaagttacaacatttacaagttatagcaagattacaatatatatcatcggag

SEQ ID NO: 72119 - DNA, 5077 bp, Zea Mays
aaatggtgctccaaaatttgttggaaagcttaagcaaagtactacaattctcctataattactaagagcttactctcagtttaacttgggcaaacaaggtcattttcgaaatctgtacagaatctggacagattctgaaactagacttagaaaaatcataactcctaaactactgaacctatggtcatgaaatttttacacaagtaagataaagaagttatctacaagttttatatataacacttctacagaaaacatggtttacttcattgaactagctgcgcaattaaaactgtacctgctgcccgaaacagtaaaaattcaatttaactcctattttggttaaccacagcttaacaacgcatcaatcaaagcattccttgcctaaacagaaccatcctctgtgttttataacatccatttaattatacttgacatatgtactctctaaaacacttctcgtaaaatttgcacctaatacctaaacttcccctcaaacaacacttctactatccaatcatgacgtcaaaaaaatcatgacacacaaccaaattatttcatcatacatcaaacacaaccacaatgataattatctaaccaaaccatttattaattaaatagccacagaaatgacttggctcaccacatcatgatccgacttgatttttcttgcaagaacgacgacagttccttggtctcccatttcgtcgaacacccggcgggcgtcatattggactgtgcttcttctccactaaatccgatgactatgaattgcacaagtcaacaactaggcatccatggagggaggtgctgctgttcctagcagagaggggctgggcgagctcctgcagaggggagtacgccgagcaggaggagccaccatgggcgagctcaccatgggaggaagtgagggcgcagctagctgccatcaatggagagctggagacgtcatgtgcagctcacatcaggaagggatgagcgccatgctgctagcaagggtataggggatggtggcgagcagaggggctaggagatgagagggcacggtggaggggatgggggataggcggccatgggagaagccagggaagacaacggcagctgctgctccacaactgcaatcagagaaggagacaccgtgtgggggaagcaagggaggacggcatggtggaggtagccagggcagagcgccgtgaggagatgaagcctggcttcggtcggctgggagaattccagaaggaagaccacgtgggggaggaggtggcagtctaggaagagaataagaattcaaattttttgtttctccaaatttttcttttacaaaagactacaaaatttaactctgttcttaagtggggatttttagtgagatgcaaatggaccaaccaaaataatattggttataagatttcagacgtggttgatttggttaaaatcagttgtacattcatctgatcaataaatttttaaacaggcaccagactcgacatatcgcgaaataaatacgcgggatcgatgtagcatcgaaattgtgatcctttcggaagcgacgtcacgcatcattcacggggcgagaagctgggcgctgtccagacaccggttagcacccgccacacgcgtcacggtgtcaggccacagagagacacgtgcaacgcaagcgtgaaagaatttcaaatgaagtttaagaagctacttttgatttcaaaaattatagtttaggcaagacgtcgagggctcaacccaaacgatactggattcgatgttccaaagattaccaaaggctgaattttaaaagaaatggatttggaaaaatttagacagacggaggcagacacgagatcaaaatcgtgataaacgaggttgattaaaaattagtgtccaatttatttaccgatatcccgcgcttaaatccatagtcgctgttgaacgggagacaaacacctggggtgttacaaccttcccccttaaaagaatctcgtcccgagattcagaacgaaagacttctaagagtagagaggcatgtaactcttgtccatatcagttataatcataagacagttccaagcaaaggcgagtgtctcagaatgttgtttctctagtggacatatcatgtatagccttacgctaatttagagatgtccaccaatagagacgatgtctgccagaagaacacataaggtttcacgtgtgcagtttgttttttttctgatgacactgtactatctgagtctgttgagcaagcgacagatatgcgattttacccaaacagaatcagatgcaacctcttgggtagaaatccatttggtcaggttgttcatccgtttcttccatgcgaaatgaacagacttggttcgggaatacatggataaaataagagagcgaatgaacaaactcctgcatctcagcagctgggaaagtcaatctccattttgagagctaaccagttgttttcccacactaaaaagctccaaggcttcacctttacaaaaaggacataaagggaacttgtatgagtagtcactaccaagatcaaaagaaaagagatcacatatgaaagtggtatgctcgtttgatccaacagagacgataaatgttgcttgatcacttcacaaacaacatagaaattgtttcaaggaagtagtttacggaagacaacatatcagtgtagttccacaatggatcatgactagagaccttgataccagcatccgacgagtagcacatccctgtgtgcgcattcaaaggaggctctcagtttcgctgcggcaccataagtccttaatcgtgacaccactaccgaactgacaccaataacaatctcacatagcaaaaatagattgtgccaagataacacattgacatagtctcataatggattacaactactaactgtgataccagcgcgtgccgagtagcacaaccatgtgtgcgcacccacagaaggccctcgatttcgtcgcagcaccatcggttttagtcataacaccattactagatgtaaccaataagaaatctcatgcggtacaaatggattgagcaagggtgacaatatacaatgagatactccacatgtaagaatgattacaagtagagatccaaatagatcatggcccgatgaactgaacaaggcatggccatgacctaaacttattggtgagcgagtacgatgggagactgatacttcatccccaagcatatttctatgcccatcgcagaaattacaaggtcaaggattattatctgattagatacggagggaaaacaatcataggattaagttggtatgcctttgatagatatgagaaaaccaaaggcaccgaactcagtaaaatgatcggacatatctttcctaagttaggtcgataaagtcacatggcggtccataaaaacaggcaaactcgataaggtacatcagcttgcaccaaccgaacaaaggtatgttttaggatgaaaataggaccataagagctacaagttggctgttaagatcaggggactcgagattattatttttttaagtttgagtgcatcttaggtccaataaggggattacctaaacatctatttatatgaccttgatcacaaagtaacgatggaaaaattcagactcgtccgcatttggaaactggggaaaatttcaggggattaacatcgatttgggtcatggctcctagatgaggacatgtccaaatttttagtttacacaaacataccaccaacattctatcagcagaaacacaccagaacaaacacaagttagactagcggtcaaattaagaagaacctcaggccacataaaaacatgtctaaaggacacatcaaacaaagctagaaattacttataggacagtaatgcttcacacagttttcagttatttattatcagaataaagatgagaaaagcatgttcatttacaatcacctattattagaataaaggtgagggaagcatttctgtgcgcaaacaacaaacacaatgcaacaatcaagatgcatgctcgtcctattcgtcctcacgaattttgccaacttaatatggcaatagcgctctatatcggtggcatatctacgtctctctcgatatattgctagtcgtcagctacacatacgagttcgaagttagtgtacctgtagaaaaatccattacagcccaattcccaatgatgcaattcacacatgacagtttatcacagtttatactccatatattgctatatggaggccagctcctcattaagcgccgagccacgcataggcgccgctgccacactttaaccacagggcagcccattgtggtacattaccttcttacctaagcgtaggtgtgtcgttgcaagtacattacacttctcagtattcccatgtctgtatacccatacacatccatggggtactgaatcccaaaaagtaattactccacttcgcagccttcatatatacatatgtgtaacatgtatataatcaagcgctttttatgctcttccctagaccgacggttgttcggtcatgctctcacatctcaccttaccttgagcgtcgatccattcaaaactgaatgacctcaaaaataacattacacatgtatgcattacccttcccagattgtgggttagtattctgaactaagccacctaatagtccttaatttagggcttaacagaggatgtcgctagcattatagtttttcaaatatgtttttcaaaaccaaacaatgtgtttagttgaaaatagatttttcaaaaccaaaattttgttttaaaaatacgtatgtgaccgtatcatacttaatcaagctccgatgccagctgtcgcagaacctcccaagttatcgggcccacatgcacctgtccttgtctcaaagacctcagacagctatgcatgtgcaccaaacaacttaacaggatctgtacgagtgccccgaggaccccggataaatgacttaccgccaagatcgcaagattaagtaaacacaaatcacacaccaatatttgcagcgaaaataaattatttattacaaaatggttacaagttacaacatttacaagttatagcaagattacaatatatatcatcggag

SEQ ID NO: 72120 - DNA, 1998 bp, Zea Mays
cacaggacaacaccactagtacactagagggtagaggcacgggccgcgacggccgatcaggtgagtagccggccggcagcggaaaccgaaggcacggccacagcaccaccgcgcggcctcgagagtcgaaaccatcaggccatgttcggttggtcagggattggccgggattgtggcgcaatccacgtggatcatccccggctggaaactttcccgattcacattttaattgtcttcggttcatccaccaggcgaggggagggcgacgcgtgcggctagcgaggcgatggttgcgcgacacgctgacggcgacgcctgcgaccatcgatcatccattgttcatctccatccccttcggtggccaattttctctccgggagaaagctggcgcgggttggaggtgggaagaaagagaaagaagatgttgttgcgccttcgattggattgggttggccttggagcgcgtactgccgccgcatgtattcgctgttccggccctgattctatggtgcaccactgtgctgtgcgccgccccagccctcgaggatttagcaaactgctcagatctgttctcgctttgcttcatcagtgaacactgaacacggtgcgtgtgtggccgttcggttctgctttgacagatttctatattgattactcccaccttcgggctttcgatcagcttggtctagtaattctagacacaagttgcttgctccgtttggttcagagggtgtgtcagctcgttcttagcaagcttatcatggttctgattccatgtagtgtcagtaccaaacaaccaccaactgtggtaggaaaagagtagtcatatcaacatgagacatggttggtggtgcgtggtctggagtgataaaccgaagagatcaaatgagctatttcaatctgttagaataataagtggctagttgataaagagcatgaacataatgtcctcttatatttttctgtttaattagtttaatcaaaagcacactttacgcaaccttaaatcttatgactaccattcgctttaggtacttagatctatccctaaatatatgtagggatttttccctgttacagcggcattcacgtatgtatggagttttctatatatgattgttgggcctaataagtgaatttactgaagcaatattttcttttgttttttttcaatttaaggttttgattatctgcatagctgtattatacatttcactcctacatgttcagttttaatagtagtgtctgctattagttcttgcatctgttgtgttaaccaatcctgctgctagttcaattctagtgatctactaccattcactttcctcctgctgttattcgctttcctactgctactagttcagttcttgcatctgttgtgttgaccaatcatgtgtgttgcctctcaggtccttagcgatccgaagaaacatgcaatctgaatgtatattggacctacagacttgcttgcttctttaccattgcaatctgaatgtatatcagacctgcaaacttactgtatatatttattttggtgaccatttgaaatctaaatttatatttatatttttcatatcatatctaataggagtgtatgtcttacatttggttgcaaggtctaatatgcattttgggcttcttttgagtcatgttgttggtgtggaaccgtggaagtaggatgtggactgcaaggatggctagtttactctttactggcattgacagtttacttgtcgttcttcagtcatttggtggcatgtatcatcaagcttctgtcctttctatacattgttatgaacgttgctatgccttttatttcgaatgctgatgcaatctacgagtttctatccttgtatgtgtgcatagacattgttatgaatgctgctaatgtcttttattttgaatgcttatgcaatctattgagttgtatgtgtgtaaagacattgttatgtgtacggttttctatgtcatattcttttgcataaaagcccagttgta

SEQ ID NO: 72121 - DNA, 953 bp, Zea Mays
gaggcacgggccgcgacggccgatcaggtgagtagccggccggcagcggaaaccgaaggcacggccacagcaccaccgcgcggcctcgagagtcgaaaccatcaggccatgttcggttggtcagggattggccgggattgtggcgcaatccacgtggatcatccccggctggaaactttcccgattcacattttaattgtcttcggttcatccaccaggcgaggggagggcgacgcgtgcggctagcgaggcgatggttgcgcgacacgctgacggcgacgcctgcgaccatcgatcatccattgttcatctccatccccttcggtggccaattttctctccgggagaaagctggcgcgggttggaggtgggaagaaagagaaagaagatgttgttgcgccttcgattggattgggttggccttggagcgcgtactgccgccgcatgtattcgctgttccggccctgattctatggtgcaccactgtgctgtgcgccgccccagccctcgaggatttagcaaactgctcagatctgttctcgctttgcttcatcagtgaacactgaacacggtctaatatgcattttgggcttcttttgagtcatgttgttggtgtggaaccgtggaagtaggatgtggactgcaaggatggctagtttactctttactggcattgacagtttacttgtcgttcttcagtcatttggtggcatgtatcatcaagcttctgtcctttctatacattgttatgaacgttgctatgccttttatttcgaatgctgatgcaatctacgagtttctatccttgtatgtgtgcatagacattgttatgaatgctgctaatgtcttttattttgaatgcttatgcaatctattgagttgtatgtgtgtaaagacattgttatgtgtacggttttctatgtcatattcttttgcataaaagcccagttgta

SEQ ID NO: 72122 - DNA, 3303 bp, Zea Mays
ccgagaccccgacccaccccgcctcccccgccgccgcgctcgcgctcccccgcgacagccgccatacgccctatctccgccgtgcctgcgcctcctcccccgcccgcccgagacccgccaagtttcccttccttgcacggcgagatccaccatcggcgcccccttccctggcgagccacagccgtccatgttcctggccaccggcgacctcccttctctagcccttggcggcgagccaacacctcctcccatggctgccccccagaccccagtcccgtccgcgcatccgctcttccgtcagcgacgcacctattctcccctctctccccgacgtcgcccatggcgtggacggcgacctccctcaccctgcaactctgcacgtgtaagggccgtgttgcccgcctcctttccccacaccggcgcagccccctgtcgccgcggccccttccccaaacagcacggcaccacatgctccccctgccgcgcccgcactctccttccccaaataacacggccccacatcgctggttgcctcgcctcgccggggacccagcacgatggtcagggagctggtgggtgggggagacagggaggagcggaggaggaggtcaagctcaacatggacattgtgttcgtgacgctgccttccccaccgacaccaacgactcactccagaacccggatctggggcccttcctcctcaagccatggtattgggcgagggtggcgccgcctcgcgtgcttgagttcgccgagcgcgccgccagggtgctcgagcgaagaggtgagggcaccgagctcgagctcgccatgaatctccacatcgctgctggcatccactgcggactcagccaccaagccctgacattgtagccagtttcttgcaatcagaacgaatgccagttgatacaagtttgtggcagagatttctctgacacgccaatcagtcttcgatgcgaatgcttgttgctcatatggacttgtggttgtgataatgagttcatctccgtgcacatttgtcgtccttgtggttacagcagttaactgagtagtctctcttgactgcaaaacaagcaatctgttgcctctgctgtgatggtggagcaatttcagcgccaagaatgatatctcgcattttagattgtgtcagtgcagaagtattaacattgtttttctttgcataatcagaaaggatgaggtcccttagtgcacactcaaccttcaaccactgttcatcattcagagatggccatatatgatgtgtttcagtaataattgttttgtcaggtttgagcaacatctttgccttctcattattcacatgaagtgcacgtagaataagcacaatgtgggagaatgttgtgtatgatgatatacttttcaaccaatcatcatatatattataaagaaccatctgtggttcagttgccttcagtataagatcaccaaacttctcaatcttcaagcaagcctggaaaggaagctgcagctcactgcccttaataacaatgttagggaagtcaggtagatggacctccaagggatccaacatgcccttccttgtcacaacaatttgctttggctgctcttctacaggaagagatcgaaccaatgcagcaacctcctcagcggttttccacttggccagctgcccaagacgcttttgccccgcccatacacttgtgtggataacctgcacattattatccatactcagtttaaacctacctatgttcagggttttacagaaaaacaaaatcacatgaaaactagagcagaaattcgaaaagaacaaaccttaagaaaaagttgacccgttcttggattgaaaaatgaaaatagcaccattaattggtttggtggtcaagttaccctaaaatgttttgtgaatagtgactcgatacacatttgtatcatccacgaaccatatgatttgattgctgaatatctctccatagttctgtgaagacaggtatggttcatatattcaaatatccaaacctcatttggagttgtgataccagcaacctttgacatcgattcaagatgctactggagtgttattcatatgccactgcacaaatggacgttgacacgttgtagtgatcacactgtcacgagagctgagcaaactacagcctgcaagagctacacgtggcatgcttgaccacatcatggtggagaatgcaagtgttaaagttgcattgaatcgcattgccgttgtttctgtcctggatgcacataccctgtcagtgatgtcttatgaagcttggaggctcatacatctgtttctgttggctctctctagctatatgcagtggagctgctaatatgcatgaagtttgggctaggtgagcttcctctttcacttttcaaaccagtataggtattggccgatgtcaagaagacaaggccggcgacgagaggacgacagcgtgcaagaagagaaggcccatgttaggcgcaactatagggctcaaggtcaatcagttgtggtcacacttttccatttttacgttcagctaaactgaccccctgtctcatggtgcaactgtgcaaggataggcaacaagtgttcaacaatatgtctgtggatcaattgacctgcatttcagcttttagttgaggatcaaaatctcgtgtcgttcagggccctcggtagagagacattaatgtgtcggcaccgtggatcgtcgcagttgtgggtcactgtaacggcactggtcacaggcaccatctgcctctgttcgtcctcctctattggcctcctcagcacctacagggtccagatggaaaagtttctataatacatatgtaacaaatacatactccttgttcaagagatcgtaagcaagattgtaaacggtatccaacgcagaagcacctaatatggttacagagtattactgatgggcttacctgcagactgcatgctactactcaaggatgttgttgcaaatgagttgtggagaaccgtagatgcaaatggttggagagcatcttctgcaccacacatctattggcctcacataccagctgaatctgagagcaatgggtacttgtgtgtccggtgcaacggcggcttgaccttacaaatcagtgttgtatgactaatataaaactctctctctctaaagtagcatagttcaccatgcaagttttgtgtattcatggcaacatatctgaaagatttaagattacttctaccttgattttgtagatatgaaatgttgttgtcattgcacgaatcattaatgacttgattttgctctctatatgctatcttagaagtttcagagttca

SEQ ID NO: 72123 - DNA, 3456 bp, Zea Mays
ccgagaccccgacccaccccgcctcccccgccgccgcgctcgcgctcccccgcgacagccgccatacgccctatctccgccgtgcctgcgcctcctcccccgcccgcccgagacccgccaagtttcccttccttgcacggcgagatccaccatcggcgcccccttccctggcgagccacagccgtccatgttcctggccaccggcgacctcccttctctagcccttggcggcgagccaacacctcctcccatggctgccccccagaccccagtcccgtccgcgcatccgctcttccgtcagcgacgcacctattctcccctctctccccgacgtcgcccatggcgtggacggcgacctccctcaccctgcaactctgcacgtgtaagggccgtgttgcccgcctcctttccccacaccggcgcagccccctgtcgccgcggccccttccccaaacagcacggcaccacatgctccccctgccgcgcccgcactctccttccccaaataacacggccccacatcgctggttgcctcgcctcgccggggacccagcacgatggtcagggagctggtgggtgggggagacagggaggagcggaggaggaggtcaagctcaacatggacattgtgttcgtgacgctgccttccccaccgacaccaacgactcactccagaacccggatctggggcccttcctcctcaagccatggtattgggcgagggtggcgccgcctcgcgtgcttgagttcgccgagcgcgccgccagggtgctcgagcgaagaggtgagggcaccgagctcgagctcgccatgaatctccacatcgctgctggcatccactgcggactcagccaccaagccctgacattgtagccagtttcttgcaatcagaacgaatgccagttgatacaagtttgtggcagagatttctctgacacgccaatcagtcttcgatgcgaatgcttgttgctcatatggacttgtggttgtgataatgagttcatctccgtgcacatttgtcgtccttgtggttacagcagttaactgagtagtctctcttgactgcaaaacaagcaatctgttgcctctgctgtgatggtggagcaatttcagcgccaagaatgatatctcgcattttagattgtgtcagtgcagaagtattaacattgtttttctttgcataatcagaaaggatgaggtcccttagtgcacactcaaccttcaaccactgttcatcattcagagatggccatatatgatgtgtttcagtaataattgttttgtcaggtttgagcaacatctttgccttctcattattcacatgaagtgcacgtagaataagcacaatgtgggagaatgttgtgtatgatgatatacttttcaaccaatcatcatatatattataaagaaccatctgtggttcagttgccttcagtataagatcaccaaacttctcaatcttcaagcaagcctggaaaggaagctgcagctcactgcccttaataacaatgttagggaagtcaggtagatggacctccaagggatccaacatgcccttccttgtcacaacaatttgctttggctgctcttctacaggaagagatcgaaccaatgcagcaacctcctcagcggttttccacttggccagctgcccaagacgcttttgccccgcccatacacttgtgtggataacctgcacattattatccatactcagtttaaacctacctatgttcagggttttacagaaaaacaaaatcacatgaaaactagagcagaaattcgaaaagaacaaaccttaagaaaaagttgacccgttcttggattgaaaaatgaaaatagcaccattaattggtttggtggtcaagttaccctaaaatgttttgtgaatagtgactcgatacacatttgtatcatccacgaaccatatgatttgattgctgaatatctctccatagttctgtgaagacaggtatggttcatatattcaaatatccaaacctcatttggagttgtgataccagcaacctttgacatcgattcaagatgctactggagtgttattcatgtgagtgtaatttagtacatgatccaactggtaacaaactttatgatactagcatatcacataatagatgagattactagaaacagctcatgttattgaatatagaaatttcagttctattgtttttacacaaatttgtttgtgatgcttcaaaccgctaatgattttttttaaaaaagttgtgcaatgagcatatcacataatatatgagaatcttaggaataaaccaagttgctaatgagtaaaattttggctttgctttttaaaaaatatgggttcaagttgttcctgacagatgccactgcacaaatggacgttgacacgttgtagtgatcacactgtcacgagagctgagcaaactacagcctgcaagagctacacgtggcatgcttgaccacatcatggtggagaatgcaagtgttaaagttgcattgaatcgcattgccgttgtttctgtcctggatgcacataccctgtcagtgatgtcttatgaagcttggaggctcatacatctgtttctgttggctctctctagctatatgcagtggagctgctaatatgcatgaagtttgggctaggtgagcttcctctttcacttttcaaaccagtataggtattggccgatgtcaagaagacaaggccggcgacgagaggacgacagcgtgcaagaagagaaggcccatgttaggcgcaactatagggctcaaggtcaatcagttgtggtcacacttttccatttttacgttcagctaaactgaccccctgtctcatggtgcaactgtgcaaggataggcaacaagtgttcaacaatatgtctgtggatcaattgacctgcatttcagcttttagttgaggatcaaaatctcgtgtcgttcagggccctcggtagagagacattaatgtgtcggcaccgtggatcgtcgcagttgtgggtcactgtaacggcactggtcacaggcaccatctgcctctgttcgtcctcctctattggcctcctcagcacctacagggtccagtgctactactcaaggatgttgttgcaaatgagttgtggagaaccgtagatgcaaatggttggagagcatcttctgcaccacacatctattggcctcacataccagctgaatctgagagcaatgggtacttgtgtgtccggtgcaacggcggcttgaccttacaaatcagtgttgtatgactaatataaaactctctctctctaaagtagcatagttcaccatgcaagttttgtgtattcatggcaacatatctgaaagatttaagattacttctaccttgattttgtagatatgaaatgttgttgtcattgcacgaatcattaatgacttgattttgctctctatatgctatcttagaagtttcagagttca

SEQ ID NO: 72124 - DNA, 3941 bp, Zea Mays
ccgagaccccgacccaccccgcctcccccgccgccgcgctcgcgctcccccgcgacagccgccatacgccctatctccgccgtgcctgcgcctcctcccccgcccgcccgagacccgccaagtttcccttccttgcacggcgagatccaccatcggcgcccccttccctggcgagccacagccgtccatgttcctggccaccggcgacctcccttctctagcccttggcggcgagccaacacctcctcccatggctgccccccagaccccagtcccgtccgcgcatccgctcttccgtcagcgacgcacctattctcccctctctccccgacgtcgcccatggcgtggacggcgacctccctcaccctgcaactctgcacgtgtaagggccgtgttgcccgcctcctttccccacaccggcgcagccccctgtcgccgcggccccttccccaaacagcacggcaccacatgctccccctgccgcgcccgcactctccttccccaaataacacggccccacatcgctggttgcctcgcctcgccggggacccagcacgatggtcagggagctggtgggtgggggagacagggaggagcggaggaggaggtcaagctcaacatggacattgtgttcgtgacgctgccttccccaccgacaccaacgactcactccagaacccggatctggggcccttcctcctcaagccatggtattgggcgagggtggcgccgcctcgcgtgcttgagttcgccgagcgcgccgccagggtgctcgagcgaagaggtgagggcaccgagctcgagctcgccatgaatctccacatcgctgctggcatccactgcggactcagccaccaagccctgacattgtagccagtttcttgcaatcagaacgaatgccagttggtaaccatttaacatttcttttgctgtgtcaacttattggagttggagagaggctatcactatactgacctttatatcatcagaattgacataaatgtgatttacacgtagatacaagtttgtggcagagatttctctgacacgccaatcagtcttcgatgcgaatgcttgttgctcatatggacttgtggttgtgataatgagttcatctccgtgcacatttgtcgtccttgtggttacagcagttaactgagtagtctctcttgactgcaaaacaagcaatctgttgcctctgctgtgatggtggagcaatttcagcgccaagaatgatatctcgcattttagattgtgtcagtgcagaagtattaacattgtttttctttgcataatcagaaaggatgaggtcccttagtgcacactcaaccttcaaccactgttcatcattcagagatggccatatatgatgtgtttcagtaataattgttttgtcaggtttgagcaacatctttgccttctcattattcacatgaagtgcacgtagaataagcacaatgtgggagaatgttgtgtatgatgatatacttttcaaccaatcatcatatatattataaagaaccatctgtggttcagttgccttcagtataagatcaccaaacttctcaatcttcaagcaagcctggaaaggaagctgcagctcactgcccttaataacaatgttagggaagtcaggtagatggacctccaagggatccaacatgcccttccttgtcacaacaatttgctttggctgctcttctacaggaagagatcgaaccaatgcagcaacctcctcagcggttttccacttggccagctgcccaagacgcttttgccccgcccatacacttgtgtggataacctgcacattattatccatactcagtttaaacctacctatgttcagggttttacagaaaaacaaaatcacatgaaaactagagcagaaattcgaaaagaacaaaccttaagaaaaagttgacccgttcttggattgaaaaatgaaaatagcaccattaattggtttggtggtcaagttaccctaaaatgttttgtgaatagtgactcgatacacatttgtatcatccacgaaccatatgatttgattgctgaatatctctccatagttctgtgaagacaggtatggttcatatattcaaatatccaaacctcatttggagttgtgataccagcaacctttgacatcgattcaagatgctactggagtgttattcattgatcacactgtcacgagagctgagcaaactacagcctgcaagagctacacgtggcatgcttgaccacatcatggtggagaatgcaagtgttaaagttgcattgaatcgcattgccgttgtttctgtcctggatgcacataccctgtcagtgatgtcttatgaagcttggaggctcatacatctgtttctgttggctctctctagctatatgcagtggagctgctaatatgcatgaagtttgggctaggtgagcttcctctttcacttttcaaaccagtataggtattggccgatgtcaagaagacaaggccggcgacgagaggacgacagcgtgcaagaagagaaggcccatgttaggcgcaactatagggctcaaggtcaatcagttgtggtcacacttttccatttttacgttcagctaaactgaccccctgtctcatggtgcaactgtgcaaggataggcaacaagtgttcaacaatatgtctgtggatcaattgacctgcatttcagcttttagttgaggatcaaaatctcgtgtcgttcagggccctcggtagagagacattaatgtgtcggcaccgtggatcgtcgcagttgtgggtcactgtaacggcactggtcacaggcaccatctgcctctgttcgtcctcctctattggcctcctcagcacctacagggtccagatggaaaagtttctataatacatatgtaacaaatacatactccttgttcaagagatcgtaagcaagattgtaaacggtatccaacgcagaagcacctaatatggttacagagtattactgatgggcttacctgcagactgcagtaagttgcgatagttctttccaaagttgtttagatccaacttttccataactattattttgcttaatcagcacccccaagtatgtagcttactgttcctatgaaaaactgagaaacataaacaattagtttgctgcattatagtagacatgtaatgtaaacattgaagcatgcgagcaggttacgacataaatgtaaggacatttgtaaaattgataattgacacatgatgtttcataacctcagttttgctagcttaggctgtcagggaagtgatgcatcaatggatcaatactgtttattgattataatgaaaagactcgagtaaggaattgataaataactgttaaaatcaagtcagcgcaatgtatggatctatgcatcttgttatggcacataatatttaatgtataaggaataatgttaaaaataaatggcctaatttgtctcagacatttttttggtgcatcactgattgagttatgctatatgcatggaattgaattgtatatacaatgtttatttgaattttctatcaaactatatcttgtaccaatatcagtgctactactcaaggatgttgttgcaaatgagttgtggagaaccgtagatgcaaatggttggagagcatcttctgcaccacacatctattggcctcacataccagctgaatctgagagcaatgggtacttgtgtgtccggtgcaacggcggcttgaccttacaaatcagtgttgtatgactaatataaaactctctctctctaaagtagcatagttcaccatgcaagttttgtgtattcatggcaacatatctgaaagatttaagattacttctaccttgattttgtagatatgaaatgttgttgtcattgcacgaatcattaatgacttgattttgctctctatatgctatcttagaagtttcagagttca

SEQ ID NO: 72125 - DNA, 3200 bp, Zea Mays
ccgagaccccgacccaccccgcctcccccgccgccgcgctcgcgctcccccgcgacagccgccatacgccctatctccgccgtgcctgcgcctcctcccccgcccgcccgagacccgccaagtttcccttccttgcacggcgagatccaccatcggcgcccccttccctggcgagccacagccgtccatgttcctggccaccggcgacctcccttctctagcccttggcggcgagccaacacctcctcccatggctgccccccagaccccagtcccgtccgcgcatccgctcttccgtcagcgacgcacctattctcccctctctccccgacgtcgcccatggcgtggacggcgacctccctcaccctgcaactctgcacgtgtaagggccgtgttgcccgcctcctttccccacaccggcgcagccccctgtcgccgcggccccttccccaaacagcacggcaccacatgctccccctgccgcgcccgcactctccttccccaaataacacggccccacatcgctggttgcctcgcctcgccggggacccagcacgatggtcagggagctggtgggtgggggagacagggaggagcggaggaggaggtcaagctcaacatggacattgtgttcgtgacgctgccttccccaccgacaccaacgactcactccagaacccggatctggggcccttcctcctcaagccatggtattgggcgagggtggcgccgcctcgcgtgcttgagttcgccgagcgcgccgccagggtgctcgagcgaagaggtgagggcaccgagctcgagctcgccatgaatctccacatcgctgctggcatccactgcggactcagccaccaagccctgacattgtagccagtttcttgcaatcagaacgaatgccagttggtaaccatttaacatttcttttgctgtgtcaacttattggagttggagagaggctatcactatactgacctttatatcatcagaattgacataaatgtgatttacacgtagatacaagtttgtggcagagatttctctgacacgccaatcagtcttcgatgcgaatgcttgttgctcatatggacttgtggttgtgataatgagttcatctccgtgcacatttgtcgtccttgtggttacagcagttaactgagtagtctctcttgactgcaaaacaagcaatctgttgcctctgctgtgatggtggagcaatttcagcgccaagaatgatatctcgcattttagattgtgtcagtgcagaagtattaacattgtttttctttgcataatcagaaaggatgaggtcccttagtgcacactcaaccttcaaccactgttcatcattcagagatggccatatatgatgtgtttcagtaataattgttttgtcaggtttgagcaacatctttgccttctcattattcacatgaagtgcacgtagaataagcacaatgtgggagaatgttgtgtatgatgatatacttttcaaccaatcatcatatatattataaagaaccatctgtggttcagttgccttcagtataagatcaccaaacttctcaatcttcaagcaagcctggaaaggaagctgcagctcactgcccttaataacaatgttagggaagtcaggtagatggacctccaagggatccaacatgcccttccttgtcacaacaatttgctttggctgctcttctacaggaagagatcgaaccaatgcagcaacctcctcagcggttttccacttggccagctgcccaagacgcttttgccccgcccatacacttgtgtggataacctgcacattattatccatactcagtttaaacctacctatgttcagggttttacagaaaaacaaaatcacatgaaaactagagcagaaattcgaaaagaacaaaccttaagaaaaagttgacccgttcttggattgaaaaatgaaaatagcaccattaattggtttggtggtcaagttaccctaaaatgttttgtgaatagtgactcgatacacatttgtatcatccacgaaccatatgatttgattgctgaatatctctccatagttctgtgaagacaggtatggttcatatattcaaatatccaaacctcatttggagttgtgataccagcaacctttgacatcgattcaagatgctactggagtgttattcatatgccactgcacaaatggacgttgacacgttgtagtgatcacactgtcacgagagctgagcaaactacagcctgcaagagctacacgtggcatgcttgaccacatcatggtggagaatgcaagtgttaaagttgcattgaatcgcattgccgttgtttctgtcctggatgcacataccctgtcagtgatgtcttatgaagcttggaggctcatacatctgtttctgttggctctctctagctatatgcagtggagctgctaatatgcatgaagtttgggctaggtgagcttcctctttcacttttcaaaccagtataggtattggccgatgtcaagaagacaaggccggcgacgagaggacgacagcgtgcaagaagagaaggcccatgttaggcgcaactataggtgcaactgtgcaaggataggcaacaagtgttcaacaatatgtctgtggatcaattgacctgcatttcagcttttagttgaggatcaaaatctcgtgtcgttcagggccctcggtagagagacattaatgtgtcggcaccgtggatcgtcgcagttgtgggtcactgtaacggcactggtcacaggcaccatctgcctctgttcgtcctcctctattggcctcctcagcacctacagggtccagtgctactactcaaggatgttgttgcaaatgagttgtggagaaccgtagatgcaaatggttggagagcatcttctgcaccacacatctattggcctcacataccagctgaatctgagagcaatgggtacttgtgtgtccggtgcaacggcggcttgaccttacaaatcagtgttgtatgactaatataaaactctctctctctaaagtagcatagttcaccatgcaagttttgtgtattcatggcaacatatctgaaagatttaagattacttctaccttgattttgtagatatgaaatgttgttgtcattgcacgaatcattaatgacttgattttgctctctatatgctatcttagaagtttcagagttca

SEQ ID NO: 72126 - DNA, 2729 bp, Zea Mays
ccgagaccccgacccaccccgcctcccccgccgccgcgctcgcgctcccccgcgacagccgccatacgccctatctccgccgtgcctgcgcctcctcccccgcccgcccgagacccgccaagtttcccttccttgcacggcgagatccaccatcggcgcccccttccctggcgagccacagccgtccatgttcctggccaccggcgacctcccttctctagcccttggcggcgagccaacacctcctcccatggctgccccccagaccccagtcccgtccgcgcatccgctcttccgtcagcgacgcacctattctcccctctctccccgacgtcgcccatggcgtggacggcgacctccctcaccctgcaactctgcacgtgtaagggccgtgttgcccgcctcctttccccacaccggcgcagccccctgtcgccgcggccccttccccaaacagcacggcaccacatgctccccctgccgcgcccgcactctccttccccaaataacacggccccacatcgctggttgcctcgcctcgccggggacccagcacgatggtcagggagctggtgggtgggggagacagggaggagcggaggaggaggtcaagctcaacatggacattgtgttcgtgacgctgccttccccaccgacaccaacgactcactccagaacccggatctggggcccttcctcctcaagccatggtattgggcgagggtggcgccgcctcgcgtgcttgagttcgccgagcgcgccgccagggtgctcgagcgaagaggtgagggcaccgagctcgagctcgccatgaatctccacatcgctgctggcatccactgcggactcagccaccaagccctgacattgtagccagtttcttgcaatcagaacgaatgccagttggtaaccatttaacatttcttttgctgtgtcaacttattggagttggagagaggctatcactatactgacctttatatcatcagaattgacataaatgtgatttacacgtagatacaagtttgtggcagagatttctctgacacgccaatcagtcttcgatgcgaatgcttgttgctcatatggacttgtggttgtgataatgagttcatctccgtgcacatttgtcgtccttgtggttacagcagttaactgagtagtctctcttgactgcaaaacaagcaatctgttgcctctgctgtgatggtggagcaatttcagcgccaagaatgatatctcgcattttagattgtgtcagtgcagaagtattaacattgtttttctttgcataatcagaaaggatgaggtcccttagtgcacactcaaccttcaaccactgttcatcattcagagatggccatatatgatgtgtttcagtaataattgttttgtcaggtatggttcatatattcaaatatccaaacctcatttggagttgtgataccagcaacctttgacatcgattcaagatgctactggagtgttattcatatgccactgcacaaatggacgttgacacgttgtagtgatcacactgtcacgagagctgagcaaactacagcctgcaagagctacacgtggcatgcttgaccacatcatggtggagaatgcaagtgttaaagttgcattgaatcgcattgccgttgtttctgtcctggatgcacataccctgtcagtgatgtcttatgaagcttggaggctcatacatctgtttctgttggctctctctagctatatgcagtggagctgctaatatgcatgaagtttgggctaggtgagcttcctctttcacttttcaaaccagtataggtattggccgatgtcaagaagacaaggccggcgacgagaggacgacagcgtgcaagaagagaaggcccatgttaggcgcaactatagggctcaaggtcaatcagttgtggtcacacttttccatttttacgttcagctaaactgaccccctgtctcatggtgcaactgtgcaaggataggcaacaagtgttcaacaatatgtctgtggatcaattgacctgcatttcagcttttagttgaggatcaaaatctcgtgtcgttcagggccctcggtagagagacattaatgtgtcggcaccgtggatcgtcgcagttgtgggtcactgtaacggcactggtcacaggcaccatctgcctctgttcgtcctcctctattggcctcctcagcacctacagggtccagatggaaaagtttctataatacatatgtaacaaatacatactccttgttcaagagatcgtaagcaagattgtaaacggtatccaacgcagaagcacctaatatggttacagagtattactgatgggcttacctgcagactgcatgctactactcaaggatgttgttgcaaatgagttgtggagaaccgtagatgcaaatggttggagagcatcttctgcaccacacatctattggcctcacataccagctgaatctgagagcaatgggtacttgtgtgtccggtgcaacggcggcttgaccttacaaatcagtgttgtatgactaatataaaactctctctctctaaagtagcatagttcaccatgcaagttttgtgtattcatggcaacatatctgaaagatttaagattacttctaccttgattttgtagatatgaaatgttgttgtcattgcacgaatcattaatgacttgattttgctctctatatgctatcttagaagtttcagagttca

SEQ ID NO: 72127 - DNA, 2746 bp, Zea Mays
ccgagaccccgacccaccccgcctcccccgccgccgcgctcgcgctcccccgcgacagccgccatacgccctatctccgccgtgcctgcgcctcctcccccgcccgcccgagacccgccaagtttcccttccttgcacggcgagatccaccatcggcgcccccttccctggcgagccacagccgtccatgttcctggccaccggcgacctcccttctctagcccttggcggcgagccaacacctcctcccatggctgccccccagaccccagtcccgtccgcgcatccgctcttccgtcagcgacgcacctattctcccctctctccccgacgtcgcccatggcgtggacggcgacctccctcaccctgcaactctgcacgtgtaagggccgtgttgcccgcctcctttccccacaccggcgcagccccctgtcgccgcggccccttccccaaacagcacggcaccacatgctccccctgccgcgcccgcactctccttccccaaataacacggccccacatcgctggttgcctcgcctcgccggggacccagcacgatggtcagggagctggtgggtgggggagacagggaggagcggaggaggaggtcaagctcaacatggacattgtgttcgtgacgctgccttccccaccgacaccaacgactcactccagaacccggatctggggcccttcctcctcaagccatggtattgggcgagggtggcgccgcctcgcgtgcttgagttcgccgagcgcgccgccagggtgctcgagcgaagaggtgagggcaccgagctcgagctcgccatgaatctccacatcgctgctggcatccactgcggactcagccaccaagccctgacattgtagccagtttcttgcaatcagaacgaatgccagttggtaaccatttaacatttcttttgctgtgtcaacttattggagttggagagaggctatcactatactgacctttatatcatcagaattgacataaatgtgatttacacgtagatacaagtttgtggcagagatttctctgacacgccaatcagtcttcgatgcgaatgcttgttgctcatatggacttgtggttgtgataatgagttcatctccgtgcacatttgtcgtccttgtggttacagcagttaactgagtagtctctcttgactgcaaaacaagcaatctgttgcctctgctgtgatggtggagcaatttcagcgccaagaatgatatctcgcattttagattgtgtcagtgcagaagtattaacattgtttttctttgcataatcagaaaggatgaggtcccttagtgcacactcaaccttcaaccactgttcatcattcagagatggccatatatgatgtgtttcagtaataattgttttgtcagacaggtatggttcatatattcaaatatccaaacctcatttggagttgtgataccagcaacctttgacatcgattcaagatgctactggagtgttattcatttgttcctgacagatgccactgcacaaatggacgttgacacgttgtagtgatcacactgtcacgagagctgagcaaactacagcctgcaagagctacacgtggcatgcttgaccacatcatggtggagaatgcaagtgttaaagttgcattgaatcgcattgccgttgtttctgtcctggatgcacataccctgtcagtgatgtcttatgaagcttggaggctcatacatctgtttctgttggctctctctagctatatgcagtggagctgctaatatgcatgaagtttgggctaggtgagcttcctctttcacttttcaaaccagtataggtattggccgatgtcaagaagacaaggccggcgacgagaggacgacagcgtgcaagaagagaaggcccatgttaggcgcaactatagggctcaaggtcaatcagttgtggtcacacttttccatttttacgttcagctaaactgaccccctgtctcatggtgcaactgtgcaaggataggcaacaagtgttcaacaatatgtctgtggatcaattgacctgcatttcagcttttagttgaggatcaaaatctcgtgtcgttcagggccctcggtagagagacattaatgtgtcggcaccgtggatcgtcgcagttgtgggtcactgtaacggcactggtcacaggcaccatctgcctctgttcgtcctcctctattggcctcctcagcacctacagggtccagatggaaaagtttctataatacatatgtaacaaatacatactccttgttcaagagatcgtaagcaagattgtaaacggtatccaacgcagaagcacctaatatggttacagagtattactgatgggcttacctgcagactgcatgctactactcaaggatgttgttgcaaatgagttgtggagaaccgtagatgcaaatggttggagagcatcttctgcaccacacatctattggcctcacataccagctgaatctgagagcaatgggtacttgtgtgtccggtgcaacggcggcttgaccttacaaatcagtgttgtatgactaatataaaactctctctctctaaagtagcatagttcaccatgcaagttttgtgtattcatggcaacatatctgaaagatttaagattacttctaccttgattttgtagatatgaaatgttgttgtcattgcacgaatcattaatgacttgattttgctctctatatgctatcttagaagtttcagagttca

SEQ ID NO: 72128 - DNA, 2527 bp, Zea Mays
ccgagaccccgacccaccccgcctcccccgccgccgcgctcgcgctcccccgcgacagccgccatacgccctatctccgccgtgcctgcgcctcctcccccgcccgcccgagacccgccaagtttcccttccttgcacggcgagatccaccatcggcgcccccttccctggcgagccacagccgtccatgttcctggccaccggcgacctcccttctctagcccttggcggcgagccaacacctcctcccatggctgccccccagaccccagtcccgtccgcgcatccgctcttccgtcagcgacgcacctattctcccctctctccccgacgtcgcccatggcgtggacggcgacctccctcaccctgcaactctgcacgtgtaagggccgtgttgcccgcctcctttccccacaccggcgcagccccctgtcgccgcggccccttccccaaacagcacggcaccacatgctccccctgccgcgcccgcactctccttccccaaataacacggccccacatcgctggttgcctcgcctcgccggggacccagcacgatggtcagggagctggtgggtgggggagacagggaggagcggaggaggaggtcaagctcaacatggacattgtgttcgtgacgctgccttccccaccgacaccaacgactcactccagaacccggatctggggcccttcctcctcaagccatggtattgggcgagggtggcgccgcctcgcgtgcttgagttcgccgagcgcgccgccagggtgctcgagcgaagaggtgagggcaccgagctcgagctcgccatgaatctccacatcgctgctggcatccactgcggactcagccaccaagccctgacattgtagccagtttcttgcaatcagaacgaatgccagttgatacaagtttgtggcagagatttctctgacacgccaatcagtcttcgatgcgaatgcttgttgctcatatggacttgtggttgtgataatgagttcatctccgtgcacatttgtcgtccttgtggttacagcagttaactgagtagtctctcttgactgcaaaacaagcaatctgttgcctctgctgtgatggtggagcaatttcagcgccaagaatgatatctcgcattttagattgtgtcagtgcagaagtattaacattgtttttctttgcataatcagaaaggatgaggtcccttagtgcacactcaaccttcaaccactgttcatcattcagagatggccatatatgatgtgtttcagtaataattgttttgtcagttctgtgaagacaggtatggttcatatattcaaatatccaaacctcatttggagttgtgataccagcaacctttgacatcgattcaagatgctactggagtgttattcatttgttcctgacagatgccactgcacaaatggacgttgacacgttgtagtgatcacactgtcacgagagctgagcaaactacagcctgcaagagctacacgtggtagcctatactcctgccttgctataattttcttaattttcttttgttaatgagtgcagtttctctggctaatggtaaaaataatttgttctacaggcatgcttgaccacatcatggtggagaatgcaagtgttaaagttgcattgaatcgcattgccgttgtttctgtcctggatgcacataccctgtcagtgatgtcttatgaagcttggaggctcatacatctgtttctgttggctctctctagctatatgcagtggagctgctaatatgcatgaagtttgggctaggtgagcttcctctttcacttttcaaaccagtataggtattggccgatgtcaagaagacaaggccggcgacgagaggacgacagcgtgcaagaagagaaggcccatgttaggcgcaactataggtgcaactgtgcaaggataggcaacaagtgttcaacaatatgtctgtggatcaattgacctgcatttcagcttttagttgaggatcaaaatctcgtgtcgttcagggccctcggtagagagacattaatgtgtcggcaccgtggatcgtcgcagttgtgggtcactgtaacggcactggtcacaggcaccatctgcctctgttcgtcctcctctattggcctcctcagcacctacagggtccagtgctactactcaaggatgttgttgcaaatgagttgtggagaaccgtagatgcaaatggttggagagcatcttctgcaccacacatctattggcctcacataccagctgaatctgagagcaatgggtacttgtgtgtccggtgcaacggcggcttgaccttacaaatcagtgttgtatgactaatataaaactctctctctctaaagtagcatagttcaccatgcaagttttgtgtattcatggcaacatatctgaaagatttaagattacttctaccttgattttgtagatatgaaatgttgttgtcattgcacgaatcattaatgacttgattttgctctctatatgctatcttagaagtttcagagttca

SEQ ID NO: 72129 - DNA, 3538 bp, Zea Mays
ccgagaccccgacccaccccgcctcccccgccgccgcgctcgcgctcccccgcgacagccgccatacgccctatctccgccgtgcctgcgcctcctcccccgcccgcccgagacccgccaagtttcccttccttgcacggcgagatccaccatcggcgcccccttccctggcgagccacagccgtccatgttcctggccaccggcgacctcccttctctagcccttggcggcgagccaacacctcctcccatggctgccccccagaccccagtcccgtccgcgcatccgctcttccgtcagcgacgcacctattctcccctctctccccgacgtcgcccatggcgtggacggcgacctccctcaccctgcaactctgcacgtgtaagggccgtgttgcccgcctcctttccccacaccggcgcagccccctgtcgccgcggccccttccccaaacagcacggcaccacatgctccccctgccgcgcccgcactctccttccccaaataacacggccccacatcgctggttgcctcgcctcgccggggacccagcacgatggtcagggagctggtgggtgggggagacagggaggagcggaggaggaggtcaagctcaacatggacattgtgttcgtgacgctgccttccccaccgacaccaacgactcactccagaacccggatctggggcccttcctcctcaagccatggtattgggcgagggtggcgccgcctcgcgtgcttgagttcgccgagcgcgccgccagggtgctcgagcgaagaggtgagggcaccgagctcgagctcgccatgaatctccacatcgctgctggcatccactgcggactcagccaccaagccctgacattgtagccagtttcttgcaatcagaacgaatgccagttgatacaagtttgtggcagagatttctctgacacgccaatcagtcttcgatgcgaatgcttgttgctcatatggacttgtggttgtgataatgagttcatctccgtgcacatttgtcgtccttgtggttacagcagttaactgagtagtctctcttgactgcaaaacaagcaatctgttgcctctgctgtgatggtggagcaatttcagcgccaagaatgatatctcgcattttagattgtgtcagtgcagaagtattaacattgtttttctttgcataatcagaaaggatgaggtcccttagtgcacactcaaccttcaaccactgttcatcattcagagatggccatatatgatgtgtttcagtaataattgttttgtcaggtttgagcaacatctttgccttctcattattcacatgaagtgcacgtagaataagcacaatgtgggagaatgttgtgtatgatgatatacttttcaaccaatcatcatatatattataaagaaccatctgtggttcagttgccttcagtataagatcaccaaacttctcaatcttcaagcaagcctggaaaggaagctgcagctcactgcccttaataacaatgttagggaagtcaggtagatggacctccaagggatccaacatgcccttccttgtcacaacaatttgctttggctgctcttctacaggaagagatcgaaccaatgcagcaacctcctcagcggttttccacttggccagctgcccaagacgcttttgccccgcccatacacttgtgtggataacctgcacattattatccatactcagtttaaacctacctatgttcagggttttacagaaaaacaaaatcacatgaaaactagagcagaaattcgaaaagaacaaaccttaagaaaaagttgacccgttcttggattgaaaaatgaaaatagcaccattaattggtttggtggtcaagttaccctaaaatgttttgtgaatagtgactcgatacacatttgtatcatccacgaaccatatgatttgattgctgaatatctctccatagttctgtgaagacaggtatggttcatatattcaaatatccaaacctcatttggagttgtgataccagcaacctttgacatcgattcaagatgctactggagtgttattcatgtgagtgtaatttagtacatgatccaactggtaacaaactttatgatactagcatatcacataatagatgagattactagaaacagctcatgttattgaatatagaaatttcagttctattgtttttacacaaatttgtttgtgatgcttcaaaccgctaatgattttttttaaaaaagttgtgcaatgagcatatcacataatatatgagaatcttaggaataaaccaagttgctaatgagtaaaattttggctttgctttttaaaaaatatgggttcaagttgttcctgacagatgccactgcacaaatggacgttgacacgttgtagtgatcacactgtcacgagagctgagcaaactacagcctgcaagagctacacgtggtagcctatactcctgccttgctataattttcttaattttcttttgttaatgagtgcagtttctctggctaatggtaaaaataatttgttctacaggcatgcttgaccacatcatggtggagaatgcaagtgttaaagttgcattgaatcgcattgccgttgtttctgtcctggatgcacataccctgtcagtgatgtcttatgaagcttggaggctcatacatctgtttctgttggctctctctagctatatgcagtggagctgctaatatgcatgaagtttgggctaggtgagcttcctctttcacttttcaaaccagtataggtattggccgatgtcaagaagacaaggccggcgacgagaggacgacagcgtgcaagaagagaaggcccatgttaggcgcaactatagggctcaaggtcaatcagttgtggtcacacttttccatttttacgttcagctaaactgaccccctgtctcatggtgcaactgtgcaaggataggcaacaagtgttcaacaatatgtctgtggatcaattgacctgcatttcagcttttagttgaggatcaaaatctcgtgtcgttcagggccctcggtagagagacattaatgtgtcggcaccgtggatcgtcgcagttgtgggtcactgtaacggcactggtcacaggcaccatctgcctctgttcgtcctcctctattggcctcctcagcacctacagggtccaggatgttgttgcaaatgagttgtggagaaccgtagatgcaaatggttggagagcatcttctgcaccacacatctattggcctcacataccagctgaatctgagagcaatgggtacttgtgtgtccggtgcaacggcggcttgaccttacaaatcagtgttgtatgactaatataaaactctctctctctaaagtagcatagttcaccatgcaagttttgtgtattcatggcaacatatctgaaagatttaagattacttctaccttgattttgtagatatgaaatgttgttgtcattgcacgaatcattaatgacttgattttgctctctatatgctatcttagaagtttcagagttca

SEQ ID NO: 72130 - DNA, 2674 bp, Zea Mays
ccgagaccccgacccaccccgcctcccccgccgccgcgctcgcgctcccccgcgacagccgccatacgccctatctccgccgtgcctgcgcctcctcccccgcccgcccgagacccgccaagtttcccttccttgcacggcgagatccaccatcggcgcccccttccctggcgagccacagccgtccatgttcctggccaccggcgacctcccttctctagcccttggcggcgagccaacacctcctcccatggctgccccccagaccccagtcccgtccgcgcatccgctcttccgtcagcgacgcacctattctcccctctctccccgacgtcgcccatggcgtggacggcgacctccctcaccctgcaactctgcacgtgtaagggccgtgttgcccgcctcctttccccacaccggcgcagccccctgtcgccgcggccccttccccaaacagcacggcaccacatgctccccctgccgcgcccgcactctccttccccaaataacacggccccacatcgctggttgcctcgcctcgccggggacccagcacgatggtcagggagctggtgggtgggggagacagggaggagcggaggaggaggtcaagctcaacatggacattgtgttcgtgacgctgccttccccaccgacaccaacgactcactccagaacccggatctggggcccttcctcctcaagccatggtattgggcgagggtggcgccgcctcgcgtgcttgagttcgccgagcgcgccgccagggtgctcgagcgaagaggtgagggcaccgagctcgagctcgccatgaatctccacatcgctgctggcatccactgcggactcagccaccaagccctgacattgtagccagtttcttgcaatcagaacgaatgccagttggtaaccatttaacatttcttttgctgtgtcaacttattggagttggagagaggctatcactatactgacctttatatcatcagaattgacataaatgtgatttacacgtagatacaagtttgtggcagagatttctctgacacgccaatcagtcttcgatgcgaatgcttgttgctcatatggacttgtggttgtgataatgagttcatctccgtgcacatttgtcgtccttgtggttacagcagttaactgagtagtctctcttgactgcaaaacaagcaatctgttgcctctgctgtgatggtggagcaatttcagcgccaagaatgatatctcgcattttagattgtgtcagtgcagaagtattaacattgtttttctttgcataatcagaaaggatgaggtcccttagtgcacactcaaccttcaaccactgttcatcattcagagatggccatatatgatgtgtttcagtaataattgttttgtcagacaggtatggttcatatattcaaatatccaaacctcatttggagttgtgataccagcaacctttgacatcgattcaagatgctactggagtgttattcatttgttcctgacagatgccactgcacaaatggacgttgacacgttgtagtgatcacactgtcacgagagctgagcaaactacagcctgcaagagctacacgtggcatgcttgaccacatcatggtggagaatgcaagtgttaaagttgcattgaatcgcattgccgttgtttctgtcctggatgcacataccctgtcagtgatgtcttatgaagcttggaggctcatacatctgtttctgttggctctctctagctatatgcagtggagctgctaatatgcatgaagtttgggctaggtgagcttcctctttcacttttcaaaccagtataggtattggccgatgtcaagaagacaaggccggcgacgagaggacgacagcgtgcaagaagagaaggcccatgttaggcgcaactataggtgcaactgtgcaaggataggcaacaagtgttcaacaatatgtctgtggatcaattgacctgcatttcagcttttagttgaggatcaaaatctcgtgtcgttcagggccctcggtagagagacattaatgtgtcggcaccgtggatcgtcgcagttgtgggtcactgtaacggcactggtcacaggcaccatctgcctctgttcgtcctcctctattggcctcctcagcacctacagggtccagatggaaaagtttctataatacatatgtaacaaatacatactccttgttcaagagatcgtaagcaagattgtaaacggtatccaacgcagaagcacctaatatggttacagagtattactgatgggcttacctgcagactgcatgctactactcaaggatgttgttgcaaatgagttgtggagaaccgtagatgcaaatggttggagagcatcttctgcaccacacatctattggcctcacataccagctgaatctgagagcaatgggtacttgtgtgtccggtgcaacggcggcttgaccttacaaatcagtgttgtatgactaatataaaactctctctctctaaagtagcatagttcaccatgcaagttttgtgtattcatggcaacatatctgaaagatttaagattacttctaccttgattttgtagatatgaaatgttgttgtcattgcacgaatcattaatgacttgattttgctctctatatgctatcttagaagtttcagagttca

SEQ ID NO: 72131 - DNA, 3099 bp, Zea Mays
ccgagaccccgacccaccccgcctcccccgccgccgcgctcgcgctcccccgcgacagccgccatacgccctatctccgccgtgcctgcgcctcctcccccgcccgcccgagacccgccaagtttcccttccttgcacggcgagatccaccatcggcgcccccttccctggcgagccacagccgtccatgttcctggccaccggcgacctcccttctctagcccttggcggcgagccaacacctcctcccatggctgccccccagaccccagtcccgtccgcgcatccgctcttccgtcagcgacgcacctattctcccctctctccccgacgtcgcccatggcgtggacggcgacctccctcaccctgcaactctgcacgtgtaagggccgtgttgcccgcctcctttccccacaccggcgcagccccctgtcgccgcggccccttccccaaacagcacggcaccacatgctccccctgccgcgcccgcactctccttccccaaataacacggccccacatcgctggttgcctcgcctcgccggggacccagcacgatggtcagggagctggtgggtgggggagacagggaggagcggaggaggaggtcaagctcaacatggacattgtgttcgtgacgctgccttccccaccgacaccaacgactcactccagaacccggatctggggcccttcctcctcaagccatggtattgggcgagggtggcgccgcctcgcgtgcttgagttcgccgagcgcgccgccagggtgctcgagcgaagaggtgagggcaccgagctcgagctcgccatgaatctccacatcgctgctggcatccactgcggactcagccaccaagccctgacattgtagccagtttcttgcaatcagaacgaatgccagttgatacaagtttgtggcagagatttctctgacacgccaatcagtcttcgatgcgaatgcttgttgctcatatggacttgtggttgtgataatgagttcatctccgtgcacatttgtcgtccttgtggttacagcagttaactgagtagtctctcttgactgcaaaacaagcaatctgttgcctctgctgtgatggtggagcaatttcagcgccaagaatgatatctcgcattttagattgtgtcagtgcagaagtattaacattgtttttctttgcataatcagaaaggatgaggtcccttagtgcacactcaaccttcaaccactgttcatcattcagagatggccatatatgatgtgtttcagtaataattgttttgtcaggtttgagcaacatctttgccttctcattattcacatgaagtgcacgtagaataagcacaatgtgggagaatgttgtgtatgatgatatacttttcaaccaatcatcatatatattataaagaaccatctgtggttcagttgccttcagtataagatcaccaaacttctcaatcttcaagcaagcctggaaaggaagctgcagctcactgcccttaataacaatgttagggaagtcaggtagatggacctccaagggatccaacatgcccttccttgtcacaacaatttgctttggctgctcttctacaggaagagatcgaaccaatgcagcaacctcctcagcggttttccacttggccagctgcccaagacgcttttgccccgcccatacacttgtgtggataacctgcacattattatccatactcagtttaaacctacctatgttcagggttttacagaaaaacaaaatcacatgaaaactagagcagaaattcgaaaagaacaaaccttaagaaaaagttgacccgttcttggattgaaaaatgaaaatagcaccattaattggtttggtggtcaagttaccctaaaatgttttgtgaatagtgactcgatacacatttgtatcatccacgaaccatatgatttgattgctgaatatctctccatagttctgtgaagacaggtatggttcatatattcaaatatccaaacctcatttggagttgtgataccagcaacctttgacatcgattcaagatgctactggagtgttattcatttgttcctgacagatgccactgcacaaatggacgttgacacgttgtagtgatcacactgtcacgagagctgagcaaactacagcctgcaagagctacacgcatgcttgaccacatcatggtggagaatgcaagtgttaaagttgcattgaatcgcattgccgttgtttctgtcctggatgcacataccctgtcagtgatgtcttatgaagcttggaggctcatacatctgtttctgttggctctctctagctatatgcagtggagctgctaatatgcatgaagtttgggctaggtgagcttcctctttcacttttcaaaccagtataggtattggccgatgtcaagaagacaaggccggcgacgagaggacgacagcgtgcaagaagagaaggcccatgttaggcgcaactataggtgcaactgtgcaaggataggcaacaagtgttcaacaatatgtctgtggatcaattgacctgcatttcagcttttagttgaggatcaaaatctcgtgtcgttcagggccctcggtagagagacattaatgtgtcggcaccgtggatcgtcgcagttgtgggtcactgtaacggcactggtcacaggcaccatctgcctctgttcgtcctcctctattggcctcctcagcacctacagggtccagtgctactactcaaggatgttgttgcaaatgagttgtggagaaccgtagatgcaaatggttggagagcatcttctgcaccacacatctattggcctcacataccagctgaatctgagagcaatgggtacttgtgtgtccggtgcaacggcggcttgaccttacaaatcagtgttgtatgactaatataaaactctctctctctaaagtagcatagttcaccatgcaagttttgtgtattcatggcaacatatctgaaagatttaagattacttctaccttgattttgtagatatgaaatgttgttgtcattgcacgaatcattaatgacttgattttgctctctatatgctatcttagaagtttcagagttca

SEQ ID NO: 72132 - DNA, 3244 bp, Zea Mays
ccgagaccccgacccaccccgcctcccccgccgccgcgctcgcgctcccccgcgacagccgccatacgccctatctccgccgtgcctgcgcctcctcccccgcccgcccgagacccgccaagtttcccttccttgcacggcgagatccaccatcggcgcccccttccctggcgagccacagccgtccatgttcctggccaccggcgacctcccttctctagcccttggcggcgagccaacacctcctcccatggctgccccccagaccccagtcccgtccgcgcatccgctcttccgtcagcgacgcacctattctcccctctctccccgacgtcgcccatggcgtggacggcgacctccctcaccctgcaactctgcacgtgtaagggccgtgttgcccgcctcctttccccacaccggcgcagccccctgtcgccgcggccccttccccaaacagcacggcaccacatgctccccctgccgcgcccgcactctccttccccaaataacacggccccacatcgctggttgcctcgcctcgccggggacccagcacgatggtcagggagctggtgggtgggggagacagggaggagcggaggaggaggtcaagctcaacatggacattgtgttcgtgacgctgccttccccaccgacaccaacgactcactccagaacccggatctggggcccttcctcctcaagccatggtattgggcgagggtggcgccgcctcgcgtgcttgagttcgccgagcgcgccgccagggtgctcgagcgaagaggtgagggcaccgagctcgagctcgccatgaatctccacatcgctgctggcatccactgcggactcagccaccaagccctgacattgtagccagtttcttgcaatcagaacgaatgccagttgatacaagtttgtggcagagatttctctgacacgccaatcagtcttcgatgcgaatgcttgttgctcatatggacttgtggttgtgataatgagttcatctccgtgcacatttgtcgtccttgtggttacagcagttaactgagtagtctctcttgactgcaaaacaagcaatctgttgcctctgctgtgatggtggagcaatttcagcgccaagaatgatatctcgcattttagattgtgtcagtgcagaagtattaacattgtttttctttgcataatcagaaaggatgaggtcccttagtgcacactcaaccttcaaccactgttcatcattcagagatggccatatatgatgtgtttcagtaataattgttttgtcaggtttgagcaacatctttgccttctcattattcacatgaagtgcacgtagaataagcacaatgtgggagaatgttgtgtatgatgatatacttttcaaccaatcatcatatatattataaagaaccatctgtggttcagttgccttcagtataagatcaccaaacttctcaatcttcaagcaagcctggaaaggaagctgcagctcactgcccttaataacaatgttagggaagtcaggtagatggacctccaagggatccaacatgcccttccttgtcacaacaatttgctttggctgctcttctacaggaagagatcgaaccaatgcagcaacctcctcagcggttttccacttggccagctgcccaagacgcttttgccccgcccatacacttgtgtggataacctgcacattattatccatactcagtttaaacctacctatgttcagggttttacagaaaaacaaaatcacatgaaaactagagcagaaattcgaaaagaacaaaccttaagaaaaagttgacccgttcttggattgaaaaatgaaaatagcaccattaattggtttggtggtcaagttaccctaaaatgttttgtgaatagtgactcgatacacatttgtatcatccacgaaccatatgatttgattgctgaatatctctccatagttctgtgaagacaggtatggttcatatattcaaatatccaaacctcatttggagttgtgataccagcaacctttgacatcgattcaagatgctactggagtgttattcatttgttcctgacagatgccactgcacaaatggacgttgacacgttgtagtgatcacactgtcacgagagctgagcaaactacagcctgcaagagctacacgtggcatgcttgaccacatcatggtggagaatgcaagtgttaaagttgcattgaatcgcattgccgttgtttctgtcctggatgcacataccctgtcagtgatgtcttatgaagcttggaggctcatacatctgtttctgttggctctctctagctatatgcagtggagctgctaatatgcatgaagtttgggctaggtgagcttcctctttcacttttcaaaccagtataggtattggccgatgtcaagaagacaaggccggcgacgagaggacgacagcgtgcaagaagagaaggcccatgttaggcgcaactataggtgcaactgtgcaaggataggcaacaagtgttcaacaatatgtctgtggatcaattgacctgcatttcagcttttagttgaggatcaaaatctcgtgtcgttcagggccctcggtagagagacattaatgtgtcggcaccgtggatcgtcgcagttgtgggtcactgtaacggcactggtcacaggcaccatctgcctctgttcgtcctcctctattggcctcctcagcacctacagggtccagatggaaaagtttctataatacatatgtaacaaatacatactccttgttcaagagatcgtaagcaagattgtaaacggtatccaacgcagaagcacctaatatggttacagagtattactgatgggcttacctgcagactgcatgctactactcaaggatgttgttgcaaatgagttgtggagaaccgtagatgcaaatggttggagagcatcttctgcaccacacatctattggcctcacataccagctgaatctgagagcaatgggtacttgtgtgtccggtgcaacggcggcttgaccttacaaatcagtgttgtatgactaatataaaactctctctctctaaagtagcatagttcaccatgcaagttttgtgtattcatggcaacatatctgaaagatttaagattacttctaccttgattttgtagatatgaaatgttgttgtcattgcacgaatcattaatgacttgattttgctctctatatgctatcttagaagtttcagagttca

SEQ ID NO: 72133 - DNA, 3427 bp, Zea Mays
ccgagaccccgacccaccccgcctcccccgccgccgcgctcgcgctcccccgcgacagccgccatacgccctatctccgccgtgcctgcgcctcctcccccgcccgcccgagacccgccaagtttcccttccttgcacggcgagatccaccatcggcgcccccttccctggcgagccacagccgtccatgttcctggccaccggcgacctcccttctctagcccttggcggcgagccaacacctcctcccatggctgccccccagaccccagtcccgtccgcgcatccgctcttccgtcagcgacgcacctattctcccctctctccccgacgtcgcccatggcgtggacggcgacctccctcaccctgcaactctgcacgtgtaagggccgtgttgcccgcctcctttccccacaccggcgcagccccctgtcgccgcggccccttccccaaacagcacggcaccacatgctccccctgccgcgcccgcactctccttccccaaataacacggccccacatcgctggttgcctcgcctcgccggggacccagcacgatggtcagggagctggtgggtgggggagacagggaggagcggaggaggaggtcaagctcaacatggacattgtgttcgtgacgctgccttccccaccgacaccaacgactcactccagaacccggatctggggcccttcctcctcaagccatggtattgggcgagggtggcgccgcctcgcgtgcttgagttcgccgagcgcgccgccagggtgctcgagcgaagaggtgagggcaccgagctcgagctcgccatgaatctccacatcgctgctggcatccactgcggactcagccaccaagccctgacattgtagccagtttcttgcaatcagaacgaatgccagttggtaaccatttaacatttcttttgctgtgtcaacttattggagttggagagaggctatcactatactgacctttatatcatcagaattgacataaatgtgatttacacgtagatacaagtttgtggcagagatttctctgacacgccaatcagtcttcgatgcgaatgcttgttgctcatatggacttgtggttgtgataatgagttcatctccgtgcacatttgtcgtccttgtggttacagcagttaactgagtagtctctcttgactgcaaaacaagcaatctgttgcctctgctgtgatggtggagcaatttcagcgccaagaatgatatctcgcattttagattgtgtcagtgcagaagtattaacattgtttttctttgcataatcagaaaggatgaggtcccttagtgcacactcaaccttcaaccactgttcatcattcagagatggccatatatgatgtgtttcagtaataattgttttgtcaggtttgagcaacatctttgccttctcattattcacatgaagtgcacgtagaataagcacaatgtgggagaatgttgtgtatgatgatatacttttcaaccaatcatcatatatattataaagaaccatctgtggttcagttgccttcagtataagatcaccaaacttctcaatcttcaagcaagcctggaaaggaagctgcagctcactgcccttaataacaatgttagggaagtcaggtagatggacctccaagggatccaacatgcccttccttgtcacaacaatttgctttggctgctcttctacaggaagagatcgaaccaatgcagcaacctcctcagcggttttccacttggccagctgcccaagacgcttttgccccgcccatacacttgtgtggataacctgcacattattatccatactcagtttaaacctacctatgttcagggttttacagaaaaacaaaatcacatgaaaactagagcagaaattcgaaaagaacaaaccttaagaaaaagttgacccgttcttggattgaaaaatgaaaatagcaccattaattggtttggtggtcaagttaccctaaaatgttttgtgaatagtgactcgatacacatttgtatcatccacgaaccatatgatttgattgctgaatatctctccatagttctgtgaagacaggtatggttcatatattcaaatatccaaacctcatttggagttgtgataccagcaacctttgacatcgattcaagatgctactggagtgttattcatttgttcctgacagatgccactgcacaaatggacgttgacacgttgtagtgatcacactgtcacgagagctgagcaaactacagcctgcaagagctacacgtggcatgcttgaccacatcatggtggagaatgcaagtgttaaagttgcattgaatcgcattgccgttgtttctgtcctggatgcacataccctgtcagtgatgtcttatgaagcttggaggctcatacatctgtttctgttggctctctctagctatatgcagtggagctgctaatatgcatgaagtttgggctaggtgagcttcctctttcacttttcaaaccagtataggtattggccgatgtcaagaagacaaggccggcgacgagaggacgacagcgtgcaagaagagaaggcccatgttaggcgcaactatagggctcaaggtcaatcagttgtggtcacacttttccatttttacgttcagctaaactgaccccctgtctcatggtgcaactgtgcaaggataggcaacaagtgttcaacaatatgtctgtggatcaattgacctgcatttcagcttttagttgaggatcaaaatctcgtgtcgttcagggccctcggtagagagacattaatgtgtcggcaccgtggatcgtcgcagttgtgggtcactgtaacggcactggtcacaggcaccatctgcctctgttcgtcctcctctattggcctcctcagcacctacagggtccagatggaaaagtttctataatacatatgtaacaaatacatactccttgttcaagagatcgtaagcaagattgtaaacggtatccaacgcagaagcacctaatatggttacagagtattactgatgggcttacctgcagactgcatgctactactcaaggatgttgttgcaaatgagttgtggagaaccgtagatgcaaatggttggagagcatcttctgcaccacacatctattggcctcacataccagctgaatctgagagcaatgggtacttgtgtgtccggtgcaacggcggcttgaccttacaaatcagtgttgtatgactaatataaaactctctctctctaaagtagcatagttcaccatgcaagttttgtgtattcatggcaacatatctgaaagatttaagattacttctaccttgattttgtagatatgaaatgttgttgtcattgcacgaatcattaatgacttgattttgctctctatatgctatcttagaagtttcagagttca

SEQ ID NO: 72134 - DNA, 2591 bp, Zea Mays
ccgagaccccgacccaccccgcctcccccgccgccgcgctcgcgctcccccgcgacagccgccatacgccctatctccgccgtgcctgcgcctcctcccccgcccgcccgagacccgccaagtttcccttccttgcacggcgagatccaccatcggcgcccccttccctggcgagccacagccgtccatgttcctggccaccggcgacctcccttctctagcccttggcggcgagccaacacctcctcccatggctgccccccagaccccagtcccgtccgcgcatccgctcttccgtcagcgacgcacctattctcccctctctccccgacgtcgcccatggcgtggacggcgacctccctcaccctgcaactctgcacgtgtaagggccgtgttgcccgcctcctttccccacaccggcgcagccccctgtcgccgcggccccttccccaaacagcacggcaccacatgctccccctgccgcgcccgcactctccttccccaaataacacggccccacatcgctggttgcctcgcctcgccggggacccagcacgatggtcagggagctggtgggtgggggagacagggaggagcggaggaggaggtcaagctcaacatggacattgtgttcgtgacgctgccttccccaccgacaccaacgactcactccagaacccggatctggggcccttcctcctcaagccatggtattgggcgagggtggcgccgcctcgcgtgcttgagttcgccgagcgcgccgccagggtgctcgagcgaagaggtgagggcaccgagctcgagctcgccatgaatctccacatcgctgctggcatccactgcggactcagccaccaagccctgacattgtagccagtttcttgcaatcagaacgaatgccagttggtaaccatttaacatttcttttgctgtgtcaacttattggagttggagagaggctatcactatactgacctttatatcatcagaattgacataaatgtgatttacacgtagatacaagtttgtggcagagatttctctgacacgccaatcagtcttcgatgcgaatgcttgttgctcatatggacttgtggttgtgataatgagttcatctccgtgcacatttgtcgtccttgtggttacagcagttaactgagtagtctctcttgactgcaaaacaagcaatctgttgcctctgctgtgatggtggagcaatttcagcgccaagaatgatatctcgcattttagattgtgtcagtgcagaagtattaacattgtttttctttgcataatcagaaaggatgaggtcccttagtgcacactcaaccttcaaccactgttcatcattcagagatggccatatatgatgtgtttcagtaataattgttttgtcagacaggtatggttcatatattcaaatatccaaacctcatttggagttgtgataccagcaacctttgacatcgattcaagatgctactggagtgttattcatatgccactgcacaaatggacgttgacacgttgtagtgatcacactgtcacgagagctgagcaaactacagcctgcaagagctacacgtggcatgcttgaccacatcatggtggagaatgcaagtgttaaagttgcattgaatcgcattgccgttgtttctgtcctggatgcacataccctgtcagtgatgtcttatgaagcttggaggctcatacatctgtttctgttggctctctctagctatatgcagtggagctgctaatatgcatgaagtttgggctaggtgagcttcctctttcacttttcaaaccagtataggtattggccgatgtcaagaagacaaggccggcgacgagaggacgacagcgtgcaagaagagaaggcccatgttaggcgcaactatagggctcaaggtcaatcagttgtggtcacacttttccatttttacgttcagctaaactgaccccctgtctcatggtgcaactgtgcaaggataggcaacaagtgttcaacaatatgtctgtggatcaattgacctgcatttcagcttttagttgaggatcaaaatctcgtgtcgttcagggccctcggtagagagacattaatgtgtcggcaccgtggatcgtcgcagttgtgggtcactgtaacggcactggtcacaggcaccatctgcctctgttcgtcctcctctattggcctcctcagcacctacagggtccagtgctactactcaaggatgttgttgcaaatgagttgtggagaaccgtagatgcaaatggttggagagcatcttctgcaccacacatctattggcctcacataccagctgaatctgagagcaatgggtacttgtgtgtccggtgcaacggcggcttgaccttacaaatcagtgttgtatgactaatataaaactctctctctctaaagtagcatagttcaccatgcaagttttgtgtattcatggcaacatatctgaaagatttaagattacttctaccttgattttgtagatatgaaatgttgttgtcattgcacgaatcattaatgacttgattttgctctctatatgctatcttagaagtttcagagttca

SEQ ID NO: 72135 - DNA, 3628 bp, Zea Mays
ccgagaccccgacccaccccgcctcccccgccgccgcgctcgcgctcccccgcgacagccgccatacgccctatctccgccgtgcctgcgcctcctcccccgcccgcccgagacccgccaagtttcccttccttgcacggcgagatccaccatcggcgcccccttccctggcgagccacagccgtccatgttcctggccaccggcgacctcccttctctagcccttggcggcgagccaacacctcctcccatggctgccccccagaccccagtcccgtccgcgcatccgctcttccgtcagcgacgcacctattctcccctctctccccgacgtcgcccatggcgtggacggcgacctccctcaccctgcaactctgcacgtgtaagggccgtgttgcccgcctcctttccccacaccggcgcagccccctgtcgccgcggccccttccccaaacagcacggcaccacatgctccccctgccgcgcccgcactctccttccccaaataacacggccccacatcgctggttgcctcgcctcgccggggacccagcacgatggtcagggagctggtgggtgggggagacagggaggagcggaggaggaggtcaagctcaacatggacattgtgttcgtgacgctgccttccccaccgacaccaacgactcactccagaacccggatctggggcccttcctcctcaagccatggtattgggcgagggtggcgccgcctcgcgtgcttgagttcgccgagcgcgccgccagggtgctcgagcgaagaggtgagggcaccgagctcgagctcgccatgaatctccacatcgctgctggcatccactgcggactcagccaccaagccctgacattgtagccagtttcttgcaatcagaacgaatgccagttggtaaccatttaacatttcttttgctgtgtcaacttattggagttggagagaggctatcactatactgacctttatatcatcagaattgacataaatgtgatttacacgtagatacaagtttgtggcagagatttctctgacacgccaatcagtcttcgatgcgaatgcttgttgctcatatggacttgtggttgtgataatgagttcatctccgtgcacatttgtcgtccttgtggttacagcagttaactgagtagtctctcttgactgcaaaacaagcaatctgttgcctctgctgtgatggtggagcaatttcagcgccaagaatgatatctcgcattttagattgtgtcagtgcagaagtattaacattgtttttctttgcataatcagaaaggatgaggtcccttagtgcacactcaaccttcaaccactgttcatcattcagagatggccatatatgatgtgtttcagtaataattgttttgtcaggtttgagcaacatctttgccttctcattattcacatgaagtgcacgtagaataagcacaatgtgggagaatgttgtgtatgatgatatacttttcaaccaatcatcatatatattataaagaaccatctgtggttcagttgccttcagtataagatcaccaaacttctcaatcttcaagcaagcctggaaaggaagctgcagctcactgcccttaataacaatgttagggaagtcaggtagatggacctccaagggatccaacatgcccttccttgtcacaacaatttgctttggctgctcttctacaggaagagatcgaaccaatgcagcaacctcctcagcggttttccacttggccagctgcccaagacgcttttgccccgcccatacacttgtgtggataacctgcacattattatccatactcagtttaaacctacctatgttcagggttttacagaaaaacaaaatcacatgaaaactagagcagaaattcgaaaagaacaaaccttaagaaaaagttgacccgttcttggattgaaaaatgaaaatagcaccattaattggtttggtggtcaagttaccctaaaatgttttgtgaatagtgactcgatacacatttgtatcatccacgaaccatatgatttgattgctgaatatctctccatagttctgtgaagacaggtatggttcatatattcaaatatccaaacctcatttggagttgtgataccagcaacctttgacatcgattcaagatgctactggagtgttattcatgtgagtgtaatttagtacatgatccaactggtaacaaactttatgatactagcatatcacataatagatgagattactagaaacagctcatgttattgaatatagaaatttcagttctattgtttttacacaaatttgtttgtgatgcttcaaaccgctaatgattttttttaaaaaagttgtgcaatgagcatatcacataatatatgagaatcttaggaataaaccaagttgctaatgagtaaaattttggctttgctttttaaaaaatatgggttcaagttgttcctgacagatgccactgcacaaatggacgttgacacgttgtagtgatcacactgtcacgagagctgagcaaactacagcctgcaagagctacacgtggtagcctatactcctgccttgctataattttcttaattttcttttgttaatgagtgcagtttctctggctaatggtaaaaataatttgttctacaggcatgcttgaccacatcatggtggagaatgcaagtgttaaagttgcattgaatcgcattgccgttgtttctgtcctggatgcacataccctgtcagtgatgtcttatgaagcttggaggctcatacatctgtttctgttggctctctctagctatatgcagtggagctgctaatatgcatgaagtttgggctaggtgagcttcctctttcacttttcaaaccagtataggtattggccgatgtcaagaagacaaggccggcgacgagaggacgacagcgtgcaagaagagaaggcccatgttaggcgcaactatagggccctcggtagagagacattaatgtgtcggcaccgtggatcgtcgcagttgtgggtcactgtaacggcactggtcacaggcaccatctgcctctgttcgtcctcctctattggcctcctcagcacctacagggtccagatggaaaagtttctataatacatatgtaacaaatacatactccttgttcaagagatcgtaagcaagattgtaaacggtatccaacgcagaagcacctaatatggttacagagtattactgatgggcttacctgcagactgcatgctactactcaaggatgttgttgcaaatgagttgtggagaaccgtagatgcaaatggttggagagcatcttctgcaccacacatctattggcctcacataccagctgaatctgagagcaatgggtacttgtgtgtccggtgcaacggcggcttgaccttacaaatcagtgttgtatgactaatataaaactctctctctctaaagtagcatagttcaccatgcaagttttgtgtattcatggcaacatatctgaaagatttaagattacttctaccttgattttgtagatatgaaatgttgttgtcattgcacgaatcattaatgacttgattttgctctctatatgctatcttagaagtttcagagttca

SEQ ID NO: 72136 - DNA, 3791 bp, Zea Mays
ccgagaccccgacccaccccgcctcccccgccgccgcgctcgcgctcccccgcgacagccgccatacgccctatctccgccgtgcctgcgcctcctcccccgcccgcccgagacccgccaagtttcccttccttgcacggcgagatccaccatcggcgcccccttccctggcgagccacagccgtccatgttcctggccaccggcgacctcccttctctagcccttggcggcgagccaacacctcctcccatggctgccccccagaccccagtcccgtccgcgcatccgctcttccgtcagcgacgcacctattctcccctctctccccgacgtcgcccatggcgtggacggcgacctccctcaccctgcaactctgcacgtgtaagggccgtgttgcccgcctcctttccccacaccggcgcagccccctgtcgccgcggccccttccccaaacagcacggcaccacatgctccccctgccgcgcccgcactctccttccccaaataacacggccccacatcgctggttgcctcgcctcgccggggacccagcacgatggtcagggagctggtgggtgggggagacagggaggagcggaggaggaggtcaagctcaacatggacattgtgttcgtgacgctgccttccccaccgacaccaacgactcactccagaacccggatctggggcccttcctcctcaagccatggtattgggcgagggtggcgccgcctcgcgtgcttgagttcgccgagcgcgccgccagggtgctcgagcgaagaggtgagggcaccgagctcgagctcgccatgaatctccacatcgctgctggcatccactgcggactcagccaccaagccctgacattgtagccagtttcttgcaatcagaacgaatgccagttggtaaccatttaacatttcttttgctgtgtcaacttattggagttggagagaggctatcactatactgacctttatatcatcagaattgacataaatgtgatttacacgtagatacaagtttgtggcagagatttctctgacacgccaatcagtcttcgatgcgaatgcttgttgctcatatggacttgtggttgtgataatgagttcatctccgtgcacatttgtcgtccttgtggttacagcagttaactgagtagtctctcttgactgcaaaacaagcaatctgttgcctctgctgtgatggtggagcaatttcagcgccaagaatgatatctcgcattttagattgtgtcagtgcagaagtattaacattgtttttctttgcataatcagaaaggatgaggtcccttagtgcacactcaaccttcaaccactgttcatcattcagagatggccatatatgatgtgtttcagtaataattgttttgtcaggtttgagcaacatctttgccttctcattattcacatgaagtgcacgtagaataagcacaatgtgggagaatgttgtgtatgatgatatacttttcaaccaatcatcatatatattataaagaaccatctgtggttcagttgccttcagtataagatcaccaaacttctcaatcttcaagcaagcctggaaaggaagctgcagctcactgcccttaataacaatgttagggaagtcaggtagatggacctccaagggatccaacatgcccttccttgtcacaacaatttgctttggctgctcttctacaggaagagatcgaaccaatgcagcaacctcctcagcggttttccacttggccagctgcccaagacgcttttgccccgcccatacacttgtgtggataacctgcacattattatccatactcagtttaaacctacctatgttcagggttttacagaaaaacaaaatcacatgaaaactagagcagaaattcgaaaagaacaaaccttaagaaaaagttgacccgttcttggattgaaaaatgaaaatagcaccattaattggtttggtggtcaagttaccctaaaatgttttgtgaatagtgactcgatacacatttgtatcatccacgaaccatatgatttgattgctgaatatctctccatagttctgtgaagacaggtatggttcatatattcaaatatccaaacctcatttggagttgtgataccagcaacctttgacatcgattcaagatgctactggagtgttattcatgtgagtgtaatttagtacatgatccaactggtaacaaactttatgatactagcatatcacataatagatgagattactagaaacagctcatgttattgaatatagaaatttcagttctattgtttttacacaaatttgtttgtgatgcttcaaaccgctaatgattttttttaaaaaagttgtgcaatgagcatatcacataatatatgagaatcttaggaataaaccaagttgctaatgagtaaaattttggctttgctttttaaaaaatatgggttcaagttgttcctgacagatgccactgcacaaatggacgttgacacgttgtagtgatcacactgtcacgagagctgagcaaactacagcctgcaagagctacacgtggtagcctatactcctgccttgctataattttcttaattttcttttgttaatgagtgcagtttctctggctaatggtaaaaataatttgttctacaggcatgcttgaccacatcatggtggagaatgcaagtgttaaagttgcattgaatcgcattgccgttgtttctgtcctggatgcacataccctgtcagtgatgtcttatgaagcttggaggctcatacatctgtttctgttggctctctctagctatatgcagtggagctgctaatatgcatgaagtttgggctaggtgagcttcctctttcacttttcaaaccagtataggtattggccgatgtcaagaagacaaggccggcgacgagaggacgacagcgtgcaagaagagaaggcccatgttaggcgcaactatagggctcaaggtcaatcagttgtggtcacacttttccatttttacgttcagctaaactgaccccctgtctcatggtgcaactgtgcaaggataggcaacaagtgttcaacaatatgtctgtggatcaattgacctgcatttcagcttttagttgaggatcaaaatctcgtgtcgttcagggccctcggtagagagacattaatgtgtcggcaccgtggatcgtcgcagttgtgggtcactgtaacggcactggtcacaggcaccatctgcctctgttcgtcctcctctattggcctcctcagcacctacagggtccagatggaaaagtttctataatacatatgtaacaaatacatactccttgttcaagagatcgtaagcaagattgtaaacggtatccaacgcagaagcacctaatatggttacagagtattactgatgggcttacctgcagactgcagatgttgttgcaaatgagttgtggagaaccgtagatgcaaatggttggagagcatcttctgcaccacacatctattggcctcacataccagctgaatctgagagcaatgggtacttgtgtgtccggtgcaacggcggcttgaccttacaaatcagtgttgtatgactaatataaaactctctctctctaaagtagcatagttcaccatgcaagttttgtgtattcatggcaacatatctgaaagatttaagattacttctaccttgattttgtagatatgaaatgttgttgtcattgcacgaatcattaatgacttgattttgctctctatatgctatcttagaagtttcagagttca

SEQ ID NO: 72137 - DNA, 2614 bp, Zea Mays
ccgagaccccgacccaccccgcctcccccgccgccgcgctcgcgctcccccgcgacagccgccatacgccctatctccgccgtgcctgcgcctcctcccccgcccgcccgagacccgccaagtttcccttccttgcacggcgagatccaccatcggcgcccccttccctggcgagccacagccgtccatgttcctggccaccggcgacctcccttctctagcccttggcggcgagccaacacctcctcccatggctgccccccagaccccagtcccgtccgcgcatccgctcttccgtcagcgacgcacctattctcccctctctccccgacgtcgcccatggcgtggacggcgacctccctcaccctgcaactctgcacgtgtaagggccgtgttgcccgcctcctttccccacaccggcgcagccccctgtcgccgcggccccttccccaaacagcacggcaccacatgctccccctgccgcgcccgcactctccttccccaaataacacggccccacatcgctggttgcctcgcctcgccggggacccagcacgatggtcagggagctggtgggtgggggagacagggaggagcggaggaggaggtcaagctcaacatggacattgtgttcgtgacgctgccttccccaccgacaccaacgactcactccagaacccggatctggggcccttcctcctcaagccatggtattgggcgagggtggcgccgcctcgcgtgcttgagttcgccgagcgcgccgccagggtgctcgagcgaagaggtgagggcaccgagctcgagctcgccatgaatctccacatcgctgctggcatccactgcggactcagccaccaagccctgacattgtagccagtttcttgcaatcagaacgaatgccagttggtaaccatttaacatttcttttgctgtgtcaacttattggagttggagagaggctatcactatactgacctttatatcatcagaattgacataaatgtgatttacacgtagatacaagtttgtggcagagatttctctgacacgccaatcagtcttcgatgcgaatgcttgttgctcatatggacttgtggttgtgataatgagttcatctccgtgcacatttgtcgtccttgtggttacagcagttaactgagtagtctctcttgactgcaaaacaagcaatctgttgcctctgctgtgatggtggagcaatttcagcgccaagaatgatatctcgcattttagattgtgtcagtgcagaagtattaacattgtttttctttgcataatcagaaaggatgaggtcccttagtgcacactcaaccttcaaccactgttcatcattcagagatggccatatatgatgtgtttcagtaataattgttttgtcagttctgtgaagacaggtatggttcatatattcaaatatccaaacctcatttggagttgtgataccagcaacctttgacatcgattcaagatgctactggagtgttattcatttgttcctgacagatgccactgcacaaatggacgttgacacgttgtagtgatcacactgtcacgagagctgagcaaactacagcctgcaagagctacacgtggcatgcttgaccacatcatggtggagaatgcaagtgttaaagttgcattgaatcgcattgccgttgtttctgtcctggatgcacataccctgtcagtgatgtcttatgaagcttggaggctcatacatctgtttctgttggctctctctagctatatgcagtggagctgctaatatgcatgaagtttgggctaggtgagcttcctctttcacttttcaaaccagtataggtattggccgatgtcaagaagacaaggccggcgacgagaggacgacagcgtgcaagaagagaaggcccatgttaggcgcaactatagggctcaaggtcaatcagttgtggtcacacttttccatttttacgttcagctaaactgaccccctgtctcatggtgcaactgtgcaaggataggcaacaagtgttcaacaatatgtctgtggatcaattgacctgcatttcagcttttagttgaggatcaaaatctcgtgtcgttcagggccctcggtagagagacattaatgtgtcggcaccgtggatcgtcgcagttgtgggtcactgtaacggcactggtcacaggcaccatctgcctctgttcgtcctcctctattggcctcctcagcacctacagggtccagtgctactactcaaggatgttgttgcaaatgagttgtggagaaccgtagatgcaaatggttggagagcatcttctgcaccacacatctattggcctcacataccagctgaatctgagagcaatgggtacttgtgtgtccggtgcaacggcggcttgaccttacaaatcagtgttgtatgactaatataaaactctctctctctaaagtagcatagttcaccatgcaagttttgtgtattcatggcaacatatctgaaagatttaagattacttctaccttgattttgtagatatgaaatgttgttgtcattgcacgaatcattaatgacttgattttgctctctatatgctatcttagaagtttcagagttca

SEQ ID NO: 72138 - DNA, 3384 bp, Zea Mays
ccgagaccccgacccaccccgcctcccccgccgccgcgctcgcgctcccccgcgacagccgccatacgccctatctccgccgtgcctgcgcctcctcccccgcccgcccgagacccgccaagtttcccttccttgcacggcgagatccaccatcggcgcccccttccctggcgagccacagccgtccatgttcctggccaccggcgacctcccttctctagcccttggcggcgagccaacacctcctcccatggctgccccccagaccccagtcccgtccgcgcatccgctcttccgtcagcgacgcacctattctcccctctctccccgacgtcgcccatggcgtggacggcgacctccctcaccctgcaactctgcacgtgtaagggccgtgttgcccgcctcctttccccacaccggcgcagccccctgtcgccgcggccccttccccaaacagcacggcaccacatgctccccctgccgcgcccgcactctccttccccaaataacacggccccacatcgctggttgcctcgcctcgccggggacccagcacgatggtcagggagctggtgggtgggggagacagggaggagcggaggaggaggtcaagctcaacatggacattgtgttcgtgacgctgccttccccaccgacaccaacgactcactccagaacccggatctggggcccttcctcctcaagccatggtattgggcgagggtggcgccgcctcgcgtgcttgagttcgccgagcgcgccgccagggtgctcgagcgaagaggtgagggcaccgagctcgagctcgccatgaatctccacatcgctgctggcatccactgcggactcagccaccaagccctgacattgtagccagtttcttgcaatcagaacgaatgccagttgatacaagtttgtggcagagatttctctgacacgccaatcagtcttcgatgcgaatgcttgttgctcatatggacttgtggttgtgataatgagttcatctccgtgcacatttgtcgtccttgtggttacagcagttaactgagtagtctctcttgactgcaaaacaagcaatctgttgcctctgctgtgatggtggagcaatttcagcgccaagaatgatatctcgcattttagattgtgtcagtgcagaagtattaacattgtttttctttgcataatcagaaaggatgaggtcccttagtgcacactcaaccttcaaccactgttcatcattcagagatggccatatatgatgtgtttcagtaataattgttttgtcaggtttgagcaacatctttgccttctcattattcacatgaagtgcacgtagaataagcacaatgtgggagaatgttgtgtatgatgatatacttttcaaccaatcatcatatatattataaagaaccatctgtggttcagttgccttcagtataagatcaccaaacttctcaatcttcaagcaagcctggaaaggaagctgcagctcactgcccttaataacaatgttagggaagtcaggtagatggacctccaagggatccaacatgcccttccttgtcacaacaatttgctttggctgctcttctacaggaagagatcgaaccaatgcagcaacctcctcagcggttttccacttggccagctgcccaagacgcttttgccccgcccatacacttgtgtggataacctgcacattattatccatactcagtttaaacctacctatgttcagggttttacagaaaaacaaaatcacatgaaaactagagcagaaattcgaaaagaacaaaccttaagaaaaagttgacccgttcttggattgaaaaatgaaaatagcaccattaattggtttggtggtcaagttaccctaaaatgttttgtgaatagtgactcgatacacatttgtatcatccacgaaccatatgatttgattgctgaatatctctccatagttctgtgaagacaggtatggttcatatattcaaatatccaaacctcatttggagttgtgataccagcaacctttgacatcgattcaagatgctactggagtgttattcatgtgagtgtaatttagtacatgatccaactggtaacaaactttatgatactagcatatcacataatagatgagattactagaaacagctcatgttattgaatatagaaatttcagttctattgtttttacacaaatttgtttgtgatgcttcaaaccgctaatgattttttttaaaaaagttgtgcaatgagcatatcacataatatatgagaatcttaggaataaaccaagttgctaatgagtaaaattttggctttgctttttaaaaaatatgggttcaagttgttcctgacagatgccactgcacaaatggacgttgacacgttgtagtgatcacactgtcacgagagctgagcaaactacagcctgcaagagctacacgtggcatgcttgaccacatcatggtggagaatgcaagtgttaaagttgcattgaatcgcattgccgttgtttctgtcctggatgcacataccctgtcagtgatgtcttatgaagcttggaggctcatacatctgtttctgttggctctctctagctatatgcagtggagctgctaatatgcatgaagtttgggctaggtgagcttcctctttcacttttcaaaccagtataggtattggccgatgtcaagaagacaaggccggcgacgagaggacgacagcgtgcaagaagagaaggcccatgttaggcgcaactataggtgcaactgtgcaaggataggcaacaagtgttcaacaatatgtctgtggatcaattgacctgcatttcagcttttagttgaggatcaaaatctcgtgtcgttcagggccctcggtagagagacattaatgtgtcggcaccgtggatcgtcgcagttgtgggtcactgtaacggcactggtcacaggcaccatctgcctctgttcgtcctcctctattggcctcctcagcacctacagggtccagtgctactactcaaggatgttgttgcaaatgagttgtggagaaccgtagatgcaaatggttggagagcatcttctgcaccacacatctattggcctcacataccagctgaatctgagagcaatgggtacttgtgtgtccggtgcaacggcggcttgaccttacaaatcagtgttgtatgactaatataaaactctctctctctaaagtagcatagttcaccatgcaagttttgtgtattcatggcaacatatctgaaagatttaagattacttctaccttgattttgtagatatgaaatgttgttgtcattgcacgaatcattaatgacttgattttgctctctatatgctatcttagaagtttcagagttca

SEQ ID NO: 72139 - DNA, 2852 bp, Zea Mays
ccgagaccccgacccaccccgcctcccccgccgccgcgctcgcgctcccccgcgacagccgccatacgccctatctccgccgtgcctgcgcctcctcccccgcccgcccgagacccgccaagtttcccttccttgcacggcgagatccaccatcggcgcccccttccctggcgagccacagccgtccatgttcctggccaccggcgacctcccttctctagcccttggcggcgagccaacacctcctcccatggctgccccccagaccccagtcccgtccgcgcatccgctcttccgtcagcgacgcacctattctcccctctctccccgacgtcgcccatggcgtggacggcgacctccctcaccctgcaactctgcacgtgtaagggccgtgttgcccgcctcctttccccacaccggcgcagccccctgtcgccgcggccccttccccaaacagcacggcaccacatgctccccctgccgcgcccgcactctccttccccaaataacacggccccacatcgctggttgcctcgcctcgccggggacccagcacgatggtcagggagctggtgggtgggggagacagggaggagcggaggaggaggtcaagctcaacatggacattgtgttcgtgacgctgccttccccaccgacaccaacgactcactccagaacccggatctggggcccttcctcctcaagccatggtattgggcgagggtggcgccgcctcgcgtgcttgagttcgccgagcgcgccgccagggtgctcgagcgaagaggtgagggcaccgagctcgagctcgccatgaatctccacatcgctgctggcatccactgcggactcagccaccaagccctgacattgtagccagtttcttgcaatcagaacgaatgccagttggtaaccatttaacatttcttttgctgtgtcaacttattggagttggagagaggctatcactatactgacctttatatcatcagaattgacataaatgtgatttacacgtagatacaagtttgtggcagagatttctctgacacgccaatcagtcttcgatgcgaatgcttgttgctcatatggacttgtggttgtgataatgagttcatctccgtgcacatttgtcgtccttgtggttacagcagttaactgagtagtctctcttgactgcaaaacaagcaatctgttgcctctgctgtgatggtggagcaatttcagcgccaagaatgatatctcgcattttagattgtgtcagtgcagaagtattaacattgtttttctttgcataatcagaaaggatgaggtcccttagtgcacactcaaccttcaaccactgttcatcattcagagatggccatatatgatgtgtttcagtaataattgttttgtcagttctgtgaagacaggtatggttcatatattcaaatatccaaacctcatttggagttgtgataccagcaacctttgacatcgattcaagatgctactggagtgttattcatttgttcctgacagatgccactgcacaaatggacgttgacacgttgtagtgatcacactgtcacgagagctgagcaaactacagcctgcaagagctacacgtggtagcctatactcctgccttgctataattttcttaattttcttttgttaatgagtgcagtttctctggctaatggtaaaaataatttgttctacaggcatgcttgaccacatcatggtggagaatgcaagtgttaaagttgcattgaatcgcattgccgttgtttctgtcctggatgcacataccctgtcagtgatgtcttatgaagcttggaggctcatacatctgtttctgttggctctctctagctatatgcagtggagctgctaatatgcatgaagtttgggctaggtgagcttcctctttcacttttcaaaccagtataggtattggccgatgtcaagaagacaaggccggcgacgagaggacgacagcgtgcaagaagagaaggcccatgttaggcgcaactatagggctcaaggtcaatcagttgtggtcacacttttccatttttacgttcagctaaactgaccccctgtctcatggtgcaactgtgcaaggataggcaacaagtgttcaacaatatgtctgtggatcaattgacctgcatttcagcttttagttgaggatcaaaatctcgtgtcgttcagggccctcggtagagagacattaatgtgtcggcaccgtggatcgtcgcagttgtgggtcactgtaacggcactggtcacaggcaccatctgcctctgttcgtcctcctctattggcctcctcagcacctacagggtccagatggaaaagtttctataatacatatgtaacaaatacatactccttgttcaagagatcgtaagcaagattgtaaacggtatccaacgcagaagcacctaatatggttacagagtattactgatgggcttacctgcagactgcatgctactactcaaggatgttgttgcaaatgagttgtggagaaccgtagatgcaaatggttggagagcatcttctgcaccacacatctattggcctcacataccagctgaatctgagagcaatgggtacttgtgtgtccggtgcaacggcggcttgaccttacaaatcagtgttgtatgactaatataaaactctctctctctaaagtagcatagttcaccatgcaagttttgtgtattcatggcaacatatctgaaagatttaagattacttctaccttgattttgtagatatgaaatgttgttgtcattgcacgaatcattaatgacttgattttgctctctatatgctatcttagaagtttcagagttca

SEQ ID NO: 72140 - DNA, 5837 bp, Zea Mays
ccgagaccccgacccaccccgcctcccccgccgccgcgctcgcgctcccccgcgacagccgccatacgccctatctccgccgtgcctgcgcctcctcccccgcccgcccgagacccgccaagtttcccttccttgcacggcgagatccaccatcggcgcccccttccctggcgagccacagccgtccatgttcctggccaccggcgacctcccttctctagcccttggcggcgagccaacacctcctcccatggctgccccccagaccccagtcccgtccgcgcatccgctcttccgtcagcgacgcacctattctcccctctctccccgacgtcgcccatggcgtggacggcgacctccctcaccctgcaactctgcacgtgtaagggccgtgttgcccgcctcctttccccacaccggcgcagccccctgtcgccgcggccccttccccaaacagcacggcaccacatgctccccctgccgcgcccgcactctccttccccaaataacacggccccacatcgctggttgcctcgcctcgccggggacccagcacgatggtcagggagctggtgggtgggggagacagggaggagcggaggaggaggtcaagctcaacatggacattgtgttcgtgacgctgccttccccaccgacaccaacgactcactccagaacccggatctggggcccttcctcctcaagccatggtattgggcgagggtggcgccgcctcgcgtgcttgagttcgccgagcgcgccgccagggtgctcgagcgaagaggtgagggcaccgagctcgagctcgccatgaatctccacatcgctgctggcatccactgcggactcagccaccaagccctgacattgtagccagtttcttgcaatcagaacgaatgccagttgatacaagtttgtggcagagatttctctgacacgccaatcagtcttcgatgcgaatgcttgttgctcatatggacttgtggttgtgataatgagttcatctccgtgcacatttgtcgtccttgtggttacagcagttaactgagtagtctctcttgactgcaaaacaagcaatctgttgcctctgctgtgatggtggagcaatttcagcgccaagaatgatatctcgcattttagattgtgtcagtgcagaagtattaacattgtttttctttgcataatcagaaaggatgaggtcccttagtgcacactcaaccttcaaccactgttcatcattcagagatggccatatatgatgtgtttcagtaataattgttttgtcaggtttgagcaacatctttgccttctcattattcacatgaagtgcacgtagaataagcacaatgtgggagaatgttgtgtatgatgatatacttttcaaccaatcatcatatatattataaagaaccatctgtggttcagttgccttcagtataagatcaccaaacttctcaatcttcaagcaagcctggaaaggaagctgcagctcactgcccttaataacaatgttagggaagtcaggtagatggacctccaagggatccaacatgcccttccttgtcacaacaatttgctttggctgctcttctacaggaagagatcgaaccaatgcagcaacctcctcagcggttttccacttggccagctgcccaagacgcttttgccccgcccatacacttgtgtggataacctgcacattattatccatactcagtttaaacctacctatgttcagggttttacagaaaaacaaaatcacatgaaaactagagcagaaattcgaaaagaacaaaccttaagaaaaagttgacccgttcttggattgaaaaatgaaaatagcaccattaattggtttggtggtcaagttaccctaaaatgttttgtgaatagtgactcgatacacatttgtatcatccacgaaccatatgatttgattgctgaatatctctccatagttctgtgaagacaggtatggttcatatattcaaatatccaaacctcatttggagttgtgataccagcaacctttgacatcgattcaagatgctactggagtgttattcatttgttcctgacagatgccactgcacaaatggacgttgacacgttgtagtgatcacactgtcacgagagctgagcaaactacagcctgcaagagctacacgtggcatgcttgaccacatcatggtggagaatgcaagtgttaaagttgcattgaatcgcattgccgttgtttctgtcctggatgcacataccctgtcagtgatgtcttatgaagcttggaggctcatacatctgtttctgttggctctctctagctatatgcagtggagctgctaatatgcatgaagtttgggctaggtgagcttcctctttcacttttcaaaccagtataggtattggccgatgtcaagaagacaaggccggcgacgagaggacgacagcgtgcaagaagagaaggcccatgttaggcgcaactatagggctcaaggtcaatcagttgtggtcacacttttccatttttacgttcagctaaactgaccccctgtctcatggtgcaactgtgcaaggataggcaacaagtgttcaacaatatgtctgtggatcaattgacctgcatttcagcttttagttgaggatcaaaatctcgtgtcgttcagggccctcggtagagagacattaatgtgtcggcaccgtggatcgtcgcagttgtgggtcactgtaacggcactggtcacaggcaccatctgcctctgttcgtcctcctctattggcctcctcagcacctacagggtccaggatgttgttgcaaatgagttgtggagaaccgtagatgcaaatggttggagagcatcttctgcaccacacatctattggcctcacataccagctgaatctgagagcaatgggtacttgtgtgtccggtgcaacggcggcttgaccttacaaatcagtgttgctggtataaaggaatgcgacaagtcagtcggcaatcttctgtatgcagtcgccaccaagtacccaactaatgcacttgttcaccgtcctgtccttattagctatgtcttgtcaacaaagataaagaaccccgcacagctagatgctgctctgtcatttcttactaatactggtcctgattctctagatgtggtcaaatttgaagaagcatgtggtgtaggtgtggttgtttctattgaggaaattaaatctactgttactgatgtgcttgaggagaatatggaagctataaaggagcagcgatatcacataaatgttggtacactatgcggacaggtcaggaagagacacccctggggtgatgctaaggcgataaaggaggaaattgacaagaggcttgcagaaatcctaggtcccaagacagaagctgacaatataaaaccagtgaaaaagaagaaggaaaaaccagcaaaagttgaggagaaaaaagttgcagttgccactgctgccccaccatctgaggaggaattgaacccgtacactatatttccccaaccagaggaaaacttcaaggttcatacagaaatatttttcagtgatgggaacatatggagagcgcataacacaaaggaaattttagaaaaacatcttaaagcaactggaggaaaagtgatgacccgttttccaccagaacctaatggatatcttcatattggtcatgccaaggctatgtttattgattttggtctggctaaggagcgaaatggccattgctaccttagatttgatgacacaaatccagaagctgaaaagaaagaatacatagatcacattcaggaaatcgtccattggatgggatgggagccctacaaagtaacatacacgagtgactatttccaagctttgtatgaacatgccgttgagttaatacagaaagggctagcatatgtggatcaccagactgcagaagaaatcaaggaatacagggaaaagaagatggatagtccatggaggggtaggccaattgaagagtctctgaaattatttgaagacatgaggcgtgggttgattgcagagggtgcagcaactctccgtatgaagcaggatatgcaaaatgagaacaaaaatatgtctgacttaatagcatatagaataaaattcaccccccatccacatgctggcgacaagtggtgtgtctatccgagctatgactacgctcattgcatggtggattctcttgaaaacatcacacattcgctgtgcacacttgagtttgacatacgtcgcccttcatactactggctacttgttgccttgggcctttatcaaccatatgtgtgggaatattcgaggctaaacatatcaaatactgtgatgtctaaaagaaagttgaatcgacttgtgacagagaagtgggtagatgggtgggatgatccccgcttgttgacactggctggtctccggcgacggggagtatcatcaactgcaataaattcctttattcgtggaatcgggataacgagaagtgacaatagcttaattcgtgttgatcgtctagaatatcacatcagggaggagcttaacaaaacagcccctcgaaccatggttgttttgcgacctctaaaggtggtaataactaacttggaagaaggaaaagtactagaccttgatggcaaaatgtggcctgatgcttctgatactgatgcttcctcccactataaggttccgttctcaagaactgtctacattgagaaaactgattttcgcctaaaggactcaaaagactactatgggctagcccctggtaaatctgtcatgctaaggtatgcgttccccataaaatgcacagatgttatctctggtgatagtcctgatgatattgttgaaattcgagctgaatatgatcctttgaagacttctaaactgaagggtgttcttcactggattgctgagccagcacctggtgtagagccattgaaggtggaagtaagattattcgagaaattgttcatgtcagagaatcctgctgaattggaagattggcttggcgatcttaacccacactcgaaagaggtgataaaggatgcttatgctgtaccatcacttgccactgcggttctgggtgacaagttccagtttgagcggcttggttacttcgccgtggatactgactccacacctgagaaactcgtgttcaacagaactgttaccctccgtgattcgttcgggaaagctggacccaagtgactgttcagtgtaatttagggagggcgctggttttgatcggttgcagaggcgcacctgaactatacagtttgtgaagaaaatggtcgtctaatacagaacagtttaaaggccttactctttataaaatttagggttttttaatctggtgccctcagttttggtgatgtgttcatttgtaccccttgtttacttcgaatcagattttgtatgatagtgttagtgtcccgattctaccgtctgtaaccgaaaggtcccgggttcgagccccagcctctgcatattatgcgggtaaggcttggcgcttaaagatacaattcccaagaccccgcacagtgcgggaagcctacagcactgggtacgcctagtgttagtgtcccgattcccattctgtttgatgtcatactattgtgatgggagttctgttttcccctgcgtcctcttttttttgcaaatccttactgtgatactactccctttaattttcaaattataagccattttgatttccttggagagtcacatcacaagtctattaaaattataaagaaaacgaagatttatcaaaattataaagaacaaatatttataacataaaatagatatagtataaaaatattataaaaacataa

SEQ ID NO: 72141 - DNA, 6275 bp, Zea Mays
ccgagaccccgacccaccccgcctcccccgccgccgcgctcgcgctcccccgcgacagccgccatacgccctatctccgccgtgcctgcgcctcctcccccgcccgcccgagacccgccaagtttcccttccttgcacggcgagatccaccatcggcgcccccttccctggcgagccacagccgtccatgttcctggccaccggcgacctcccttctctagcccttggcggcgagccaacacctcctcccatggctgccccccagaccccagtcccgtccgcgcatccgctcttccgtcagcgacgcacctattctcccctctctccccgacgtcgcccatggcgtggacggcgacctccctcaccctgcaactctgcacgtgtaagggccgtgttgcccgcctcctttccccacaccggcgcagccccctgtcgccgcggccccttccccaaacagcacggcaccacatgctccccctgccgcgcccgcactctccttccccaaataacacggccccacatcgctggttgcctcgcctcgccggggacccagcacgatggtcagggagctggtgggtgggggagacagggaggagcggaggaggaggtcaagctcaacatggacattgtgttcgtgacgctgccttccccaccgacaccaacgactcactccagaacccggatctggggcccttcctcctcaagccatggtattgggcgagggtggcgccgcctcgcgtgcttgagttcgccgagcgcgccgccagggtgctcgagcgaagaggtgagggcaccgagctcgagctcgccatgaatctccacatcgctgctggcatccactgcggactcagccaccaagccctgacattgtagccagtttcttgcaatcagaacgaatgccagttgatacaagtttgtggcagagatttctctgacacgccaatcagtcttcgatgcgaatgcttgttgctcatatggacttgtggttgtgataatgagttcatctccgtgcacatttgtcgtccttgtggttacagcagttaactgagtagtctctcttgactgcaaaacaagcaatctgttgcctctgctgtgatggtggagcaatttcagcgccaagaatgatatctcgcattttagattgtgtcagtgcagaagtattaacattgtttttctttgcataatcagaaaggatgaggtcccttagtgcacactcaaccttcaaccactgttcatcattcagagatggccatatatgatgtgtttcagtaataattgttttgtcaggtttgagcaacatctttgccttctcattattcacatgaagtgcacgtagaataagcacaatgtgggagaatgttgtgtatgatgatatacttttcaaccaatcatcatatatattataaagaaccatctgtggttcagttgccttcagtataagatcaccaaacttctcaatcttcaagcaagcctggaaaggaagctgcagctcactgcccttaataacaatgttagggaagtcaggtagatggacctccaagggatccaacatgcccttccttgtcacaacaatttgctttggctgctcttctacaggaagagatcgaaccaatgcagcaacctcctcagcggttttccacttggccagctgcccaagacgcttttgccccgcccatacacttgtgtggataacctgcacattattatccatactcagtttaaacctacctatgttcagggttttacagaaaaacaaaatcacatgaaaactagagcagaaattcgaaaagaacaaaccttaagaaaaagttgacccgttcttggattgaaaaatgaaaatagcaccattaattggtttggtggtcaagttaccctaaaatgttttgtgaatagtgactcgatacacatttgtatcatccacgaaccatatgatttgattgctgaatatctctccatagttctgtgaagacaggtatggttcatatattcaaatatccaaacctcatttggagttgtgataccagcaacctttgacatcgattcaagatgctactggagtgttattcatgtgagtgtaatttagtacatgatccaactggtaacaaactttatgatactagcatatcacataatagatgagattactagaaacagctcatgttattgaatatagaaatttcagttctattgtttttacacaaatttgtttgtgatgcttcaaaccgctaatgattttttttaaaaaagttgtgcaatgagcatatcacataatatatgagaatcttaggaataaaccaagttgctaatgagtaaaattttggctttgctttttaaaaaatatgggttcaagttgttcctgacagatgccactgcacaaatggacgttgacacgttgtagtgatcacactgtcacgagagctgagcaaactacagcctgcaagagctacacgtggcatgcttgaccacatcatggtggagaatgcaagtgttaaagttgcattgaatcgcattgccgttgtttctgtcctggatgcacataccctgtcagtgatgtcttatgaagcttggaggctcatacatctgtttctgttggctctctctagctatatgcagtggagctgctaatatgcatgaagtttgggctaggtgagcttcctctttcacttttcaaaccagtataggtattggccgatgtcaagaagacaaggccggcgacgagaggacgacagcgtgcaagaagagaaggcccatgttaggcgcaactatagggctcaaggtcaatcagttgtggtcacacttttccatttttacgttcagctaaactgaccccctgtctcatggtgcaactgtgcaaggataggcaacaagtgttcaacaatatgtctgtggatcaattgacctgcatttcagcttttagttgaggatcaaaatctcgtgtcgttcagggccctcggtagagagacattaatgtgtcggcaccgtggatcgtcgcagttgtgggtcactgtaacggcactggtcacaggcaccatctgcctctgttcgtcctcctctattggcctcctcagcacctacagggtccagatggaaaagtttctataatacatatgtaacaaatacatactccttgttcaagagatcgtaagcaagattgtaaacggtatccaacgcagaagcacctaatatggttacagagtattactgatgggcttacctgcagactgcatgctactactcaaggatgttgttgcaaatgagttgtggagaaccgtagatgcaaatggttggagagcatcttctgcaccacacatctattggcctcacataccagctgaatctgagagcaatgggtacttgtgtgtccggtgcaacggcggcttgaccttacaaatcagtgttgctggtataaaggaatgcgacaagtcagtcggcaatcttctgtatgcagtcgccaccaagtacccaactaatgcacttgttcaccgtcctgtccttattagctatgtcttgtcaacaaagataaagaaccccgcacagctagatgctgctctgtcatttcttactaatactggtcctgattctctagatgtggtcaaatttgaagaagcatgtggtgtaggtgtggttgtttctattgaggaaattaaatctactgttactgatgtgcttgaggagaatatggaagctataaaggagcagcgatatcacataaatgttggtacactatgcggacaggtcaggaagagacacccctggggtgatgctaaggcgataaaggaggaaattgacaagaggcttgcagaaatcctaggtcccaagacagaagctgacaatataaaaccagtgaaaaagaagaaggaaaaaccagcaaaagttgaggagaaaaaagttgcagttgccactgctgccccaccatctgaggaggaattgaacccgtacactatatttccccaaccagaggaaaacttcaaggttcatacagaaatatttttcagtgatgggaacatatggagagcgcataacacaaaggaaattttagaaaaacatcttaaagcaactggaggaaaagtgatgacccgttttccaccagaacctaatggatatcttcatattggtcatgccaaggctatgtttattgattttggtctggctaaggagcgaaatggccattgctaccttagatttgatgacacaaatccagaagctgaaaagaaagaatacatagatcacattcaggaaatcgtccattggatgggatgggagccctacaaagtaacatacacgagtgactatttccaagctttgtatgaacatgccgttgagttaatacagaaagggctagcatatgtggatcaccagactgcagaagaaatcaaggaatacagggaaaagaagatggatagtccatggaggggtaggccaattgaagagtctctgaaattatttgaagacatgaggcgtgggttgattgcagagggtgcagcaactctccgtatgaagcaggatatgcaaaatgagaacaaaaatatgtctgacttaatagcatatagaataaaattcaccccccatccacatgctggcgacaagtggtgtgtctatccgagctatgactacgctcattgcatggtggattctcttgaaaacatcacacattcgctgtgcacacttgagtttgacatacgtcgcccttcatactactggctacttgttgccttgggcctttatcaaccatatgtgtgggaatattcgaggctaaacatatcaaatactgtgatgtctaaaagaaagttgaatcgacttgtgacagagaagtgggtagatgggtgggatgatccccgcttgttgacactggctggtctccggcgacggggagtatcatcaactgcaataaattcctttattcgtggaatcgggataacgagaagtgacaatagcttaattcgtgttgatcgtctagaatatcacatcagggaggagcttaacaaaacagcccctcgaaccatggttgttttgcgacctctaaaggtggtaataactaacttggaagaaggaaaagtactagaccttgatggcaaaatgtggcctgatgcttctgatactgatgcttcctcccactataaggttccgttctcaagaactgtctacattgagaaaactgattttcgcctaaaggactcaaaagactactatgggctagcccctggtaaatctgtcatgctaaggtatgcgttccccataaaatgcacagatgttatctctggtgatagtcctgatgatattgttgaaattcgagctgaatatgatcctttgaagacttctaaactgaagggtgttcttcactggattgctgagccagcacctggtgtagagccattgaaggtggaagtaagattattcgagaaattgttcatgtcagagaatcctgctgaattggaagattggcttggcgatcttaacccacactcgaaagaggtgataaaggatgcttatgctgtaccatcacttgccactgcggttctgggtgacaagttccagtttgagcggcttggttacttcgccgtggatactgactccacacctgagaaactcgtgttcaacagaactgttaccctccgtgattcgttcgggaaagctggacccaagtgactgttcagtgtaatttagggagggcgctggttttgatcggttgcagaggcgcacctgaactatacagtttgtgaagaaaatggtcgtctaatacagaacagtttaaaggccttactctttataaaatttagggttttttaatctggtgccctcagttttggtgatgtgttcatttgtaccccttgtttacttcgaatcagattttgtatgatagtgttagtgtcccgattctaccgtctgtaaccgaaaggtcccgggttcgagccccagcctctgcatattatgcgggtaaggcttggcgcttaaagatacaattcccaagaccccgcacagtgcgggaagcctacagcactgggtacgcctagtgttagtgtcccgattcccattctgtttgatgtcatactattgtgatgggagttctgttttcccctgcgtcctcttttttttgcaaatccttactgtgatactactccctttaattttcaaattataagccattttgatttccttggagagtcacatcacaagtctattaaaattataaagaaaacgaagatttatcaaaattataaagaacaaatatttataacataaaatagatatagtataaaaatattataaaaacataa

SEQ ID NO: 72142 - DNA, 3103 bp, Zea Mays
aatccaacaatccaaaccacccacaccacaccaccctgctcttcacgagctcctccactctgttcttccccgccgctccactgcgcccttcctcccgccgggatcctaaaccctagcccctagggagcgggagaggcgctgctggcgctcggcctcgaccagcgcaccgccgagaacgcgctcgtcaacgccaaggtcaccgccaacctcgcctccgtcatagccgaggctggtataaaggaatgcgacaagtcagtcggcaatcttctgtatgcagtcgccaccaagtacccaactaatgcacttgttcaccgtcctgtccttattagctatgtcttgtcaacaaagataaagaaccccgcacagctagatgctgctctgtcatttcttactaatactggtcctgattctctagatgtggtcaaatttgaagaagcatgtggtgtaggtgtggttgtttctattgaggaaattaaatctactgttactgatgtgcttgaggagaatatggaagctataaaggagcagcgatatcacataaatgttggtacactatgcggacaggtcaggaagagacacccctggggtgatgctaaggcgataaaggaggaaattgacaagaggcttgcagaaatcctaggtcccaagacagaagctgacaatataaaaccagtgaaaaagaagaaggaaaaaccagcaaaagttgaggagaaaaaagttgcagttgccactgctgccccaccatctgaggaggaattgaacccgtacactatatttccccaaccagaggaaaacttcaaggttcatacagaaatatttttcagtgatgggaacatatggagagcgcataacacaaaggaaattttagaaaaacatcttaaagcaactggaggaaaagtgatgacccgttttccaccagaacctaatggatatcttcatattggtcatgccaaggctatgtttattgattttggtctggctaaggagcgaaatggccattgctaccttagatttgatgacacaaatccagaagctgaaaagaaagaatacatagatcacattcaggaaatcgtccattggatgggatgggagccctacaaagtaacatacacgagtgactatttccaagctttgtatgaacatgccgttgagttaatacagaaagggctagcatatgtggatcaccagactgcagaagaaatcaaggaatacagggaaaagaagatggatagtccatggaggggtaggccaattgaagagtctctgaaattatttgaagacatgaggcgtgggttgattgcagagggtgcagcaactctccgtatgaagcaggatatgcaaaatgagaacaaaaatatgtctgacttaatagcatatagaataaaattcaccccccatccacatgctggcgacaagtggtgtgtctatccgagctatgactacgctcattgcatggtggattctcttgaaaacatcacacattcgctgtgcacacttgagtttgacatacgtcgcccttcatactactggctacttgttgccttgggcctttatcaaccatatgtgtgggaatattcgaggctaaacatatcaaatactgtgatgtctaaaagaaagtgaatcgacttgtgacagagaagtgggtagatgggtgggatgatccccgcttgttgacactggctggtctccggcgacggggagtatcatcaactgcaataaattcctttattcgtggaatcgggataacgagaagtgacaatagcttaattcgtgttgatcgtctagaatatcacatcagggaggagcttaacaaaacagcccctcgaaccatggttgttttgcgacctctaaaggtggtaataactaacttggaagaaggaaaagtactagaccttgatggcaaaatgtggcctgatgcttctgatactgatgcttcctcccactataaggttccgttctcaagaactgtctacattgagaaaactgattttcgcctaaaggactcaaaagactactatgggctagcccctggtaaatctgtcatgctaaggtatgcgttccccataaaatgcacagatgttatctctggtgatagtcctgatgatattgttgaaattcgagctgaatatgatcctttgaagacttctaaactgaagggtgttcttcactggattgctgagccagcacctggtgtagagccattgaaggtggaagtaagattattcgagaaattgttcatgtcagagaatcctgctgaattggaagattggcttggcgatcttaacccacactcgaaagaggtgataaaggatgcttatgctgtaccatcacttgccactgcggttctgggtgacaagttccagtttgagcggcttggttacttcgccgtggatactgactccacacctgagaaactcgtgttcaacagaactgttaccctccgtgattcgttcgggaaagctggacccaagtgactgttcagtgtaatttagggagggcgctggttttgatcggttgcagaggcgcacctgaactatacagtttgtgaagaaaatggtcgtctaatacagaacagtttaaaggccttactctttataaaatttagggttttttaatctggtgccctcagttttggtgatgtgttcatttgtaccccttgtttacttcgaatcagattttgtatgatagtgttagtgtcccgattctaccgtctgtaaccgaaaggtcccgggttcgagccccagcctctgcatattatgcgggtaaggcttggcgcttaaagatacaattcccaagaccccgcacagtgcgggaagcctacagcactgggtacgcctagtgttagtgtcccgattcccattctgtttgatgtcatactattgtgatgggagttctgttttcccctgcgtcctcttttttttgcaaatccttactgtgatactactccctttaattttcaaattataagccattttgatttccttggagagtcacatcacaagtctattaaaattataaagaaaacgaagatttatcaaaattataaagaacaaatatttataacataaaatagatatagtataaaaatattataaaaacataa

SEQ ID NO: 72143 - DNA, 3190 bp, Zea Mays
aatccaacaatccaaaccacccacaccacaccaccctgctcttcacgagctcctccactctgttcttccccgccgctccactgcgcccttcctcccgccgggatcctaaaccctagcccctagggagcgggagaggctgctgctgctgctgctaccgcggcggcgccggaggggatgggcaccgggggagacgggagcaaggcgggcccggcgctgccgctcgaggcgctgctggcgctcggcctcgaccagcgcaccgccgagaacgcgctcgtcaacgccaaggtcaccgccaacctcgcctccgtcatagccgaggctggtataaaggaatgcgacaagtcagtcggcaatcttctgtatgcagtcgccaccaagtacccaactaatgcacttgttcaccgtcctgtccttattagctatgtcttgtcaacaaagataaagaaccccgcacagctagatgctgctctgtcatttcttactaatactggtcctgattctctagatgtggtcaaatttgaagaagcatgtggtgtgtggttgtttctattgaggaaattaaatctactgttactgatgtgcttgaggagaatatggaagctataaaggagcagcgatatcacataaatgttggtacactatgcggacaggtcaggaagagacacccctggggtgatgctaaggcgataaaggaggaaattgacaagaggcttgcagaaatcctaggtcccaagacagaagctgacaatataaaaccagtgaaaaagaagaaggaaaaaccagcaaaagttgaggagaaaaaagttgcagttgccactgctgccccaccatctgaggaggaattgaacccgtacactatatttccccaaccagaggaaaacttcaaggttcatacagaaatatttttcagtgatgggaacatatggagagcgcataacacaaaggaaattttagaaaaacatcttaaagcaactggaggaaaagtgatgacccgttttccaccagaacctaatggatatcttcatattggtcatgccaaggctatgtttattgattttggtctggctaaggagcgaaatggccattgctaccttagatttgatgacacaaatccagaagctgaaaagaaagaatacatagatcacattcaggaaatcgtccattggatgggatgggagccctacaaagtaacatacacgagtgactatttccaagctttgtatgaacatgccgttgagttaatacagaaagggctagcatatgtggatcaccagactgcagaagaaatcaaggaatacagggaaaagaagatggatagtccatggaggggtaggccaattgaagagtctctgaaattatttgaagacatgaggcgtgggttgattgcagagggtgcagcaactctccgtatgaagcaggatatgcaaaatgagaacaaaaatatgtctgacttaatagcatatagaataaaattcaccccccatccacatgctggcgacaagtggtgtgtctatccgagctatgactacgctcattgcatggtggattctcttgaaaacatcacacattcgctgtgcacacttgagtttgacatacgtcgcccttcatactactggctacttgttgccttgggcctttatcaaccatatgtgtgggaatattcgaggctaaacatatcaaatactgtgatgtctaaaagaaagttgaatcgacttgtgacagagaagtgggtagatgggtgggatgatccccgcttgttgacactggctggtctccggcgacggggagtatcatcaactgcaataaattcctttattcgtggaatcgggataacgagaagtgacaatagcttaattcgtgttgatcgtctagaatatcacatcagggaggagcttaacaaaacagcccctcgaaccatggttgttttgcgacctctaaaggtggtaataactaacttggaagaaggaaaagtactagaccttgatggcaaaatgtggcctgatgcttctgatactgatgcttcctcccactataaggttccgttctcaagaactgtctacattgagaaaactgattttcgcctaaaggactcaaaagactactatgggctagcccctggtaaatctgtcatgctaaggtatgcgttccccataaaatgcacagatgttatctctggtgatagtcctgatgatattgttgaaattcgagctgaatatgatcctttgaagacttctaaactgaagggtgttcttcactggattgctgagccagcacctggtgtagagccattgaaggtggaagtaagattattcgagaaattgttcatgtcagagaatcctgctgaattggaagattggcttggcgatcttaacccacactcgaaagaggtgataaaggatgcttatgctgtaccatcacttgccactgcggttctgggtgacaagttccagtttgagcggcttggttacttcgccgtggatactgactccacacctgagaaactcgtgttcaacagaactgttaccctccgtgattcgttcgggaaagctggacccaagtgactgttcagtgtaatttagggagggcgctggttttgatcggttgcagaggcgcacctgaactatacagtttgtgaagaaaatggtcgtctaatacagaacagtttaaaggccttactctttataaaatttagggttttttaatctggtgccctcagttttggtgatgtgttcatttgtaccccttgtttacttcgaatcagattttgtatgatagtgttagtgtcccgattctaccgtctgtaaccgaaaggtcccgggttcgagccccagcctctgcatattatgcgggtaaggcttggcgcttaaagatacaattcccaagaccccgcacagtgcgggaagcctacagcactgggtacgcctagtgttagtgtcccgattcccattctgtttgatgtcatactattgtgatgggagttctgttttcccctgcgtcctcttttttttgcaaatccttactgtgatactactccctttaattttcaaattataagccattttgatttccttggagagtcacatcacaagtctattaaaattataaagaaaacgaagatttatcaaaattataaagaacaaatatttataacataaaatagatatagtataaaaatattataaaaacataa

SEQ ID NO: 72144 - DNA, 3085 bp, Zea Mays
aatccaacaatccaaaccacccacaccacaccaccctgctcttcacgagctcctccactctgttcttccccgccgctccactgcgcccttcctcccgccgggatcctaaaccctagcccctagggagcgggagaggcgctgctggcgctcggcctcgaccagcgcaccgccgagaacgcgctcgtcaacgccaaggtcaccgccaacctcgcctccgtcatagccgaggctggtataaaggaatgcgacaagtcagtcggcaatcttctgtatgcagtcgccaccaagtacccaactaatgcacttgttcaccgtcctgtccttattagctatgtcttgtcaacaaagataaagaaccccgcacagctagatgctgctctgtcatttcttactaatactggtcctgattctctagatgtggtcaaatttgaagaagcatgtggtgtaggtgtggttgtttctattgaggaaattaaatctactgttactgatgtgcttgaggagaatatggaagctataaaggagcagcgatatcacataaatgttggtacactatgcggacaggtcaggaagagacacccctggggtgatgctaaggcgataaaggaggaaattgacaagaggcttgcagaaatcctaggtcccaagacagaagctgacaatataaaaccagtgaaaaagaagaaggaaaaaccagcaaaagttgaggagaaaaaagttgcagttgccactgctgccccaccatctgaggaggaattgaacccgtacactatatttccccaaccagaggaaaacttcaaggttcatacagaaatatttttcagtgatgggaacatatggagagcgcataacacaaaggaaattttagaaaaacatcttaaagcaactggaggaaaagtgatgacccgttttccaccagaacctaatggatatcttcatattggtcatgccaaggctatgtttattgattttggtctggctaaggagcgaaatggccattgctaccttagatttgatgacacaaatccagaagctgaaaagaaagaatacatagatcacattcaggaaatcgtccattggatgggatgggagccctacaaagtaacatacacgagtgactatttccaagctttgtatgaacatgccgttgagttaatacagaaagggctagcatatgtggatcaccagactgcagaagaaatcaaggaatacagggaaaagaagatggatagtccatggaggggtaggccaattgaagagtctctgaaattatttgaagacatgaggcgtgggttgattgcagagggtgcagcaactctccgtatgaagcaggatatgcaaaatgagaacaaaaatatgtctgacttaatagcatatagaataaaattcaccccccatccacatgctggcgacaagtggtgtgtctatccgagctatgactacgctcattgcatggtggattctcttgaaaacatcacacattcgctgtgcacacttgagtttgacatacgtcgcccttcatactactggctacttgttgccttgggcctttatcaaccatatgtgtgggaatattcgaggctaaacatatcaaatactgtgatgtctaaaagaaagttgaatcgacttgtgacagagaagtgggtagatgggtgggatgatccccgcttgttgacactggctggtctccggcgacggggagtatcatcaactgcaataaattcctttattcgtggaatcgggataacgagaagtgacaatagcttaattcgtgttgatcgtctagaatatcacatcagggaggagcttaacaaaacagcccctcgaaccatggttgttttgcgacctctaaaggtggtaataactaacttggaagaaggaaaagtactagaccttgatggcaaaatgtggcctgatgcttctgatactgatgcttcctcccactataaggttccgttctcaagaactgtctacattgagaaaactgattttcgcctaaaggactcaaaagactactatgggctagcccctggtatgcgttccccataaaatgcacagatgttatctctggtgatagtcctgatgatattgttgaaattcgagctgaatatgatcctttgaagacttctaaactgaagggtgttcttcactggattgctgagccagcacctggtgtagagccattgaaggtggaagtaagattattcgagaaattgttcatgtcagagaatcctgctgaattggaagattggcttggcgatcttaacccacactcgaaagaggtgataaaggatgcttatgctgtaccatcacttgccactgcggttctgggtgacaagttccagtttgagcggcttggttacttcgccgtggatactgactccacacctgagaaactcgtgttcaacagaactgttaccctccgtgattcgttcgggaaagctggacccaagtgactgttcagtgtaatttagggagggcgctggttttgatcggttgcagaggcgcacctgaactatacagtttgtgaagaaaatggtcgtctaatacagaacagtttaaaggccttactctttataaaatttagggttttttaatctggtgccctcagttttggtgatgtgttcatttgtaccccttgtttacttcgaatcagattttgtatgatagtgttagtgtcccgattctaccgtctgtaaccgaaaggtcccgggttcgagccccagcctctgcatattatgcgggtaaggcttggcgcttaaagatacaattcccaagaccccgcacagtgcgggaagcctacagcactgggtacgcctagtgttagtgtcccgattcccattctgtttgatgtcatactattgtgatgggagttctgttttcccctgcgtcctcttttttttgcaaatccttactgtgatactactccctttaattttcaaattataagccattttgatttccttggagagtcacatcacaagtctattaaaattataaagaaaacgaagatttatcaaaattataaagaacaaatatttataacataaaatagatatagtataaaaatattataaaaacataa

SEQ ID NO: 72145 - DNA, 3182 bp, Zea Mays
aatccaacaatccaaaccacccacaccacaccaccctgctcttcacgagctcctccactctgttcttccccgccgctccactgcgcccttcctcccgccgggatcctaaaccctagcccctagggagcgggagaggctgctgctgctgctgctaccgcggcggcgccggaggggatgggcaccgggggagacgggagcaaggcgggcccggcgctgccgctcgaggcgctgctggcgctcggcctcgaccagcgcaccgccgagaacgcgctcgtcaacgccaaggtcaccgccaacctcgcctccgtcatagccgaggaatgcgacaagtcagtcggcaatcttctgtatgcagtcgccaccaagtacccaactaatgcacttgttcaccgtcctgtccttattagctatgtcttgtcaacaaagataaagaaccccgcacagctagatgctgctctgtcatttcttactaatactggtcctgattctctagatgtggtcaaatttgaagaagcatgtggtgtaggtgtggttgtttctattgaggaaattaaatctactgttactgatgtgcttgaggagaatatggaagctataaaggagcagcgatatcacataaatgttggtacactatgcggacaggtcaggaagagacacccctggggtgatgctaaggcgataaaggaggaaattgacaagaggcttgcagaaatcctaggtcccaagacagaagctgacaatataaaaccagtgaaaaagaagaaggaaaaaccagcaaaagttgaggagaaaaaagttgcagttgccactgctgccccaccatctgaggaggaattgaacccgtacactatatttccccaaccagaggaaaacttcaaggttcatacagaaatatttttcagtgatgggaacatatggagagcgcataacacaaaggaaattttagaaaaacatcttaaagcaactggaggaaaagtgatgacccgttttccaccagaacctaatggatatcttcatattggtcatgccaaggctatgtttattgattttggtctggctaaggagcgaaatggccattgctaccttagatttgatgacacaaatccagaagctgaaaagaaagaatacatagatcacattcaggaaatcgtccattggatgggatgggagccctacaaagtaacatacacgagtgactatttccaagctttgtatgaacatgccgttgagttaatacagaaagggctagcatatgtggatcaccagactgcagaagaaatcaaggaatacagggaaaagaagatggatagtccatggaggggtaggccaattgaagagtctctgaaattatttgaagacatgaggcgtgggttgattgcagagggtgcagcaactctccgtatgaagcaggatatgcaaaatgagaacaaaaatatgtctgacttaatagcatatagaataaaattcaccccccatccacatgctggcgacaagtggtgtgtctatccgagctatgactacgctcattgcatggtggattctcttgaaaacatcacacattcgctgtgcacacttgagtttgacatacgtcgcccttcatactactggctacttgttgccttgggcctttatcaaccatatgtgtgggaatattcgaggctaaacatatcaaatactgtgatgtctaaaagaaagttgaatcgacttgtgacagagaagtgggtagatgggtgggatgatccccgcttgttgacactggctggtctccggcgacggggagtatcatcaactgcaataaattcctttattcgtggaatcgggataacgagaagtgacaatagcttaattcgtgttgatcgtctagaatatcacatcagggaggagcttaacaaaacagcccctcgaaccatggttgttttgcgacctctaaaggtggtaataactaacttggaagaaggaaaagtactagaccttgatggcaaaatgtggcctgatgcttctgatactgatgcttcctcccactataaggttccgttctcaagaactgtctacattgagaaaactgattttcgcctaaaggactcaaaagactactatgggctagcccctggtaaatctgtcatgctaaggtatgcgttccccataaaatgcacagatgttatctctggtgatagtcctgatgatattgttgaaattcgagctgaatatgatcctttgaagacttctaaactgaagggtgttcttcactggattgctgagccagcacctggtgtagagccattgaaggtggaagtaagattattcgagaaattgttcatgtcagagaatcctgctgaattggaagattggcttggcgatcttaacccacactcgaaagaggtgataaaggatgcttatgctgtaccatcacttgccactgcggttctgggtgacaagttccagtttgagcggcttggttacttcgccgtggatactgactccacacctgagaaactcgtgttcaacagaactgttaccctccgtgattcgttcgggaaagctggacccaagtgactgttcagtgtaatttagggagggcgctggttttgatcggttgcagaggcgcacctgaactatacagtttgtgaagaaaatggtcgtctaatacagaacagtttaaaggccttactctttataaaatttagggttttttaatctggtgccctcagttttggtgatgtgttcatttgtaccccttgtttacttcgaatcagattttgtatgatagtgttagtgtcccgattctaccgtctgtaaccgaaaggtcccgggttcgagccccagcctctgcatattatgcgggtaaggcttggcgcttaaagatacaattcccaagaccccgcacagtgcgggaagcctacagcactgggtacgcctagtgttagtgtcccgattcccattctgtttgatgtcatactattgtgatgggagttctgttttcccctgcgtcctcttttttttgcaaatccttactgtgatactactccctttaattttcaaattataagccattttgatttccttggagagtcacatcacaagtctattaaaattataaagaaaacgaagatttatcaaaattataaagaacaaatatttataacataaaatagatatagtataaaaatattataaaaacataa

SEQ ID NO: 72146 - DNA, 3169 bp, Zea Mays
aatccaacaatccaaaccacccacaccacaccaccctgctcttcacgagctcctccactctgttcttccccgccgctccactgcgcccttcctcccgccgggatcctaaaccctagcccctagggagcgggagaggctgctgctgctgctgctaccgcggcggcgccggaggggatgggcaccgggggagacgggagcaaggcgggcccggcgctgccgctcgaggcgctgctggcgctcggcctcgaccagcgcaccgccgagaacgcgctcgtcaacgccaaggtcaccgccaacctcgcctccgtcatagccgaggctggtataaaggaatgcgacaagtcagtcggcaatcttctgtatgcagtcgccaccaagtacccaactaatgcacttgttcaccgtcctgtccttattagctatgtcttgtcaacaaagataaagaaccccgcacagctagatgctgctctgtcatttcttactaatactggtcctgattctctagatgtggtcaaatttgaagaagcatgtggtgtaggtgtggttgtttctattgaggaaattaaatctactgttactgatgtgcttgaggagaatatggaagctataaaggagcagcgatatcacataaatgttggtacactatgcggacaggtcaggaagagacacccctggggtgatgctaaggcgataaagaaatcctaggtcccaagacagaagctgacaatataaaaccagtgaaaaagaagaaggaaaaaccagcaaaagttgaggagaaaaaagttgcagttgccactgctgccccaccatctgaggaggaattgaacccgtacactatatttccccaaccagaggaaaacttcaaggttcatacagaaatatttttcagtgatgggaacatatggagagcgcataacacaaaggaaattttagaaaaacatcttaaagcaactggaggaaaagtgatgacccgttttccaccagaacctaatggatatcttcatattggtcatgccaaggctatgtttattgattttggtctggctaaggagcgaaatggccattgctaccttagatttgatgacacaaatccagaagctgaaaagaaagaatacatagatcacattcaggaaatcgtccattggatgggatgggagccctacaaagtaacatacacgagtgactatttccaagctttgtatgaacatgccgttgagttaatacagaaagggctagcatatgtggatcaccagactgcagaagaaatcaaggaatacagggaaaagaagatggatagtccatggaggggtaggccaattgaagagtctctgaaattatttgaagacatgaggcgtgggttgattgcagagggtgcagcaactctccgtatgaagcaggatatgcaaaatgagaacaaaaatatgtctgacttaatagcatatagaataaaattcaccccccatccacatgctggcgacaagtggtgtgtctatccgagctatgactacgctcattgcatggtggattctcttgaaaacatcacacattcgctgtgcacacttgagtttgacatacgtcgcccttcatactactggctacttgttgccttgggcctttatcaaccatatgtgtgggaatattcgaggctaaacatatcaaatactgtgatgtctaaaagaaagttgaatcgacttgtgacagagaagtgggtagatgggtgggatgatccccgcttgttgacactggctggtctccggcgacggggagtatcatcaactgcaataaattcctttattcgtggaatcgggataacgagaagtgacaatagcttaattcgtgttgatcgtctagaatatcacatcagggaggagcttaacaaaacagcccctcgaaccatggttgttttgcgacctctaaaggtggtaataactaacttggaagaaggaaaagtactagaccttgatggcaaaatgtggcctgatgcttctgatactgatgcttcctcccactataaggttccgttctcaagaactgtctacattgagaaaactgattttcgcctaaaggactcaaaagactactatgggctagcccctggtaaatctgtcatgctaaggtatgcgttccccataaaatgcacagatgttatctctggtgatagtcctgatgatattgttgaaattcgagctgaatatgatcctttgaagacttctaaactgaagggtgttcttcactggattgctgagccagcacctggtgtagagccattgaaggtggaagtaagattattcgagaaattgttcatgtcagagaatcctgctgaattggaagattggcttggcgatcttaacccacactcgaaagaggtgataaaggatgcttatgctgtaccatcacttgccactgcggttctgggtgacaagttccagtttgagcggcttggttacttcgccgtggatactgactccacacctgagaaactcgtgttcaacagaactgttaccctccgtgattcgttcgggaaagctggacccaagtgactgttcagtgtaatttagggagggcgctggttttgatcggttgcagaggcgcacctgaactatacagtttgtgaagaaaatggtcgtctaatacagaacagtttaaaggccttactctttataaaatttagggttttttaatctggtgccctcagttttggtgatgtgttcatttgtaccccttgtttacttcgaatcagattttgtatgatagtgttagtgtcccgattctaccgtctgtaaccgaaaggtcccgggttcgagccccagcctctgcatattatgcgggtaaggcttggcgcttaaagatacaattcccaagaccccgcacagtgcgggaagcctacagcactgggtacgcctagtgttagtgtcccgattcccattctgtttgatgtcatactattgtgatgggagttctgttttcccctgcgtcctcttttttttgcaaatccttactgtgatactactccctttaattttcaaattataagccattttgatttccttggagagtcacatcacaagtctattaaaattataaagaaaacgaagatttatcaaaattataaagaacaaatatttataacataaaatagatatagtataaaaatattataaaaacataa

SEQ ID NO: 72147 - DNA, 3074 bp, Zea Mays
aatccaacaatccaaaccacccacaccacaccaccctgctcttcacgagctcctccactctgttcttccccgccgctccactgcgcccttcctcccgccgggatcctaaaccctagcccctagggagcgggagaggctgctgctgctgctgctaccgcggcggcgccggaggggatgggcaccgggggagacgggagcaaggcgggcccggcgctgccgctcgaggcgctgctggcgctcggcctcgaccagcgcaccgccgagaacgcgctcgtcaacgccaaggtcaccgccaacctcgcctccgtcatagccgagataaagaaccccgcacagctagatgctgctctgtcatttcttactaatactggtcctgattctctagatgtggtcaaatttgaagaagcatgtggtgtaggtgtggttgtttctattgaggaaattaaatctactgttactgatgtgcttgaggagaatatggaagctataaaggagcagcgatatcacataaatgttggtacactatgcggacaggtcaggaagagacacccctggggtgatgctaaggcgataaaggaggaaattgacaagaggcttgcagaaatcctaggtcccaagacagaagctgacaatataaaaccagtgaaaaagaagaaggaaaaaccagcaaaagttgaggagaaaaaagttgcagttgccactgctgccccaccatctgaggaggaattgaacccgtacactatatttccccaaccagaggaaaacttcaaggttcatacagaaatatttttcagtgatgggaacatatggagagcgcataacacaaaggaaattttagaaaaacatcttaaagcaactggaggaaaagtgatgacccgttttccaccagaacctaatggatatcttcatattggtcatgccaaggctatgtttattgattttggtctggctaaggagcgaaatggccattgctaccttagatttgatgacacaaatccagaagctgaaaagaaagaatacatagatcacattcaggaaatcgtccattggatgggatgggagccctacaaagtaacatacacgagtgactatttccaagctttgtatgaacatgccgttgagttaatacagaaagggctagcatatgtggatcaccagactgcagaagaaatcaaggaatacagggaaaagaagatggatagtccatggaggggtaggccaattgaagagtctctgaaattatttgaagacatgaggcgtgggttgattgcagagggtgcagcaactctccgtatgaagcaggatatgcaaaatgagaacaaaaatatgtctgacttaatagcatatagaataaaattcaccccccatccacatgctggcgacaagtggtgtgtctatccgagctatgactacgctcattgcatggtggattctcttgaaaacatcacacattcgctgtgcacacttgagtttgacatacgtcgcccttcatactactggctacttgttgccttgggcctttatcaaccatatgtgtgggaatattcgaggctaaacatatcaaatactgtgatgtctaaaagaaagttgaatcgacttgtgacagagaagtgggtagatgggtgggatgatccccgcttgttgacactggctggtctccggcgacggggagtatcatcaactgcaataaattcctttattcgtggaatcgggataacgagaagtgacaatagcttaattcgtgttgatcgtctagaatatcacatcagggaggagcttaacaaaacagcccctcgaaccatggttgttttgcgacctctaaaggtggtaataactaacttggaagaaggaaaagtactagaccttgatggcaaaatgtggcctgatgcttctgatactgatgcttcctcccactataaggttccgttctcaagaactgtctacattgagaaaactgattttcgcctaaaggactcaaaagactactatgggctagcccctggtaaatctgtcatgctaaggtatgcgttccccataaaatgcacagatgttatctctggtgatagtcctgatgatattgttgaaattcgagctgaatatgatcctttgaagacttctaaactgaagggtgttcttcactggattgctgagccagcacctggtgtagagccattgaaggtggaagtaagattattcgagaaattgttcatgtcagagaatcctgctgaattggaagattggcttggcgatcttaacccacactcgaaagaggtgataaaggatgcttatgctgtaccatcacttgccactgcggttctgggtgacaagttccagtttgagcggcttggttacttcgccgtggatactgactccacacctgagaaactcgtgttcaacagaactgttaccctccgtgattcgttcgggaaagctggacccaagtgactgttcagtgtaatttagggagggcgctggttttgatcggttgcagaggcgcacctgaactatacagtttgtgaagaaaatggtcgtctaatacagaacagtttaaaggccttactctttataaaatttagggttttttaatctggtgccctcagttttggtgatgtgttcatttgtaccccttgtttacttcgaatcagattttgtatgatagtgttagtgtcccgattctaccgtctgtaaccgaaaggtcccgggttcgagccccagcctctgcatattatgcgggtaaggcttggcgcttaaagatacaattcccaagaccccgcacagtgcgggaagcctacagcactgggtacgcctagtgttagtgtcccgattcccattctgtttgatgtcatactattgtgatgggagttctgttttcccctgcgtcctcttttttttgcaaatccttactgtgatactactccctttaattttcaaattataagccattttgatttccttggagagtcacatcacaagtctattaaaattataaagaaaacgaagatttatcaaaattataaagaacaaatatttataacataaaatagatatagtataaaaatattataaaaacataa

SEQ ID NO: 72148 - DNA, 2408 bp, Zea Mays
cccgagagaagtcttcgttccgtttgctcagtccgcggaagaacagacaaaagagcgttcagatccaaagaagcaacaagccttttccgctgagagctcagaatcttcgtaagctagacaacagatcccagttaagcgaagcagttcgcgggtcgtcggtagcttcagcgcccggcgcccggcgagcagctacggcagctagcaggctccctcctccattaattggtggttggtgctacctttttcttcgtttagttttcagcctgagaatgatgggtggagggctaataaacacctggaagaaatgggagatccaagtactggtgctccttagcttcacgctgcagctcatcctcctggcgttcgcaaggatccgccgccgcaaaggctccgctccgctgagggtcctcctctggttggcctacctcatggccgactccacagccatctacaccctcggccacctctccctccgcgccagttcaggcgagaagcaggtcgtcgcgctctgggcgcccttgctgctcctgcacctcggcggcccggacaccatcacggcctacgccttcgaggacaaccagctctggctgcgccatctgctgaacctcgcggtgcaggccatgggggcagcctatgtcctgtaccagtctgtggctacccaaacccaccagagggccttggtcaccgcctccatgctgatgttcgtcaccggccttgtcaagtacggggagaggacatgggcgctgaagcgtgctaacatcgacagcatccgaggcggtctcgatctgcaggacgacagagaccgtcgccagccgtacgatgggagggctggaacggcggagctggagctggactcggaggaggttctgctgggcgctcactacgtgttcaacgcctgcaagagcttcttcaccgacgacctgatcacgtcgggagcagagcgcgaagctatcagcaggggcatacagttcaatggcggcagcagccgcggccatggtggacctggtggttacagcagagtcgatgtcgtcgtcacttacgttctcctggccggggccttcgtcctggaaatcgcgtcgttggtcagggtgctagggtcttcctgggcatgcgccttcttgcacgctcgcagatgggaccggatccatggcgcagtccggtgccttcgtctgctcgtccgggccgcgaggagccgaaggtggctggactcggttgggcagtacaacctcctggacttctgcactcgtgacaggacggagataaggagctgggtcgccaagaaagtggggctggagaagtggtgggacaagctccattactcgggcaccgtcagcatttcagacagcttcagggacctcctgctggaagagataccgaggaggcagctaggcgacatgagggacgcgcggggccggtggacgctccagcaaataacttacccaccggggagcagcggcagattatacgatgagatcagctggagcgtcaacgaaacggacttcgaccagagcatcctcatctggcatgtcgccatcgacgtctacctctgctgccgccgcaaaccagggctggccgcggccgcggccgcggaggaccgcctagccaaagccgtcaaggagctctccgactacatgttcttcctcttcgtcgtccagccccacatgcttccgggcccggttcggagcacccggtacgacaacaactgcgatggcctggtcgcgctctggcaacggctctcagccgaccacgacagcatggaccctacgctgacaccaagggaaaacctagctagactgctttaccgcgagtatagagacaaggacgacgacgaccccgaccccgactctgacggtcgccgtgctagtccagccgcagcagacttttccgttcagatgacgatggaggaggaagataacaacccccatggcctggcttacatcgacgcggccgggctcaccggactgctcctcagcgagcgctcgggtatacccgacgtgctggaaatgatcgccggagtgtgggtcgagatgctgtgctacgccgcgcgccactgcaccgaggtttcccacgccaagcagctgagcagcggtggcgaactggtgactgcgatggggatgctggtggaatacaccgccaggtatgacctccatcctcatggtcgtcttggatcagaggatgattcgtctatggagaatggagaacctagcggagcgccggctgaggtatctgtcgtcgatatcgacagtatcagtgaaggtaccggaggtgaaatatgcgaggagtatatataaatgtgacatttgattcgatgcatgccgctgtgtcagtgtatctatcactatgtatataatcgtcacttcataaggcggtcatttaattttcaaccgtgcaagattttctaacctgtg

SEQ ID NO: 72149 - DNA, 1661 bp, Zea Mays
gttttttttacagtactacacttcatgtcactaccaattatacattccagacacttttggattacatggttaaaagtaagagaccaccaaatcgtacttgcgctaccaacaagaagatgcgtgaaaaaatttaaaaaaatggcactacacaaagcgataaagagaaagagagagagagaaaacaaatcgttcaagcctcacactgcagaacagaatgcacacggcacgtcacttcctgccttgccgctcctccgacctctccttctccttccctccccgccgaatttggtaaaattcaattaaacacggaaaaaaatttacagcggccggcatttgattcgaattctgtttcccttgctttccctcctactggactgactggagaaacttcacccggtgttgcaaagcaaagcaaagcaaagcaacctttttccctttcacccgaaaaattttgcaatgcggcccctcggaggctggcgacgacgacgtggctagaaggtccacttccagatcttgacgcggaccctgacctggcacgcgcgagcgacggtggccgtggccgacgcggcgggcggcgccggcgcgtcgtcgacggccgcggcggcgggggctggggtgtcggccgcggccttcgccagcttcttcgtcttcttggccggcgcgggcgcgggcgcggccaccttgacgccgtcgcagtgcaccaggatgccgatcttcttggtcctgagcgcgccaacccggacgccggccctggtctccaggtccaggacgatggggaactcgccggacctcttgacgtcggagccggccgcggcggggtcgaccgcgagcgcggacgcggagacggtggcccggatgacggtgacgttgccggcctcgtgcgcgaacccgggcgcggtggccgcgcccagcggcacggcgttggcggccgtggcggccgtcacggcgaagtcgtcgtagacgtacaccagcttcttgttggggttcctggcggtcagcgtcacgtcgatggcgtcgctcagcgcgggcgcggtggcggacgacgacaggctcagcctcgtcacgcgcgccgcggtcagcgtgaaggccggccggtgcggccggtacagcaggtagaaggcgcccccggccacggggtgggcttgccgttggaggacattgtcgccgccgctcccgctcccgctccgcagcgcaggggacggccgagctccgcaggcaggcgggggtggttcttggaagcctcggtggcactgcgactccgtgagcttggctgtgaggtgtaacggaggagagagatctataggcgcgagggggagggaaggccggaagggaagacgaggagggaggtcaggtggagaaggtgagggaaaagggacagccggacagggcacctcacggatggttcggcctcaccaaatcatttgttgccggcttgctgttgctgacgcttttccctgtcctcccctccccttcttgcttcacctcctcaactgattggtggcgggtatttttcccgggaatttttttttctctgctgggagcctgggagtgggagcgacgctagtgctattttgctaatcaaggatcaatctgcaggttaatcactgtattttctactaccactttatatattctactagtagtactgcagtagcatcagg

SEQ ID NO: 72150 - DNA, 1098 bp, Zea Mays
ctttagttcggtttagtcactggaaccaaacatggtactttagcaactaaactttagtcactaaaatttagtctagtgactaaaggaaccaaacagggcctaactatgccacattttgcctaagattagtcgtttaaattgaagaactaaccttaagaaaaaagttaggcaaagtgtgccaagtgaggctgcaatccaaacatgcccacgtcttcgaagaaagcgacgggtgccggatccagacttcattccccaaaaccaaaataatcgccaccgctctccgcaccgaaccgaagcagcggcgatgtcggcggagaagccggctcccgtgcgcgtgctctactgcggcgtctgcggcctcccggccgagtactgcgagttcggccccgacttcgagcgctgcaagccctggctgcgcgcgcacgcgcccggcgtctaccccgacgaccttgtcgccgcctcctcctcacccggcggcggcgacaaggacgtcgacaaggtcggggatcgcctccagggcgtcgggatctccgacggctccaccagcgccgcaggggatgcttccgcgtctaagccccaagaggcgaaacgcctgcctggtggtaagctcaagaaaaaggagaagcaagaagtggtcattgagaagattgtccgtaacaagcgcaaatgtgttactgtggtgaaagggcttgaattgtttggtgtaaagcttagtgatgcttcgaagaagcttgggaagaagtttgcaaccggagcttctgttgttaagggccctacggagaaggagcaaatcgacgtacaaggggacatctcatatgatattgtggagttcattacagatacatggcctgatgtacctgagtcggccattttcttcattgaagatggaaggaaggttcctgctgcttgatgccatatggtttataaggcacgagaccaatggatttacaaatataatacagagtcccaggaatggtatcagccatcaaagagatgttcatgaagacaaccaaccaccagcatatgctcaactaccacttgcttcacttcacctccatgttttcacgttggccaatactgaggttgagcaatagatga

SEQ ID NO: 72151 - DNA, 570 bp, Zea Mays
aaaagttaggcaaagtgtgccaagtgaggctgcaatccaaacatgcccacgtcttcgaagaaagcgacgggtgccggatccagacttcattccccaaaaccaaaataatcgccaccgctctccgcaccgaaccgaagcagcggcgatgtcggcggagaagccggctcccgtgcgcgtgctctactgcggcgtctgcggcctcccggccgagtactgcgagttcggccccgacttcgagcgctgcaagccctggctgcgcgcgcacgcgcccggcgtctaccccgacgaccttgtcgccgcctcctcctcacccggcggcggcgacaaggacgtcgacaaggtcggggatcgcctccagggcgtcgggatctccgacggctccaccagcgccgcaggggatgcttccgcgtctaagccccaagaggcgaaacgcctgcctggtggtaagctcaagaaaaaggagaagcaagaagtggtcattgagaagattgtccgtaacaagcgcaaatgtgttactgtggtgaaagggcttgaattgtttgattttgattatatgtacttccctgaacc

SEQ ID NO: 72152 - DNA, 988 bp, Zea Mays
aaaagttaggcaaagtgtgccaagtgaggctgcaatccaaacatgcccacgtcttcgaagaaagcgacgggtgccggatccagacttcattccccaaaaccaaaataatcgccaccgctctccgcaccgaaccgaagcagcggcgatgtcggcggagaagccggctcccgtgcgcgtgctctactgcggcgtctgcggcctcccggccgagtactgcgagttcggccccgacttcgagcgctgcaagccctggctgcgcgcgcacgcgcccggcgtctaccccgacgaccttgtcgccgcctcctcctcacccggcggcggcgacaaggacgtcgacaaggtcggggatcgcctccagggcgtcgggatctccgacggctccaccagcgccgcaggggatgcttccgcgtctaagccccaagaggcgaaacgcctgcctggtggtaagctcaagaaaaaggagaagcaagaagtggtcattgagaagattgtccgtaacaagcgcaaatgtgttactgtggtgaaagggcttgaattgtttggtgtaaagcttagtgatgcttcgaagaagcttgggaagaagtttgcaaccggagcttctgttgttaagggccctacggagaaggagcaaatcgacgtacaaggggacatctcatatgatattgtggagttcattacagatacatggcctgatgtacctgagtcggccattttcttcattgaagatggaaggaaggttcctgctgcttgatgccatatggtttataaggcacgagaccaatggatttacaaatataatacagaggcttacttcacaagtggcattctgtttaccatcgtcacctgcttccatgtatgaaatcaaatctatacagttaccaatttactatgactgtgtctgttgtatcacttccaaaagtctggacactgagagaaagaggatcatcggttagactcccattgtgtggcaccaaaaaaaaaaaaaaaa

SEQ ID NO: 72153 - DNA, 849 bp, Zea Mays
aaaagttaggcaaagtgtgccaagtgaggctgcaatccaaacatgcccacgtcttcgaagaaagcgacgggtgccggatccagacttcattccccaaaaccaaaataatcgccaccgctctccgcaccgaaccgaagcagcggcgatgtcggcggagaagccggctcccgtgcgcgtgctctactgcggcgtctgcggcctcccggccgagtactgcgagttcggccccgacttcgagcgctgcaagccctggctgcgcgcgcacgcgcccggcgtctaccccgacgaccttgtcgccgcctcctcctcacccggcggcggcgacaaggacgtcgacaaggtcggggatcgcctccagggcgtcgggatctccgacggctccaccagcgccgcaggggatgcttccgcgtctaagccccaagaggcgaaacgcctgcctggtggtaagctcaagaaaaaggagaagcaagaagtggtcattgagaagattgtccgtaacaagcgcaaatgtgttactgtggtgaaagggcttgaattgtttggtgtaaagcttagtgatgcttcgaagaagcttgggaagaagtttgcaaccggagcttctgttgttaagggccctacggagaaggagcaaatcgacgtacaaggggacatctcatatgatattgtggagttcattacagatacatggcctgatgtacctgagtcggccattttcttcattgaagatggaaggaaggttcctgctgcttgatgccatatggtttataaggcacgagaccaatggatttacaaatataatacagaggtcgacggaggacacaaaggagcaggtccagatctgaaggtagg

SEQ ID NO: 72154 - DNA, 1339 bp, Zea Mays
gaaaatcaaagctacctgctgttgattcctcgcctgtttctttgctcaggttaacgagtttcttaactgtctcgtagatgctagaaacgagctgctgcagaggtacgagaatgtacaaagaagcttcaaaataaagaaggcgatgctatcgaaccatcgaaactataggacttcatacgaccgcctctttgaacaggtacgtagattggaaaccgaaagcgatagcctaaagaaagacgccgccatctacaactttgtgcaagagcgtcttcagaagtcagcgccatacaaaatgatcatggagctgagtgcaatggagctggaggctcaagaaatatcgttcgaggagctcctggctcgggagaaggaggacaccgccttctggcagcgcaacgggaagatgagatcagtctcgtccaagtaggacacaatgcccctgctacttgggctcactgacgatagcagacctcaacatcggtagtgtctaggcatgaaacccttgagagcagctgctgtatgcctgcatcgaaccgtttggtgtaacgccgcggccttctgtcaagatcctggcctgattctgggcagattgagttgtgtcgtgatacatgccggccctgagggttctgtaccagcgagtgcgggcatagggctgttttgatcgtgtggccatggacctcctgacccagccgcagcgccagcaattctgtgcaagctgaaagaactgtcgctaatatcaccacgttcggcaaaacccaccgttgctgcatttgtctgaacagctgcagtgctcgctctatgtcccgtgatgacgcgaactcgacaatgatgacgtccagctcacgacactgggcgcatgcctccacactgttccatcactgtttattgagtgaaaatagaaggtgaaataaaagatgagctagaagaggtgctgaagacagactaacagattggttggtcgacggcggaggagacgcagatcagctaaattctacatcaatgacctaatcggctaatcccaacttcgtttttccacatgtttggaaacttctctgtgaaacaaaatttaacacccaaggagggttgatgggattggaaaaaaataggaaagatttcgacttatttggtattgaaactcatccaatccacatggatcgagagtaaaacgaaaatgcctttaagtggacaaataatcggattatcatagaactacagatagaccgtagaccagaacgaacacagcaagatcagcgatgtgagtctcagaccacagctaattgtcgctagtctagaggcacagtaacagaacaagtcatttcacagttggatgtttgtatacaat

SEQ ID NO: 72155 - DNA, 1316 bp, Zea Mays
cttcgtccttccacatgtacgtgcaggttaacgagtttcttaactgtctcgtagatgctagaaacgagctgctgcagaggtacgagaatgtacaaagaagcttcaaaataaagaaggcgatgctatcgaaccatcgaaactataggacttcatacgaccgcctctttgaacaggtacgtagattggaaaccgaaagcgatagcctaaagaaagacgccgccatctacaactttgtgcaagagcgtcttcagaagtcagcgccatacaaaatgatcatggagctgagtgcaatggagctggaggctcaagaaatatcgttcgaggagctcctggctcgggagaaggaggacaccgccttctggcagcgcaacgggaagatgagatcagtctcgtccaagtaggacacaatgcccctgctacttgggctcactgacgatagcagacctcaacatcggtagtgtctaggcatgaaacccttgagagcagctgctgtatgcctgcatcgaaccgtttggtgtaacgccgcggccttctgtcaagatcctggcctgattctgggcagattgagttgtgtcgtgatacatgccggccctgagggttctgtaccagcgagtgcgggcatagggctgttttgatcgtgtggccatggacctcctgacccagccgcagcgccagcaattctgtgcaagctgaaagaactgtcgctaatatcaccacgttcggcaaaacccaccgttgctgcatttgtctgaacagctgcagtgctcgctctatgtcccgtgatgacgcgaactcgacaatgatgacgtccagctcacgacactgggcgcatgcctccacactgttccatcactgtttattgagtgaaaatagaaggtgaaataaaagatgagctagaagaggtgctgaagacagactaacagattggttggtcgacggcggaggagacgcagatcagctaaattctacatcaatgacctaatcggctaatcccaacttcgtttttccacatgtttggaaacttctctgtgaaacaaaatttaacacccaaggagggttgatgggattggaaaaaaataggaaagatttcgacttatttggtattgaaactcatccaatccacatggatcgagagtaaaacgaaaatgcctttaagtggacaaataatcggattatcatagaactacagatagaccgtagaccagaacgaacacagcaagatcagcgatgtgagtctcagaccacagctaattgtcgctagtctagaggcacagtaacagaacaagtcatttcacagttggatgtttgtatacaat

SEQ ID NO: 72156 - DNA, 1316 bp, Zea Mays
gcattccttttcttgataggctagaggttaacgagtttcttaactgtctcgtagatgctagaaacgagctgctgcagaggtacgagaatgtacaaagaagcttcaaaataaagaaggcgatgctatcgaaccatcgaaactataggacttcatacgaccgcctctttgaacaggtacgtagattggaaaccgaaagcgatagcctaaagaaagacgccgccatctacaactttgtgcaagagcgtcttcagaagtcagcgccatacaaaatgatcatggagctgagtgcaatggagctggaggctcaagaaatatcgttcgaggagctcctggctcgggagaaggaggacaccgccttctggcagcgcaacgggaagatgagatcagtctcgtccaagtaggacacaatgcccctgctacttgggctcactgacgatagcagacctcaacatcggtagtgtctaggcatgaaacccttgagagcagctgctgtatgcctgcatcgaaccgtttggtgtaacgccgcggccttctgtcaagatcctggcctgattctgggcagattgagttgtgtcgtgatacatgccggccctgagggttctgtaccagcgagtgcgggcatagggctgttttgatcgtgtggccatggacctcctgacccagccgcagcgccagcaattctgtgcaagctgaaagaactgtcgctaatatcaccacgttcggcaaaacccaccgttgctgcatttgtctgaacagctgcagtgctcgctctatgtcccgtgatgacgcgaactcgacaatgatgacgtccagctcacgacactgggcgcatgcctccacactgttccatcactgtttattgagtgaaaatagaaggtgaaataaaagatgagctagaagaggtgctgaagacagactaacagattggttggtcgacggcggaggagacgcagatcagctaaattctacatcaatgacctaatcggctaatcccaacttcgtttttccacatgtttggaaacttctctgtgaaacaaaatttaacacccaaggagggttgatgggattggaaaaaaataggaaagatttcgacttatttggtattgaaactcatccaatccacatggatcgagagtaaaacgaaaatgcctttaagtggacaaataatcggattatcatagaactacagatagaccgtagaccagaacgaacacagcaagatcagcgatgtgagtctcagaccacagctaattgtcgctagtctagaggcacagtaacagaacaagtcatttcacagttggatgtttgtatacaat

SEQ ID NO: 72157 - DNA, 1342 bp, Zea Mays
cagaacttgtgttgtggatctcatgcattacccaggattgctatgagtaagggttaacgagtttcttaactgtctcgtagatgctagaaacgagctgctgcagaggtacgagaatgtacaaagaagcttcaaaataaagaaggcgatgctatcgaaccatcgaaactataggacttcatacgaccgcctctttgaacaggtacgtagattggaaaccgaaagcgatagcctaaagaaagacgccgccatctacaactttgtgcaagagcgtcttcagaagtcagcgccatacaaaatgatcatggagctgagtgcaatggagctggaggctcaagaaatatcgttcgaggagctcctggctcgggagaaggaggacaccgccttctggcagcgcaacgggaagatgagatcagtctcgtccaagtaggacacaatgcccctgctacttgggctcactgacgatagcagacctcaacatcggtagtgtctaggcatgaaacccttgagagcagctgctgtatgcctgcatcgaaccgtttggtgtaacgccgcggccttctgtcaagatcctggcctgattctgggcagattgagttgtgtcgtgatacatgccggccctgagggttctgtaccagcgagtgcgggcatagggctgttttgatcgtgtggccatggacctcctgacccagccgcagcgccagcaattctgtgcaagctgaaagaactgtcgctaatatcaccacgttcggcaaaacccaccgttgctgcatttgtctgaacagctgcagtgctcgctctatgtcccgtgatgacgcgaactcgacaatgatgacgtccagctcacgacactgggcgcatgcctccacactgttccatcactgtttattgagtgaaaatagaaggtgaaataaaagatgagctagaagaggtgctgaagacagactaacagattggttggtcgacggcggaggagacgcagatcagctaaattctacatcaatgacctaatcggctaatcccaacttcgtttttccacatgtttggaaacttctctgtgaaacaaaatttaacacccaaggagggttgatgggattggaaaaaaataggaaagatttcgacttatttggtattgaaactcatccaatccacatggatcgagagtaaaacgaaaatgcctttaagtggacaaataatcggattatcatagaactacagatagaccgtagaccagaacgaacacagcaagatcagcgatgtgagtctcagaccacagctaattgtcgctagtctagaggcacagtaacagaacaagtcatttcacagttggatgtttgtatacaat

SEQ ID NO: 72158 - DNA, 1342 bp, Zea Mays
catcgatgcgaaaagttacttcataaagcaaaatgcccactataagtctaaggttaacgagtttcttaactgtctcgtagatgctagaaacgagctgctgcagaggtacgagaatgtacaaagaagcttcaaaataaagaaggcgatgctatcgaaccatcgaaactataggacttcatacgaccgcctctttgaacaggtacgtagattggaaaccgaaagcgatagcctaaagaaagacgccgccatctacaactttgtgcaagagcgtcttcagaagtcagcgccatacaaaatgatcatggagctgagtgcaatggagctggaggctcaagaaatatcgttcgaggagctcctggctcgggagaaggaggacaccgccttctggcagcgcaacgggaagatgagatcagtctcgtccaagtaggacacaatgcccctgctacttgggctcactgacgatagcagacctcaacatcggtagtgtctaggcatgaaacccttgagagcagctgctgtatgcctgcatcgaaccgtttggtgtaacgccgcggccttctgtcaagatcctggcctgattctgggcagattgagttgtgtcgtgatacatgccggccctgagggttctgtaccagcgagtgcgggcatagggctgttttgatcgtgtggccatggacctcctgacccagccgcagcgccagcaattctgtgcaagctgaaagaactgtcgctaatatcaccacgttcggcaaaacccaccgttgctgcatttgtctgaacagctgcagtgctcgctctatgtcccgtgatgacgcgaactcgacaatgatgacgtccagctcacgacactgggcgcatgcctccacactgttccatcactgtttattgagtgaaaatagaaggtgaaataaaagatgagctagaagaggtgctgaagacagactaacagattggttggtcgacggcggaggagacgcagatcagctaaattctacatcaatgacctaatcggctaatcccaacttcgtttttccacatgtttggaaacttctctgtgaaacaaaatttaacacccaaggagggttgatgggattggaaaaaaataggaaagatttcgacttatttggtattgaaactcatccaatccacatggatcgagagtaaaacgaaaatgcctttaagtggacaaataatcggattatcatagaactacagatagaccgtagaccagaacgaacacagcaagatcagcgatgtgagtctcagaccacagctaattgtcgctagtctagaggcacagtaacagaacaagtcatttcacagttggatgtttgtatacaat

SEQ ID NO: 72159 - DNA, 567 bp, Zea Mays
taggagtccctgccccgcgacgacccaacgcgcccgacgctaggacgcgacaccgaagacaccggcgccctgcacgccgtgtccgagccagccgctccgaccccgcgcaaaacagcagcaccattgatggccatgaagaacagccgaccctttctctcccctccctctctctataaaagggcagcgagtctctccgttctccctacccaagctcgcccccatctctctcactctcctcgccgttagagccaccgccgccgtcgccggacttcgtcatcgccggagctgtggagttcaccggagctacgccatccgccgtccgaagtcgagcccctgctcttctcttctccacccggccgaacccccgtcgaactctccccgtcacacgtgcgaacccaaggttgaagactcaaattaatttgtgtattttcaaaatacttttgattcgattcatgaattgtatatttagtttgttgtaatatgaatacgtgtgatccgaaattcatgtgtatgtgcgttatggaattttggtagagatatgtgattattagtacaccgtgataattc

SEQ ID NO: 72160 - DNA, 2953 bp, Zea Mays
gcaactccgaatacaccttgctaatatctacccgccggccgcaggccgccgcccggcttccagtctcgccgattcgaggagacgacgaccatgccaaccacagcgccaccggtggatgcagaacctcccgagtgcccggtgtgcctctccccattcgacgcggcctccgttgtgccgcgcgtcctcccgtgcggccactccctctgcgggtcttgcatcgcggccctcccgcccgcctccgcggccgcaggcgcctcctccctccgctgccctctctgctcccagtgcgtcccctacgcccgcgcgctcggcccctcctccctccccaaaaacctcgccctcctcactcttctcccctccccatcgcatgctctcagcgccgccaccctcgtcacagcgccgcttccccacccccatccgctccacgccgcccactcgcgcctcctttcgcgcttccgccatgccgtcctccccgagtccgcctccccgctcggttccgagccaagccccgtccacctcgcgttcggatccctcggctccgacctcggcgcgccctggttctgcgcgcggggccgccccgtgagcctcctcccgatcgagacccaaccagtccccccgacgaagcaggaagccgaattctaccggcccagccacgcgacgcgggtcctcgccgcggtcgacgcgctcagcgacgcgaccaaggaggagctggccggtctgatcgcctcttccgcgaggctagcacggatggtgagcaggctctacggtgtctggatgtcccctcacgcgccgccactatggatggtctctgaacggcacccacgtacggtttcccaattgttggaggaggagattatcaatagagaggagacggtggtgcgggccggattccttgtaatggaggcatgtgaagtgatcatggggttgcacagcgaggggctggtgctggggtgcctcgggctggactgcttctgcctcgatcgttttgggcactgcatgcttgatttgaatcaggcgttggccttgtgccggggagtccaagctggggctagctcgaacagtgttcgagctttcatcgctccagaggtggcggcagtgctaggtgacacgttgcggacggagggtcgtgattttgatggtttggttggctgtacctcggatatctggtcgttgggttgtgtgttcgtggcacttcttactagggatgaacagcttgtgcctgtggcaggttggaactctgaaggactgtatgatgattgggagaaggaagtggttacaaggcttgatgccacattgcttggtactatacttgaaccattggctgcagttatagcatcgtgcttgagatatgatccaaaatcccgtccagagattgctgatgtttggaaatgtattagaggcttgttgacaaaatttggtgatgttactttagctcctgatgatgatgttgcagctcagaagagttttagatgtttactccttggggagttatcctccatgtttgttgattctggtgctgttgagtcagatgataaaacacaactgtctcgaggagctgatggcaacagttcgaatcaggatcatggaagtaatgatggtttcttaaacaatagcggaaatgatttgtcaggaatcgatggtccacagtctgtcggagtgtttaaatcatcaacactgcttgcccaccgtgattgtgtaacaggattagctgttggaggtgggttcttgtttagctcttcttatgataaaactatcaatgtgtggtcactgcaggacttctctcatgtgcattgtttgaagggtcatgaacacaaaatcacagcaatagttgttgttgacaatgatagccattctctttgtataagtggagacagtggcagcggaatttttgtctggcgtgtggattctactctgaaggaagaacctttgaataaatggtatgaacataacgattggctctatcgaggggttaactgcttggctgtctctggaactggttatctttacactggtagcagagacaaaactatcaaggcttggtcactagaggattattcacttcgctgcactatgacaggtcataaatcaactgtgtcttgccttgcagtggccagtggtattctttacagtggaagttgggatggtaccattcgtttatggtggctcactgatcatacaccattgtctgtcctggaagatgatgcagcaggaagcatagcccctgtattgtcgatttcagcaggaaccaattttgttgcctcgtcatatgagaatggctattttaaggtctggaagaacgatgtgcttgtcaaatcagaaaagcttcaaaatggtgctgtttatgcagttaaattgagtggcaaatggctctatactggtggatgggataaagtcataaacatccaggagttgttggatgatgagtcagaggtagaactccgagacgtcgcttccattacttgcgactcaattataacttcgatactgccctgggatgaaaggctgatagttggactatccaacagggaaataaaggtttactacaaggcatcatgactctttgcttcaaccccatgtatacattgtgaatagttcagtatacagtaaacgtgagatagaggattggaatccccaggactagaatacatcaaaagtacaatccgtgtttttttctttaaacaacaggggcgttcgtgtcccctccttttttttatattttctacaaagggatagtatacaaggggcctgtttggttcagcttttttctgaccagcttttctgaaaatctggctgtggggagaatctggctgtgggagagaatctgggtatcattacgattacctgtggaggaagataaagttgttcataggcgcagtatctaaaaagtgacgtattcctactattacaacgactcaaccgattatgtgtttatattgattttggatggtttttg

SEQ ID NO: 72161 - DNA, 2934 bp, Zea Mays
ctaatatctacccgccggccgcaggccgccgcccggcttccagtctcgccgattcgaggagacgacgaccatgccaaccacagcgccaccggtggatgcagaacctcccgagtgcccggtgtgcctctccccattcgacgcggcctccgttgtgccgcgcgtcctcccgtgcggccactccctctgcgggtcttgcatcgcggccctcccgcccgcctccgcggccgcaggcgcctcctccctccgctgccctctctgctcccagtgcgtcccctacgcccgcgcgctcggcccctcctccctccccaaaaacctcgccctcctcactcttctcccctccccatcgcatgctctcagcgccgccaccctcgtcacagcgccgcttccccacccccatccgctccacgccgcccactcgcgcctcctttcgcgcttccgccatgccgtcctccccgagtccgcctccccgctcggttccgagccaagccccgtccacctcgcgttcggatccctcggctccgacctcggcgcgccctggttctgcgcgcggggccgccccgtgagcctcctcccgatcgagacccaaccagtccccccgacgaagcaggaagccgaattctaccggcccagccacgcgacgcgggtcctcgccgcggtcgacgcgctcagcgacgcgaccaaggaggagctggccggtctgatcgcctcttccgcgaggctagcacggatggtgagcaggctctacggtgtctggatgtcccctcacgcgccgccactatggatggtctctgaacggcacccacgtacggtttcccaattgttggaggaggagattatcaatagagaggagacggtggtgcgggccggattccttgtaatggaggcatgtgaagtgatcatggggttgcacagcgaggggctggtgctggggtgcctcgggctggactgcttctgcctcgatcgttttgggcactgcatgcttgatttgaatcaggcgttggccttgtgccggggagtccaagctggggctagctcgaacagtgttcgagctttcatcgctccagaggtggcggcagtgctaggtgacacgttgcggacggagggtcgtgattttgatggtttggttggctgtacctcggatatctggtcgttgggttgtgtgttcgtggcacttcttactagggatgaacagcttgtgcctgtggcaggttggaactctgaaggactgtatgatgattgggagaaggaagtggttacaaggcttgatgccacattgcttggtactatacttgaaccattggctgcagttatagcatcgtgcttgagatatgatccaaaatcccgtccagagattgctgatgtttggaaatgtattagaggcttgttgacaaaatttggtgatgttactttagctcctgatgatgatgttgcagctcagaagagttttagatgtttactccttggggagttatcctccatgtttgttgattctggtgctgttgagtcagatgataaaacacaactgtctcgaggagctgatggcaacagttcgaatcaggatcatggaagtaatgatggtttcttaaacaatagcggaaatgatttgtcaggaatcgatggtccacagtctgtcggagtgtttaaatcatcaacactgcttgcccaccgtgattgtgtaacaggattagctgttggagggtgggttcttgtttagctcttcttatgataaaactatcaatgtgtggtcactgcaggacttctctcatgtgcattgtttgaagggtcatgaacacaaaatcacagcaatagttgttgttgacaatgatagccattctctttgtataagtggagacagtggcagcggaatttttgtctggcgtgtggattctactctgaaggaagaacctttgaataaatggtatgaacataacgattggctctatcgaggggttaactgcttggctgtctctggaactggttatctttacactggtagcagagacaaaactatcaaggcttggtcactagaggattattcacttcgctgcactatgacaggtcataaatcaactgtgtcttgccttgcagtggccagtggtattctttacagtggaagttgggatggtaccattcgtttatggtggctcactgatcatacaccattgtctgtcctggaagatgatgcagcaggaagcatagcccctgtattgtcgatttcagcaggaaccaattttgttgcctcgtcatatgagaatggctattttaaggtctggaagaacgatgtgcttgtcaaatcagaaaagcttcaaaatggtgctgtttatgcagttaaattgagtggcaaatggctctatactggtggatgggataaagtcataaacatccaggagttgttggatgatgagtcagaggtagaactccgagacgtcgcttccattacttgcgactcaattataacttcgatactgccctgggatgaaaggctgatagttggactatccaacagggaaataaaggtttactacaaggcatcatgactctttgcttcaaccccatgtatacattgtgaatagttcagtatacagtaaacgtgagatagaggattggaatccccaggactagaatacatcaaaagtacaatccgtgtttttttctttaaacaacaggggcgttcgtgtcccctccttttttttatattttctacaaagggatagtatacaaggggcctgtttggttcagcttttttctgaccagcttttctgaaaatctggctgtggggagaatctggctgtgggagagaatctgggtatcattacgattacctgtggaggaagataaagttgttcataggcgcagtatctaaaaagtgacgtattcctactattacaacgactcaaccgattatgtgtttatattgattttggatggtttttg

SEQ ID NO: 72162 - DNA, 2851 bp, Zea Mays
cgccgcccggcttccagtctcgccgattcgaggagacgacgaccatgccaaccacagcgccaccggtggatgcagaacctcccgagtgcccggtgtgcctctccccattcgacgcggcctccgttgtgccgcgcgtcctcccgtgcggccactccctctgcgggtcttgcatcgcggccctcccgcccgcctccgcggccgcaggcgcctcctccctccgctgccctctctgctcccagtgcgtcccctacgcccgcgcgctcggcccctcctccctccccaaaaacctcgccctcctcactcttctcccctccccatcgcatgctctcagcgccgccaccctcgtcacagcgccgcttccccacccccatccgctccacgccgcccactcgcgcctcctttcgcgcttccgccatgccgtcctccccgagtccgcctccccgctcggttccgagccaagccccgtccacctcgcgttcggatccctcggctccgacctcggcgcgccctggttctgcgcgcggggccgccccgtgagcctcctcccgatcgagacccaaccagtccccccgacgaagcaggaagccgaattctaccggcccagccacgcgacgcgggtcctcgccgcggtcgacgcgctcagcgacgcgaccaaggaggagctggccggtctgatcgcctcttccgcgaggctagcacggatggtgagcaggctctacggtgtctggatgtcccctcacgcgccgccactatggatggtctctgaacggcacccacgtacggtttcccaattgttggaggaggagattatcaatagagaggagacggtggtgcgggccggattccttgtaatggaggcatgtgaagtgatcatggggttgcacagcgaggggctggtgctggggtgcctcgggctggactgcttctgcctcgatcgttttgggcactgcatgcttgatttgaatcaggcgttggccttgtgccggggagtccaagctggggctagctcgaacagtgttcgagctttcatcgctccagaggtggcggcagtgctaggtgacacgttgcggacggagggtcgtgattttgatggtttggttggctgtacctcggatatctggtcgttgggttgtgtgttcgtggcacttcttactagggatgaacagcttgtgcctgtggcaggttggaactctgaaggactgtatgatgattgggagaaggaagtggttacaaggcttgatgccacattgcttggtactatacttgaaccattggctgcagttatagcatcgtgcttgagatatgatccaaaatcccgtccagagattgctgatgtttggaaatgtattagaggcttgttgacaaaatttggtgatgttactttagctcctgatgatgatgttgcagctcagaagagttttagatgtttactccttggggagttatcctccatgtttgttgattctggtgctgttgagtcagatgataaaacacaactgtctcgaggagctgatggcaacagttcgaatcaggatcatggaagtaatgatggtttcttaaacaatagcggaaatgatttgtcaggaatcgatggtccacagtctgtcggagtgtttaaatcatcaacactgcttgcccaccgtgattgtgtaacaggattagctgttggaggacttctctcatgtgcattgtttgaagggtcatgaacacaaaatcacagcaatagttgttgttgacaatgatagccattctctttgtataagtggagacagtggcagcggaatttttgtctggcgtgtggattctactctgaaggaagaacctttgaataaatggtatgaacataacgattggctctatcgaggggttaactgcttggctgtctctggaactggttatctttacactggtagcagagacaaaactatcaaggcttggtcactagaggattattcacttcgctgcactatgacaggtcataaatcaactgtgtcttgccttgcagtggccagtggtattctttacagtggaagttgggatggtaccattcgtttatggtggctcactgatcatacaccattgtctgtcctggaagatgatgcagcaggaagcatagcccctgtattgtcgatttcagcaggaaccaattttgttgcctcgtcatatgagaatggctattttaaggtctggaagaacgatgtgcttgtcaaatcagaaaagcttcaaaatggtgctgtttatgcagttaaattgagtggcaaatggctctatactggtggatgggataaagtcataaacatccaggagttgttggatgatgagtcagaggtagaactccgagacgtcgcttccattacttgcgactcaattataacttcgatactgccctgggatgaaaggctgatagttggactatccaacagggaaataaaggtttactacaaggcatcatgactctttgcttcaaccccatgtatacattgtgaatagttcagtatacagtaaacgtgagatagaggattggaatccccaggactagaatacatcaaaagtacaatccgtgtttttttctttaaacaacaggggcgttcgtgtcccctccttttttttatattttctacaaagggatagtatacaaggggcctgtttggttcagcttttttctgaccagcttttctgaaaatctggctgtggggagaatctggctgtgggagagaatctgggtatcattacgattacctgtggaggaagataaagttgttcataggcgcagtatctaaaaagtgacgtattcctactattacaacgactcaaccgattatgtgtttatattgattttggatggtttttg

SEQ ID NO: 72163 - DNA, 2827 bp, Zea Mays
ccgattcgaggagacgacgaccatgccaaccacagcgccaccggtggatgcagaacctcccgagtgcccggtgtgcctctccccattcgacgcggcctccgttgtgccgcgcgtcctcccgtgcggccactccctctgcgggtcttgcatcgcggccctcccgcccgcctccgcggccgcaggcgcctcctccctccgctgccctctctgctcccagtgcgtcccctacgcccgcgcgctcggcccctcctccctccccaaaaacctcgccctcctcactcttctcccctccccatcgcatgctctcagcgccgccaccctcgtcacagcgccgcttccccacccccatccgctccacgccgcccactcgcgcctcctttcgcgcttccgccatgccgtcctccccgagtccgcctccccgctcggttccgagccaagccccgtccacctcgcgttcggatccctcggctccgacctcggcgcgccctggttctgcgcgcggggccgccccgtgagcctcctcccgatcgagacccaaccagtccccccgacgaagcaggaagccgaattctaccggcccagccacgcgacgcgggtcctcgccgcggtcgacgcgctcagcgacgcgaccaaggaggagctggccggtctgatcgcctcttccgcgaggctagcacggatggtgagcaggctctacggtgtctggatgtcccctcacgcgccgccactatggatggtctctgaacggcacccacgtacggtttcccaattgttggaggaggagattatcaatagagaggagacggtggtgcgggccggattccttgtaatggaggcatgtgaagtgatcatggggttgcacagcgaggggctggtgctggggtgcctcgggctggactgcttctgcctcgatcgttttgggcactgcatgcttgatttgaatcaggcgttggccttgtgccggggagtccaagctggggctagctcgaacagtgttcgagctttcatcgctccagaggtggcggcagtgctaggtgacacgttgcggacggagggtcgtgattttgatggtttggttggctgtacctcggatatctggtcgttgggttgtgtgttcgtggcacttcttactagggatgaacagcttgtgcctgtggcaggttggaactctgaaggactgtatgatgattgggagaaggaagtggttacaaggcttgatgccacattgcttggtactatacttgaaccattggctgcagttatagcatcgtgcttgagatatgatccaaaatcccgtccagagattgctgatgtttggaaatgtattagaggcttgttgacaaaatttggtgatgttactttagctcctgatgatgatgttgcagctcagaagagttttagatgtttactccttggggagttatcctccatgtttgttgattctggtgctgttgagtcagatgataaaacacaactgtctcgaggagctgatggcaacagttcgaatcaggatcatggaagtaatgatggtttcttaaacaatagcggaaatgatttgtcaggaatcgatggtccacagtctgtcggagtgtttaaatcatcaacactgcttgcccaccgtgattgtgtaacaggattagctgttggaggtgggttcttgtttagctcttcttatgataaaactatcaatgtgtggtcactgcaggacttctctcatgtgcattgtttgaagggtcatgaacacaaaatcacagcaatagttgttgttgacaatgatagccattctctttgtataagtggagacagtggcagcggaatttttgtctggcgtgtggattctactctgaaggaagaacctttgaataaatggtatgaacataacgattggctctatcgaggggttaactgcttggctgtctctggaactggttatctttacactggtagcagagacaaaactatcaaggcttggtcactagagtggccagtggtattctttacagtggaagttgggatggtaccattcgtttatggtggctcactgatcatacaccattgtctgtcctggaagatgatgcagcaggaagcatagcccctgtattgtcgatttcagcaggaaccaattttgttgcctcgtcatatgagaatggctattttaaggtctggaagaacgatgtgcttgtcaaatcagaaaagcttcaaaatggtgctgtttatgcagttaaattgagtggcaaatggctctatactggtggatgggataaagtcataaacatccaggagttgttggatgatgagtcagaggtagaactccgagacgtcgcttccattacttgcgactcaattataacttcgatactgccctgggatgaaaggctgatagttggactatccaacagggaaataaaggtttactacaaggcatcatgactctttgcttcaaccccatgtatacattgtgaatagttcagtatacagtaaacgtgagatagaggattggaatccccaggactagaatacatcaaaagtacaatccgtgtttttttctttaaacaacaggggcgttcgtgtcccctccttttttttatattttctacaaagggatagtatacaaggggcctgtttggttcagcttttttctgaccagcttttctgaaaatctggctgtggggagaatctggctgtgggagagaatctgggtatcattacgattacctgtggaggaagataaagttgttcataggcgcagtatctaaaaagtgacgtattcctactattacaacgactcaaccgattatgtgtttatattgattttggatggtttttg

SEQ ID NO: 72164 - DNA, 2423 bp, Zea Mays
cgacgaccatgccaaccacagcgccaccggtggatgcagaacctcccgagtgcccggtgtgcctctccccattcgacgcggcctccgttgtgccgcgcgtcctcccgtgcggccactccctctgcgggtcttgcatcgcggccctcccgcccgcctccgcggccgcaggcgcctcctccctccgctgccctctctgctcccagtgcgtcccctacgcccgcgcgctcggcccctcctccctccccaaaaacctcgccctcctcactcttctcccctccccatcgcatgctctcagcgccgccaccctcgtcacagcgccgcttccccacccccatccgctccacgccgcccactcgcgcctcctttcgcgcttccgccatgccgtcctccccgagtccgcctccccgctcggttccgagccaagccccgtccacctcgcgttcggatccctcggctccgacctcggcgcgccctggttctgcgcgcggggccgccccgtgagcctcctcccgatcgagacccaaccagtccccccgacgaagcaggaagccgaattctaccggcccagccacgcgacgcgggtcctcgccgcggtcgacgcgctcagcgacgcgaccaaggaggagctggccggtctgatcgcctcttccgcgaggctagcacggatggtgagcaggctctacggtgtctggatgtcccctcacgcgccgccactatggatggtctctgaacggcacccacgtacggtttcccaattgttggaggaggagattatcaatagagaggagacggtggtgcgggccggattccttgtaatggaggcatgtgaagtgatcatggggttgcacagcgaggggctggtgctggggtgcctcgggctggactgcttctgcctcgatcgttttgggcactgcatgcttgatttgaatcaggcgttggccttgtgccggggagtccaagctggggctagctcgaacagtgttcgagctttcatcgctccagaggtggcggcagtgctaggtgacacgttgcggacggagggtcgtgattttgatggtttggttggctgtacctcggatatctggtcgttgggttgtgtgttcgtggcacttcttactagggatgaacagcttgtgcctgtggcaggttggaactctgaaggactgtatgatgattgggagaaggaagtggttacaaggcttgatgccacattgcttggtactatacttgaaccattggctgcagttatagcatcgtgcttgagatatgatccaaaatcccgtccagagattgctgatgtttggaaatgtattagaggcttgttgacaaaatttggtgatgttactttagctcctgatgatgatgttgcagctcagaagagttttagatgtttactccttggggagttatcctccatgtttgttgattctggtgctgttgagtcagatgataaaacacaactgtctcgaggagctgatggcaacagttcgaatcaggatcatggaagtaatgatggtttcttaaacaatagcggaaatgatttgtcaggaatcgatggtccacagtctgtcggagtgtttaaatcatcaacactgcttgcccaccgtgattgtgtaacaggattagctgttggaggacttctctcatgtgcattgtttgaagggtcatgaacacaaaatcacagcaatagttgttgttgacaatgatagccattctctttgtataagtggagacagtggcagcggaatttttgtctggcgtgtggattctactctgaaggaagaacctttgaataaatggtatgaacataacgattggctctatcgaggggttaactgcttggctgtctctggaactggttatctttacactggtagcagagacaaaactatcaaggcttggtcactagaggtcataaatcaactgtgtcttgccttgcagtggccagtggtattctttacagtggaagttgggatggtaccattcgtttatggtggctcactgatcatacaccattgtctgtcctggaagatgatgcagcaggaagcatagcccctgtattgtcgatttcagcaggaaccaattttgttgcctcgtcatatgagaatggctattttaaggtctggaagaacgatgtgcttgtcaaatcagaaaagcttcaaaatggtgctgtttatgcagttaaattgagtggcaaatggctctatactggtggatgggataaagtcataaacatccaggagttgttggatgatgagtcagaggtagaactccgagacgtcgcttccattacttgcgactcaattataacttcgatactgccctgggatgaaaggctgatagttggactatccaacagggaaataaagagtttggtttgtagactgtatgctcaatcatacccttgccaattctgcctgccc

SEQ ID NO: 72165 - DNA, 2835 bp, Zea Mays
atgccaaccacagcgccaccggtggatgcagaacctcccgagtgcccggtgtgcctctccccattcgacgcggcctccgttgtgccgcgcgtcctcccgtgcggccactccctctgcgggtcttgcatcgcggccctcccgcccgcctccgcggccgcaggcgcctcctccctccgctgccctctctgctcccagtgcgtcccctacgcccgcgcgctcggcccctcctccctccccaaaaacctcgccctcctcactcttctcccctccccatcgcatgctctcagcgccgccaccctcgtcacagcgccgcttccccacccccatccgctccacgccgcccactcgcgcctcctttcgcgcttccgccatgccgtcctccccgagtccgcctccccgctcggttccgagccaagccccgtccacctcgcgttcggatccctcggctccgacctcggcgcgccctggttctgcgcgcggggccgccccgtgagcctcctcccgatcgagacccaaccagtccccccgacgaagcaggaagccgaattctaccggcccagccacgcgacgcgggtcctcgccgcggtcgacgcgctcagcgacgcgaccaaggaggagctggccggtctgatcgcctcttccgcgaggctagcacggatggtgagcaggctctacggtgtctggatgtcccctcacgcgccgccactatggatggtctctgaacggcacccacgtacggtttcccaattgttggaggaggagattatcaatagagaggagacggtggtgcgggccggattccttgtaatggaggcatgtgaagtgatcatggggttgcacagcgaggggctggtgctggggtgcctcgggctggactgcttctgcctcgatcgttttgggcactgcatgcttgatttgaatcaggcgttggccttgtgccggggagtccaagctggggctagctcgaacagtgttcgagctttcatcgctccagaggtggcggcagtgctaggtgacacgttgcggacggagggtcgtgattttgatggtttggttggctgtacctcggatatctggtcgttgggttgtgtgttcgtggcacttcttactagggatgaacagcttgtgcctgtggcaggttggaactctgaaggactgtatgatgattgggagaaggaagtggttacaaggcttgatgccacattgcttggtactatacttgaaccattggctgcagttatagcatcgtgcttgagatatgatccaaaatcccgtccagagattgctgatgtttggaaatgtattagaggcttgttgacaaaatttggtgatgttactttagctcctgatgatgatgttgcagctcagaagagttttagatgtttactccttggggagttatcctccatgtttgttgattctggtgctgttgagtcagatgataaaacacaactgtctcgaggagctgatggcaacagttcgaatcaggatcatggaagtaatgatggtttcttaaacaatagcggaaatgatttgtcaggaatcgatggtccacagtctgtcggagtgtttaaatcatcaacactgcttgcccaccgtgattgtgtaacaggattagctgttggaggtgggttcttgtttagctcttcttatgataaaactatcaatgtgtggtcactgcaggacttctctcatgtgcattgtttgaagggtcatgaacacaaaatcacagcaatagttgttgttgacaatgatagccattctctttgtataagtggagacagtggcagcggaatttttgtctggcgtgtggattctactctgaaggaagaacctttgaataaatggtatgaacataacgattggctctatcgaggggttaactgcttggctgtctctggaactggttatctttacactggtagcagagacaaaactatcaaggcttggtcactagaggtcataaatcaactgtgtcttgccttgcagtggccagtggtattctttacagtggaagttgggatggtaccattcgtttatggtggctcactgatcatacaccattgtctgtcctggaagatgatgcagcaggaagcatagcccctgtattgtcgatttcagcaggaaccaattttgttgcctcgtcatatgagaatggctattttaaggtctggaagaacgatgtgcttgtcaaatcagaaaagcttcaaaatggtgctgtttatgcagttaaattgagtggcaaatggctctatactggtggatgggataaagtcataaacatccaggagttgttggatgatgagtcagaggtagaactccgagacgtcgcttccattacttgcgactcaattataacttcgatactgccctgggatgaaaggctgatagttggactatccaacagggaaataaaggtttactacaaggcatcatgactctttgcttcaaccccatgtatacattgtgaatagttcagtatacagtaaacgtgagatagaggattggaatccccaggactagaatacatcaaaagtacaatccgtgtttttttctttaaacaacaggggcgttcgtgtcccctccttttttttatattttctacaaagggatagtatacaaggggcctgtttggttcagcttttttctgaccagcttttctgaaaatctggctgtggggagaatctggctgtgggagagaatctgggtatcattacgattacctgtggaggaagataaagttgttcataggcgcagtatctaaaaagtgacgtattcctactattacaacgactcaaccgattatgtgtttatattgattttggatggtttttg

SEQ ID NO: 72166 - DNA, 3237 bp, Zea Mays
atgccaaccacagcgccaccggtggatgcagaacctcccgagtgcccggtgtgcctctccccattcgacgcggcctccgttgtgccgcgcgtcctcccgtgcggccactccctctgcgggtcttgcatcgcggccctcccgcccgcctccgcggccgcaggcgcctcctccctccgctgccctctctgctcccagtgcgtcccctacgcccgcgcgctcggcccctcctccctccccaaaaacctcgccctcctcactcttctcccctccccatcgcatgctctcagcgccgccaccctcgtcacagcgccgcttccccacccccatccgctccacgccgcccactcgcgcctcctttcgcgcttccgccatgccgtcctccccgagtccgcctccccgctcggttccgagccaagccccgtccacctcgcgttcggatccctcggctccgacctcggcgcgccctggttctgcgcgcggggccgccccgtgagcctcctcccgatcgagacccaaccagtccccccgacgaagcaggaagccgaattctaccggcccagccacgcgacgcgggtcctcgccgcggtcgacgcgctcagcgacgcgaccaaggaggagctggccggtctgatcgcctcttccgcgaggctagcacggatggtgagcaggctctacggtgtctggatgtcccctcacgcgccgccactatggatggtctctgaacggcacccacgtacggtttcccaattgttggaggaggagattatcaatagagaggagacggtggtgcgggccggattccttgtaatggaggcatgtgaagtgatcatggggttgcacagcgaggggctggtgctggggtgcctcgggctggactgcttctgcctcgatcgttttgggcactgcatgcttgatttgaatcaggcgttggccttgtgccggggagtccaagctggggctagctcgaacagtgttcgagctttcatcgctccagaggtggcggcagtgctaggtgacacgttgcggacggagggtcgtgattttgatggtttggttggctgtacctcggatatctggtcgttgggttgtgtgttcgtggcacttcttactagggatgaacagcttgtgcctgtggcaggttggaactctgaaggactgtatgatgattgggagaaggaagtggttacaaggcttgatgccacattgcttggtactatacttgaaccattggctgcagttatagcatcgtgcttgagatatgatccaaaatcccgtccagagattgctgatgtttggaaatgtattagaggcttgttgacaaaatttggtgatgttactttagctcctgatgatgatgttgcagctcagaagagttttagatgtttactccttggggagttatcctccatgtttgttgattctggtgctgttgagtcagatgataaaacacaactgtctcgaggagctgatggcaacagttcgaatcaggatcatggaagtaatgatggtttcttaaacaatagcggaaatgatttgtcaggaatcgatggtccacagtctgtcggagtgtttaaatcatcaacactgcttgcccaccgtgattgtgtaacaggattagctgttggagagggttttgtaatgctggctcaagaactgcctattttcattctttctttcactgcaggtgggttcttgtttagctcttcttatgataaaactatcaatgtgtggtcactgcaggacttctctcatgtgcattgtttgaagggtcatgaacacaaaatcacagcaatagttgttgttgacaatgatagccattctctttgtataagtggagacagtggcagcggaatttttgtctggcgtgtggattctactctgaaggaagaacctttgaataaatggtatgaacataacgattggctctatcgaggggttaactgcttggctgtctctggaactggttatctttacactggtagcagagacaaaactatcaaggcttggtcactagaggattattcacttcgctgcactatgacaggtcataaatcaactgtgtcttgccttgcagtggccagtggtattctttacagtggaagttgggatggtaccattcgtttatggtggctcactgatcatacaccattgtctgtcctggaagatgatgcagcaggaagcatagcccctgtattgtcgatttcagcaggaaccaattttgttgcctcgtcatatgagaatggctattttaaggtctggaagaacgatgtgcttgtcaaatcagaaaagcttcaaaatggtgctgtttatgcagttaaattgagtggcaaatggctctatactggtggatgggataaagtcataaacatccaggagttgttggatgatgagtcagaggtagaactccgagacgtcgcttccattacttgcgactcaattataacttcgatactgccctgggatgaaaggctgatagttggactatccaacagggaaataaagtccgcagcagcttttggtggccagaagctgtcagaagccgaaacaaacagggcctaggtgtcgcaatggccctaggccaaaaacaaactctgttttcgtgggaactggtgccttgaagactctccgtttgaagcatcgatgtgtaagactctcttcaacggtggacgctagcgccccctcccctctctgtgacggctacaggcctccctctaccgctccctctaccgctacaacggtgccccctagcactgctacagtgctagcggctggtgggtgcgcaccctacatcaagggataccacaagggctccccttgtctcggtttgtgtgtacaaaagtatttattagttgggaaaaaattgataatagatggtgaataggtatggaaaatagtattttatgattatagtggagtataggggaagtatttagggggaaccgctgtacagggtggagatatagggggaagagaatactgacgtggcagtgggatatagggggagaaatttagggttaaccgctgaagacagtctaaagcctatgccagaggcgtctcctagaaggagagtaccaacatcttgctgcagccgcatactcgcatacaaattaccaaagtagttgtagcagtagcagactaggactctgtttatggtactggtaacttggttgtggtaattatttgagtatctgtgtgattaacaatatacaaaacatatatgcagctccagtcttttac

SEQ ID NO: 72167 - DNA, 7001 bp, Zea Mays
ctttctcagccttatcttcagtcttctagccgattctaccatcttcaattcatccaattagatcaaccaccgctcagtcctcctctcttatccatttgacgcttgctccgtggaactctcacgcacgtctctccgtcaagtccctgggccagcgctgctaggccccgttgatccctcatctccctcatgtccggagccctgcttctttttttcccagccctggtgctcgcttgctgctccccatggccgctaaaatcccctgccctctcatggccgctgacccatggcaagctctgccgtcgatctgcgcagctgtcccggcatcgtcgcgcagcgagctccgccctggatttgcgcagccccaatacacgccgtcgatctgcgcagccgcggccacgacagctccctcgcatcgtgtattccgcctcatcgcactcgtcgtgctcgacaaaatgtcgcagcatgctgcaccttgaactgtgcagtcccgattgcgttgtcgtcaccccggaataaaatccctggaaatttggtggagaagaaggttcagttcaacactccctacgtgttcgatgatatgctcaaaccgctggtcgtcgtcgttcttgcaaaaaaaaatcaagtcggatcaggatgtggtacgctagttgatcacgtgatgcggaaatcgagctgagtcgaccacgagatgctgttaagcgtgggcttcttcgcaaggagatactgatgataaacctgaagatggataatctgaacgagtgccaacacaaaaggctggtcaccaagtgatcgtcatctaacaacactcacttagtgtttatcccaggcaagccccggtgcatttgccacctcccttgtgtttacaaaattttatcacttatatgctgcattaggtgataggagttgagtgattaaacacttgatacattaccatccttgaaaggttgattaccacactttgtcacccgttttataaaagctagagatgcttagtcttgctgatagattaagaaacatatttttgatctatgactcatgtttttacaaaaaaagaaaatgggcttgggataatgaaggcatcaagacgttgataaattcattatccaggtatggcccctctgtcaggcgccaaaattttgaaatagtttaaaatgggaccagacgttgagcaggaaaggtcgcccgtctgtgtcgattaaggaccgtaccgattgttggcctgatgatctaggaccttttaactggccatatacctcgtcatgggtaagcctgaacccggctattccatacgtgaaaagacaaccgcacactgggcgtgggagatggtgggagtagcagttgccctcctggcaagaggctggatggtagggtaatgtgctcccgggtagcgcggaccggttcatgtagtggaggatccgtgggaatggttgacatatgcaagtgttaagtgctacatatgtcgtgtggttggagatccccagctgggtattaatcgattcggatcgccgttacttctcggatatgaagattggatcgctgcccttcatcgtagataacaagcgaaacaaaattttgattttaaaagaaagttagtataggacaagtgaatgctctagattaggcaaatctagattcaaaaaaagtacttaacttgtgatgtaaaattttggcataaggatccactactagtaagcttttctgcaaaaatgagcttttgaaatttgataagctttaccttgattcccgacaaaccaacatacccttgagagtcttttctttagtcgggtaagtcttgctgagtaattgcgtgctgagtaattgcgtactcagggttttattccctattgtttttcaggttgtaattttgttctgttgtggatggtgctaagtgccggtgggctcggccttcttatataagtatatcccttctatagtttctttaatgaggattgtcacttaagctagcatgtatttcaaatttacaaatattctataacattttaaaatgtaattcttttgaaacactttcttttgtaatcactccgatgaggtataataaaatcttgataaacttgtaatcattttataataaagagtttatttccgctgcaagtgtttgtatgtgagttatgtttacttaatcctgcgatcttggcggtaagtggtttatccggggtccttgggacactcggacagatcctgttaagttatttggtgcatatgcatagctgtttgaggtccttgggataaggacaggtgcatgtgggcctaataacttgggaggttctgccacactcttgttataagcttcgtcatctgaaaggaagttaccctgaaggtaagagatgatctcggttctccagtcttcactataaacaggagatatattgaggactgctctttcaaggagttcaaccgagggtgcttttattgtttcaaaaaatacttccgaaggtaagggcagcccctgtgatgctgacttggctagcaaatcagcatgttcattttctcctcgaggaatattttttacagaaaacccttcaaaggaagcttcaatccttcggaccgtatctaaatacttctcaagcttcgggtctcttgccttacaactcttgtcaatatgaccagagataacctgggaatcagttttaagaaccgcccttctgattcccattgcctttaactttcgaagacccaaaagtaaagcttcgtactcagcaatgttatttgtgcagctaaaatcgagtcttgctgcgtaacaagttttaactttggagggtgcgaccaacacagcggctgctcctgccccgaaggttccccaagaaccatagcagaatattgtccatgcttcgacatctttactcgcttcttcttcctgagcccctggcgtccagtcagcaatgaagtcagctagcgcctgggactgaatcgaagatctgtgcacataatcaatgcagaattcattgagttccgcagcccactttccaacccttccagtagcttctctatttctcataatgtccttcaatggttgtgaagaagggacaattatattgtatgcttgaaaataatgccgaagctttctggaagccatcaaaacaacatacaacaccttctccaattctgtataatttttctttgataaactaagaacttcagatacaaagtatattggagcttgctttttgacttgcccttcaagcttttcttggacaagtgccgcacttaccgctgagtgcgaggctgccacatataacaacagagaagcccctggcgttggtggagttaacgtcgttaagtctatcaaatattgcttcagctcttcgaaggctctctgctgaactggaccccattgaaaaacttcggacgatttcagcacttcgaagaatggtaaatttctctctgctgatctagatatgaatttgttgagagatgccaatcttcctgtcaatcgttgagcccccttctttgtgcttggtggttccattcgaagaatagcttcgattttatttggattagcctcaatcccttttgttgaaactaggcaaccaagaaatttccccttctttactccgaaaacacacttttctggattcaattttagatcggcctatctaaaattagcgaaagtctcctacagatcagcaatgtgattttcttacttcgtgcttttacaatgatatcatcaacataagttagcacatttctgcctatctgagaatgaagaacctttgctgtcattctgctgaagcttcctccagcattttgagcccctcaggcatccgaaggtaacaatatgttccgctaggggttatgaagctggtttttggctcatcctccttcttcatccaaatctgatgatagcctgaataacagtccaagagactcataagttctgatgaagctgttgcatcaactagggagtctatccttggcaatgggaactcatccttcggacaagcctcgttgagatcagtgaaatcaatacacatcctccatttgtcgttggccttttttaccataacagtgttagccagtcattctggatatttcacttctctgatgactccggcactgaggagtctttttacttcatttcgagcaccttcggtcttgtcatcagacatcttccgaagcctctgctttctgggcctaaaggatggatcaacattgagcgagtgttcaataacatccctgttgacgccacaaagatcgttagccgaccatgcaaagacatctttattgttgaacaagaatcttatcagggttttctcttgttcctgagacaattgagatcccagcagcaccttctgctctgcgatatcttcgcataaaagcatgggtttcggctgatcggccgaagcagccttctcccttctatgcttgtactgctcacaagcttcggcttcatctatattgtggattgcctttgaatcagtccaattcccctcggcctttctggcagcttcctgactcccatgaatagcaataggtccctgatccgaaggtatctttatgcaaagatatgctggatgaagaattgcttcgaaatcattgagtgttccgcgaccaatgatagcattgtaaggatactccatgtcaacaatgtcaaacacaacttgctcagtccttgtgttgttgacgaatccgaaggtcactggcatggtaatcttaccaagtgctacaatctgtctccctccgaagccacaaagagggtgcgtagcatcatgaatcttgtcttcgggctcttgcatttgtctaaaggccttagcaaatatgatatccgttgcactgcctgtatcaaccaagacattgtggaccagaaatcctttgatcacacaagagataaccatagcatcattatgtgggtaatccttgagctgaagatcctcttgagagaagataattgggatgtgagaccatcttgacttgatgaagggtccttgtacccctacatgttgtactcttctttgcgcctccttcttctgcttcttgttagccggctctgagcatgaaccacctgttatcgggagaatcagctttggagccgaagcagttacagcttggttcttgaacgaagccattagctcaaaaagtggaagtgagttcatcggaggtgggcgctaatgttggggacttgttctcaagtgctatgaattaggaacaaggcaacatagaatgtcagatgttaaagcccttcgtccgctgaagcattatttccccaaggatttaatgaacttcggacgaaggttgtggataatatatcacgaaggttgcaccttcgtgatcaaagataaaacaatgcaaaatgaaatataaaatataaaatataaaacgttacataatagcaagaataaataaattcaattattttgtaatgtgaacttagatatcaaaacataatgtttaggcacatttgtaccttcgccttggcagaaaataataattccagagtaatacgtcagcagttacaagattgcgtgaacaggaaaggagtactgttcacctatttataggcacagaacgcagcctgtaagaaattacaatcatgccccttacagaagatcacaattataactcagactcttatggactaaaaagtaattccatctttaagttggttcggtccttcgtctttagacatgctatagtgtcgaagctttatgagcggtagcttcggtatctcatataaacagatttgtcgaaggtgttttcttcctccaggaccttcggcgacgaagcatgatcccaacaggttacaagaactctaaagggtgtagtgtaatcattcgtattaaatcttataacttttaagatctttgatgatacctcgaaactaaatctctttgtattaatgcttttgtaacactgttttctcccgacagcttctcaaactagcagatgacgattgcttagccatgctggatcttcttcaatcactgcttatagatcattactttaggtctagctcaagcatatgaattggattttgtgtgtcagaccagcacctttcttttttgctctcaacttattttttctcgaaaacacgcaggagaactgcgcctcattatattaataagaaaaagaaaccagggtctaaaggaagacctaatagaaaagaccccttacggggccagaaacatgcatataggaagaaatccatctaggaaaacaaaggaaaaacccacacactgccagggaagtccctatggctcagctaagggggctgccaggtaagaaatgccttttgccctcgctatttcccatcgatgcatctcctcaagcaggtatttcttattctaaattgttgagttggagaatattttccaatccagtcattgctgcagttacatatatttggcttgaatgctctaaattattgaccttgtttttcttattctaaattcttttaaaatattgatgcacacagttagcttcttactactgaagaaatatgtctatagcatgtattgattcattgtccttttgtacaactactaatatatctactttgccatccaagctcggaggtgagaaggtagtttatgatgctaccaagaaaatcttctcaagctccagtggtctagccgaagatattctattcttattcacagattggttgtcactactgggagagattgtcaatattgaaacaatgcctaccgcaacttgcttgagactaaattgctttgttgttgctgttgaatcctctgctactccaagcttctttgatgtcgggtgtaacgttgtaactggctatcgttgttggccgaacatttggctagcgtggatgatatatattgcaatgtgaatccaataagcaggagagtgatcaatgtatgtaatcgttgtacactaacatttgtcgaatattttgtatatcgtttcaaggcacctaaatattttctaaagatttgtataagtttgtagtttttgtgatatatagaagtccgtatagtacagtgtagtgtcgaaatagctagattaaaataacaatttat

SEQ ID NO: 72168 - DNA, 6936 bp, Zea Mays
ctttctcagccttatcttcagtcttctagccgattctaccatcttcaattcatccaattagatcaaccaccgctcagtcctcctctcttatccatttgacgcttgctccgtggaactctcacgcacgtctctccgtcaagtccctgggccagcgctgctaggccccgttgatccctcatctccctcatgtccggagccctgcttctttttttcccagccctggtgctcgcttgctgctccccatggccgctaaaatcccctgccctctcatggccgctgacccatggcaagctctgccgtcgatctgcgcagctgtcccggcatcgtcgcgcagcgagctccgccctggatttgcgcagccccaatacacgccgtcgatctgcgcagccgcggccacgacagctccctcgcatcgtgtattccgcctcatcgcactcgtcgtgctcgacaaaatgtcgcagcatgctgcaccttgaactgtgcagtcccgattgcgttgtcgtcaccccggaataaaatccctggaaatttggtggagaagaaggttcagttcaacactccctacgtgttcgatgatatgctcaaaccgctggtcgtcgtcgttcttgcaaaaaaaaatcaagtcggatcaggatgtggtacgctagttgatcacgtgatgcggaaatcgagctgagtcgaccacgagatgctgttaagcgtgggcttcttcgcaaggagatactgatgataaacctgaagatggataatctgaacgagtgccaacacaaaaggctggtcaccaagtgatcgtcatctaacaacactcacttagtgtttatcccaggcaagccccggtgcatttgccacctcccttgtgtttacaaaattttatcacttatatgctgcattaggtgataggagttgagtgattaaacacttgatacattaccatccttgaaaggttgattaccacactttgtcacccgttttataaaagctagagatgcttagtcttgctgatagattaagaaacatatttttgatctatgactcatgtttttacaaaaaaagaaaatgggcttgggataatgaaggcatcaagacgttgataaattcattatccaggtatggcccctctgtcaggcgccaaaattttgaaatagtttaaaatgggaccagacgttgagcaggaaaggtcgcccgtctgtgtcgattaaggaccgtaccgattgttggcctgatgatctaggaccttttaactggccatatacctcgtcatgggtaagcctgaacccggctattccatacgtgaaaagacaaccgcacactgggcgtgggagatggtgggagtagcagttgccctcctggcaagaggctggatggtagggtaatgtgctcccgggtagcgcggaccggttcatgtagtggaggatccgtgggaatggttgacatatgcaagtgttaagtgctacatatgtcgtgtggttggagatccccagctgggtattaatcgattcggatcgccgttacttctcggatatgaagattggatcgctgcccttcatcgtagataacaagcgaaacaaaattttgattttaaaagaaagttagtataggacaagtgaatgctctagattaggcaaatctagattcaaaaaaagtacttaacttgtgatgtaaaattttggcataaggatccactactagtaagcttttctgcaaaaatgagcttttgaaatttgataagctttaccttgattcccgacaaaccaacatacccttgagagtcttttctttagtcgggtaagtcttgctgagtaattgcgtgctgagtaattgcgtactcagggttttattccctattgtttttcaggttgtaattttgttctgttgtggatggtgctaagtgccggtgggctcggccttcttatataagtatatcccttctatagtttctttaatgaggattgtcacttaagctagcatgtatttcaaatttacaaatattctataacattttaaaatgtaattcttttgaaacactttcttttgtaatcactccgatgaggtataataaaatcttgataaacttgtaatcattttataataaagagtttatttccgctgcaagtgtttgtatgtgagttatgtttacttaatcctgcgatcttggcggtaagtggtttatccggggtccttgggacactcggacagatcctgttaagttatttggtgcatatgcatagctgtttgaggtccttgggataaggacaggtgcatgtgggcctaataacttgggaggttctgccacactcttgttataagcttcgtcatctgaaaggaagttaccctgaaggtaagagatgatctcggttctccagtcttcactataaacaggagatatattgaggactgctctttcaaggagttcaaccgagggtgcttttattgtttcaaaaaatacttccgaaggtaagggcagcccctgtgatgctgacttggctagcaaatcagcatgttcattttctcctcgaggaatattttttacagaaaacccttcaaaggaagcttcaatccttcggaccgtatctaaatacttctcaagcttcgggtctcttgccttacaactcttgtcaatatgaccagagataacctgggaatcagttttaagaaccgcccttctgattcccattgcctttaactttcgaagacccaaaagtaaagcttcgtactcagcaatgttatttgtgcagctaaaatcgagtcttgctgcgtaacaagttttaactttggagggtgcgaccaacacagcggctgctcctgccccgaaggttccccaagaaccatagcagaatattgtccatgcttcgacatctttactcgcttcttcttcctgagcccctggcgtccagtcagcaatgaagtcagctagcgcctgggactgaatcgaagatctgtgcacataatcaatgcagaattcattgagttccgcagcccactttccaacccttccagtagcttctctatttctcataatgtccttcaatggttgtgaagaagggacaattatattgtatgcttgaaaataatgccgaagctttctggaagccatcaaaacaacatacaacaccttctccaattctgtataatttttctttgataaactaagaacttcagatacaaagtatattggagcttgctttttgacttgcccttcaagcttttcttggacaagtgccgcacttaccgctgagtgcgaggctgccacatataacaacagagaagcccctggcgttggtggagttaacgtcgttaagtctatcaaatattgcttcagctcttcgaaggctctctgctgaactggaccccattgaaaaacttcggacgatttcagcacttcgaagaatggtaaatttctctctgctgatctagatatgaatttgttgagagatgccaatcttcctgtcaatcgttgagcccccttctttgtgcttggtggttccattcgaagaatagcttcgattttatttggattagcctcaatcccttttgttgaaactaggcaaccaagaaatttccccttctttactccgaaaacacacttttctggattcaattttagatcggcctatctaaaattagcgaaagtctcctacagatcagcaatgtgattttcttacttcgtgcttttacaatgatatcatcaacataagttagcacatttctgcctatctgagaatgaagaacctttgctgtcattctgctgaagcttcctccagcattttgagcccctcaggcatccgaaggtaacaatatgttccgctaggggttatgaagctggtttttggctcatcctccttcttcatccaaatctgatgatagcctgaataacagtccaagagactcataagttctgatgaagctgttgcatcaactagggagtctatccttggcaatgggaactcatccttcggacaagcctcgttgagatcagtgaaatcaatacacatcctccatttgtcgttggccttttttaccataacagtgttagccagtcattctggatatttcacttctctgatgactccggcactgaggagtctttttacttcatttcgagcaccttcggtcttgtcatcagacatcttccgaagcctctgctttctgggcctaaaggatggatcaacattgagcgagtgttcaataacatccctgttgacgccacaaagatcgttagccgaccatgcaaagacatctttattgttgaacaagaatcttatcagggttttctcttgttcctgagacaattgagatcccagcagcaccttctgctctgcgatatcttcgcataaaagcatgggtttcggctgatcggccgaagcagccttctcccttctatgcttgtactgctcacaagcttcggcttcatctatattgtggattgcctttgaatcagtccaattcccctcggcctttctggcagcttcctgactcccatgaatagcaataggtccctgatccgaaggtatctttatgcaaagatatgctggatgaagaattgcttcgaaatcattgagtgttccgcgaccaatgatagcattgtaaggatactccatgtcaacaatgtcaaacacaacttgctcagtccttgtgttgttgacgaatccgaaggtcactggcatggtaatcttaccaagtgctacaatctgtctccctccgaagccacaaagagggtgcgtagcatcatgaatcttgtcttcgggctcttgcatttgtctaaaggccttagcaaatatgatatccgttgcactgcctgtatcaaccaagacattgtggaccagaaatcctttgatcacacaagagataaccatagcatcattatgtgggtaatccttgagctgaagatcctcttgagagaagataattgggatgtgagaccatcttgacttgatgaagggtccttgtacccctacatgttgtactcttctttgcgcctccttcttctgcttcttgttagccggctctgagcatgaaccacctgttatcgggagaatcagctttggagccgaagcagttacagcttggttcttgaacgaagccattagctcaaaaagtggaagtgagttcatcggaggtgggcgctaatgttggggacttgttctcaagtgctatgaattaggaacaaggcaacatagaatgtcagatgttaaagcccttcgtccgctgaagcattatttccccaaggatttaatgaacttcggacgaaggttgtggataatatatcacgaaggttgcaccttcgtgatcaaagataaaacaatgcaaaatgaaatataaaatataaaatataaaacgttacataatagcaagaataaataaattcaattattttgtaatgtgaacttagatatcaaaacataatgtttaggcacatttgtaccttcgccttggcagaaaataataattccagagtaatacgtcagcagttacaagattgcgtgaacaggaaaggagtactgttcacctatttataggcacagaacgcagcctgtaagaaattacaatcatgccccttacagaagatcacaattataactcagactcttatggactaaaaagtaattccatctttaagttggttcggtccttcgtctttagacatgctatagtgtcgaagctttatgagcggtagcttcggtatctcatataaacagatttgtcgaaggtgttttcttcctccaggaccttcggcgacgaagcatgatcccaacaggttacaagaactctaaagggtgtagtgtaatcattcgtattaaatcttataacttttaagatctttgatgatacctcgaaactaaatctctttgtattaatgcttttgtaacactgttttctcccgacagcttctcaaactagcagatgacgattgcttagccatgctggatcttcttcaatcactgcttatagatcattactttaggtctagctcaagcatatgaattggattttgtgtgtcagaccagcacctttcttttttgctctcaacttattttttctcgaaaacacgcaggagaactgcgcctcattatattaataagaaaaagaaaccagggtctaaaggaagacctaatagaaaagaccccttacggggccagaaacatgcatataggaagaaatccatctaggaaaacaaaggaaaaacccacacactgccagggaagtccctatggctcagctaagggggctgccaggtaagaaatgccttttgccctcgctatttcccatcgatgcatctcctcaagcaggtatttcttattctaaattgttgagttggagaatattttccaatccagtcattgctgcagttacatatatttggcttgaatgctctaaattattgaccttgtttttcttattctaaattcttttaaaatattgatgcacacagttagcttcttactactgaagaaatatgtctatagcatgtattgattcattgtccttttgtacaactactaatatatctactttgccatccaagctcggaggtgagaaggtagtttatgatgctaccaagaaaatcttctcaagctccagtggtctagccgaagatattctattcttattcacagattggttgtcactactgggagagattgtcaatattgaaacaatgcttctttgatgtcgggtgtaacgttgtaactggctatcgttgttggccgaacatttggctagcgtggatgatatatattgcaatgtgaatccaataagcaggagagtgatcaatgtatgtaatcgttgtacactaacatttgtcgaatattttgtatatcgtttcaaggcacctaaatattttctaaagatttgtataagtttgtagtttttgtgatatatagaagtccgtatagtacagtgtagtgtcgaaatagctagattaaaataacaatttat

SEQ ID NO: 72169 - DNA, 686 bp, Zea Mays
ctcagtcctcctctcttatccatttgacgcttgctccgtggaactctcacgcacgtctctccgtcaagtccctgggccagcgctgctaggccccgttgatccctcatctccctcatgtccggagccctgcttctttttttcccagccctggtgctcgcttgctgctccccatggccgctaaaatcccctgccctctcatggccgctgacccatggcaagctctgccgtcgatctgcgcagctgtcccggcatcgtcgcgcagcgagctccgccctggatttgcgcagccccaatacacgccgtcgatctgcgcagccgcggccacgacagctccctcgcatcgtgtattccgcctcatcgcactcgtcgtgctcgacaaaatgtcgcagcatgctgcaccttgaactgtgcagtcccgattgcgttgtcgtcaccccggtgagatcccgatgttccttctctgttcaattctgcatcagcgtcggttccctgctattaattgtgtatgattatatttttattaaggaataaaatccctggaaatttggtggagaagaaggttcagttcaacactccctacgtgttcgatgatatgctcaaaccgctggtcgtcgtcgttcttgcaaaaaaaaatcaagtcggatcaggatgtgtatgattaaatgggtgttataaaacgcagagga

SEQ ID NO: 72170 - DNA, 2907 bp, Zea Mays
cgtttgcccaccccataaactgtagaactttgaagtcctcaagtacaaaaactacccccaaaccatattggcacccttgcataaaccaaatttacaaatatgtccctcatctctcgaagccgccgcctcctgccatcctgcgactgcgactgcgagtggccgttgctgctcccactcccacagttcgaccgcgccaccgtttcacccccttcctcctcctccgccaccacagtgccacgccactcctaaccctaattctcgggagcctaaccctagcctcaagatccgttcgcctcatgcctctcccttcccgccggcgccgcaggctgagctgagccggaccggcaattccagtcgacgggcgccgttgctgtcgcagttacaacccgcgccatgggctgcgtctgcggccgcccctcctccttcgaggatggccagtgccgcgcgacgcctccgccggccgcgaagctctcggcggcggtgaggagggaggaggaggcgcggaagcagcagttgcagcttcagcagcatgcgagggcagggagtgggagggaggaggcgctcgagaggaggcgggcgatgatggcgatggcagcggcgtgccaggtgaggagccccgtgccgagggcggttgaggcggagcaggtggccgtggggtggccgccttggctcgtcgccgtcgctccggaggccgtgcgcggatgggtgccacgccgcgccgagtctttcgagaagctcgacaaggagaagattgttgctttgaagaaagtgcggtttgataatttggaaccagagagcgtgaaatttatggcaagggaaattctcattttgcgtcgccttgatcatccaaatgttatcaagctagaggggctagtaacatcaaggatgtcctgcagcttatatctggtttttgagtacatggaacatgatctagctggactagcatctttccgtggagtaaagtttaccgagtctcaggtaaagtgttacatgcaacagctcctccgtggtcttgagcattgccacagtcgtcacattctgcaccgtgacattaagggttcaaatctcttgattgataaccgaggcatattgaagatagcagattttggattggcaagcttctttgatcctgaacaacgacagcctttgactagccgtgttgtcacactatggtacaggccaccagagctcttgctcggtgccaccaattatggtgttgccgtagacctctggagtgctggctgcattcttgccgagctatatgctggcaagcctatcatgcccggcagaacagaggttgagcagttgcataaaatatttaaactttgtggttcaccgtcagaggattattggaggaaatctaagcttccccatgccaccattttcaaaccgcaacacccgtatgcaaggcgtgtagcagaaacattcaaagagttccctgctcctactctggcattagtagatgttcttctttcagtagacccagcagaccgtggaaccgcatcttatgcattgcaaagtgagttttttacaacaaaaccatatgcttgcaatccttcaagcttgcctaggtaccctccaagcaaagagtttgatgcaaaacgtcgggaggaggaagctcgaaggcaaggtgttactggaggaaagcagcataaacatgatcctgaaaggagaactagagaatcaagagcagtccctgcccctgatgcaaatgcagaattagtgtcatcattgcagaaaaggcgagcccaagctaataccaggagcaggagtgagatgttcaatccctgcaaagaagactccgcgtccggattccgaattgaaccaccccgtccgactcctggtaccgagtcttccgaagacccgcaacatgcctacccgaccaggatctttcattctgggcctttagttaatcagagtcagccatcaaaggctggaggtggcaaaaatgatgaacttcaggtccctggtgttgcgaaccaccctgtggttgtgtcatctagaacaggtccccgagcagatgatagtagttggacaatggttgctcaagctggagcattttctcatgggcggaggctgtcggaatccatcaatgagcatctcagtaacagtgggaagtacgatcaagtgttcccgaagaaggatgacaggaacactattagggctgatggagctattggctacggatccaagggcaacaagatccaccattctgggcccctgacctgcccttcgggcagcgtcgtcgacgagatgctaaaagagaacgaccggcaaatccaagaagtcttccggcgaacccgggtggagaagtcgagagcgaggagggaccatggacatcaccagggcggcatgaggcccgccgattttggcgccatcccggtcttcccttccagccgctccagttatcaggccgtgcaacagtgaggcgctctccaacaagatcggttggagttggaaccttttgttcggtcctgtgctggtttcgggtggtgggacgctatgctatgctatgccatgctatgtacagggtgggagaagcagagggtgtgaaggtgagggggaggtgatttgtttattggcggagtgtctcggtgaccagagtgagtcatgtatcatcaggtgggctttggttgaagtgtttgctcgccgagcctgaaactgaaacccttcttcactgtgatttcaccaaatctcagacctgggagctttgttgaagcagctgttcttgtaaccttgttggggtgcatatagaacaagtcttagtctggtagctttgtagtaggtacatatgctgaccttttcgacgagatgctcagtgactgggaccaaggggatcctccattttcagctgtttggagcgctggaagcggaaagctgagttcatgcgccgcccgcggaaattat

SEQ ID NO: 72171 - DNA, 3242 bp, Zea Mays
ccaaatttacaaatatgtccctcatctctcgaagccgccgcctcctgccatcctgcgactgcgactgcgagtggccgttgctgctcccactcccacagttcgaccgcgccaccgtttcacccccttcctcctcctccgccaccacagtgccacgccactcctaaccctaattctcgggagcctaaccctagcctcaagatccgttcgcctcatgcctctcccttcccgccggcgccgcaggctgagctgagccggaccggcaattccagtcgacgggcgccgttgctgtcgcagttacaacccgcgccatgggctgcgtctgcggccgcccctcctccttcgaggatggccagtgccgcgcgacgcctccgccggccgcgaagctctcggcggcggtgaggagggaggaggaggcgcggaagcagcagttgcagcttcagcagcatgcgagggcagggagtgggagggaggaggcgctcgagaggaggcgggcgatgatggcgatggcagcggcgtgccaggtgaggagccccgtgccgagggcggttgaggcggagcaggtggccgtggggtggccgccttggctcgtcgccgtcgctccggaggccgtgcgcggatgggtgccacgccgcgccgagtctttcgagaagctcgacaagattggtcagggtacatatagtaatgtttacagagcccgtgatcttgaaaaggagaagattgttgctttgaagaaagtgcggtttgataatttggaaccagagagcgtgaaatttatggcaagggaaattctcattttgcgtcgccttgatcatccaaatgttatcaagctagaggggctagtaacatcaaggatgtcctgcagcttatatctggtttttgagtacatggaacatgatctagctggactagcatctttccgtggagtaaagtttaccgagtctcaggtaaagtgttacatgcaacagctcctccgtggtcttgagcattgccacagtcgtcacattctgcaccgtgacattaagggttcaaatctcttgattgataaccgaggcatattgaagatagcagattttggattggcaagcttctttgatcctgaacaacgacagcctttgactagccgtgttgtcacactatggtacaggccaccagagctcttgctcggtgccaccaattatggtgttgccgtagacctctggagtgctggctgcattcttgccgagctatatgctggcaagcctatcatgcccggcagaacagaggttgagcagttgcataaaatatttaaactttgtggttcaccgtcagaggattattggaggaaatctaagcttccccatgccaccattttcaaaccgcaacacccgtatgcaaggcgtgtagcagaaacattcaaagagttccctgctcctactctggcattagtagatgttcttctttcagtagacccagcagaccgtggaaccgcatcttatgcattgcaaagtgaggtatacaaaaaattccctattaaacctttctctagctgtccagcaatacaaggcatttgtcttgtgttttcaaacgggccatgtttttttttgagacgtgctgtttcaatgctcattttgtttgcaccactcgaaatattggcaaaatgaacttattttgtgcttaccagtcagtctatacttgatagcctggcaatcaggaagtagtgtgtagcgccatacatttctatgtcatgctaatcttattggagtagccggttttatccttctattatcaagtaatatgcccaaaagtgatacaatgtttcctttctgtttcattcctcctgtcttaaataattaactctgaacttactgttgtgtctgtagttttttacaacaaaaccatatgcttgcaatccttcaagcttgcctaggtaccctccaagcaaagagtttgatgcaaaacgtcgggaggaggaagctcgaaggcaaggtgttactggaggaaagcagcataaacatgatcctgaaaggagaactagagaatcaagagcagtccctgcccctgatgcaaatgcagaattagtgtcatcattgcagaaaaggcgagcccaagctaataccaggagcaggagtgagatgttcaatccctgcaaagaagactccgcgtccggattccgaattgaaccaccccgtccgactcctggtaccgagtcttccgaagacccgcaacatgcctacccgaccaggatctttcattctgggcctttagttaatcagagtcagccatcaaaggctggaggtggcaaaaatgatgaacttcaggtccctggtgttgcgaaccaccctgtggttgtgtcatctagaacaggtccccgagcagatgatagtagttggacaatggttgctcaagctggagcattttctcatgggcggaggctgtcggaatccatcaatgagcatctcagtaacagtgggaagtacgatcaagtgttcccgaagaaggatgacaggaacactattagggctgatggagctattggctacggatccaagggcaacaagatccaccattctgggcccctgacctgcccttcgggcagcgtcgtcgacgagatgctaaaagagaacgaccggcaaatccaagaagtcttccggcgaacccgggtggagaagtcgagagcgaggagggaccatggacatcaccagggcggcatgaggcccgccgattttggcgccatcccggtcttcccttccagccgctccagttatcaggccgtgcaacagtgaggcgctctccaacaagatcggttggagttggaaccttttgttcggtcctgtgctggtttcgggtggtgggacgctatgctatgctatgccatgctatgtacagggtgggagaagcagagggtgtgaaggtgagggggaggtgatttgtttattggcggagtgtctcggtgaccagagtgagtcatgtatcatcaggtgggctttggttgaagtgtttgctcgccgagcctgaaactgaaacccttcttcactgtgatttcaccaaatctcagacctgggagctttgttgaagcagctgttcttgtaaccttgttggggtgcatatagaacaagtcttagtctggtagctttgtagtaggtacatatgctgaccttttcgacgagatgctcagtgactgggaccaaggggatcctccattttcagctgtttggagcgctggaagcggaaagctgagttcatgcgccgcccgcggaaattat

SEQ ID NO: 72172 - DNA, 2260 bp, Zea Mays
ccattttgctctcgcttttcgcctgcactggaatctcagaacagtgattggtcagggtacatatagtaatgtttacagagcccgtgatcttgaaaaggagaagattgttgctttgaagaaagtgcggtttgataatttggaaccagagagcgtgaaatttatggcaagggaaattctcattttgcgtcgccttgatcatccaaatgttatcaagctagaggggctagtaacatcaaggatgtcctgcagcttatatctggtttttgagtacatggaacatgatctagctggactagcatctttccgtggagtaaagtttaccgagtctcaggtaaagtgttacatgcaacagctcctccgtggtcttgagcattgccacagtcgtcacattctgcaccgtgacattaagggttcaaatctcttgattgataaccgaggcatattgaagatagcagattttggattggcaagcttctttgatcctgaacaacgacagcctttgactagccgtgttgtcacactatggtacaggccaccagagctcttgctcggtgccaccaattatggtgttgccgtagacctctggagtgctggctgcattcttgccgagctatatgctggcaagcctatcatgcccggcagaacagaggttgagcagttgcataaaatatttaaactttgtggttcaccgtcagaggattattggaggaaatctaagcttccccatgccaccattttcaaaccgcaacacccgtatgcaaggcgtgtagcagaaacattcaaagagttccctgctcctactctggcattagtagatgttcttctttcagtagacccagcagaccgtggaaccgcatcttatgcattgcaaagtgagttttttacaacaaaaccatatgcttgcaatccttcaagcttgcctaggtaccctccaagcaaagagtttgatgcaaaacgtcgggaggaggaagctcgaaggcaaggtgttactggaggaaagcagcataaacatgatcctgaaaggagaactagagaatcaagagcagtccctgcccctgatgcaaatgcagaattagtgtcatcattgcagaaaaggcgagcccaagctaataccaggagcaggagtgagatgttcaatccctgcaaagaagactccgcgtccggattccgaattgaaccaccccgtccgactcctggtaccgagtcttccgaagacccgcaacatgcctacccgaccaggatctttcattctgggcctttagttaatcagagtcagccatcaaaggctggaggtggcaaaaatgatgaacttcaggtccctggtgttgcgaaccaccctgtggttgtgtcatctagaacaggtccccgagcagatgatagtagttggacaatggttgctcaagctggagcattttctcatgggcggaggctgtcggaatccatcaatgagcatctcagtaacagtgggaagtacgatcaagtgttcccgaagaaggatgacaggaacactattagggctgatggagctattggctacggatccaagggcaacaagatccaccattctgggcccctgacctgcccttcgggcagcgtcgtcgacgagatgctaaaagagaacgaccggcaaatccaagaagtcttccggcgaacccgggtggagaagtcgagagcgaggagggaccatggacatcaccagggcggcatgaggcccgccgattttggcgccatcccggtcttcccttccagccgctccagttatcaggccgtgcaacagtgaggcgctctccaacaagatcggttggagttggaaccttttgttcggtcctgtgctggtttcgggtggtgggacgctatgctatgctatgccatgctatgtacagggtgggagaagcagagggtgtgaaggtgagggggaggtgatttgtttattggcggagtgtctcggtgaccagagtgagtcatgtatcatcaggtgggctttggttgaagtgtttgctcgccgagcctgaaactgaaacccttcttcactgtgatttcaccaaatctcagacctgggagctttgttgaagcagctgttcttgtaaccttgttggggtgcatatagaacaagtcttagtctggtagctttgtagtaggtacatatgctgaccttttcgacgagatgctcagtgactgggaccaaggggatcctccattttcagctgtttggagcgctggaagcggaaagctgagttcatgcgccgcccgcggaaattat

SEQ ID NO: 72173 - DNA, 2369 bp, Zea Mays
tgaatctttataccatgtccatattttatcataaaaattaccatatccatcaaattacagcagcccaggtggcaggacaatcatataaaacagatatttacagcacataatacacaatcaaatccaacaaaatcggttctttgtttacatcatgtcaatgtgcatgtgtggtggttagtgaagagcacggcagaaattgcatgttgaactcaacttcgtgttcattaactctataaagctccagcctgatgggtgatggcccaaactctgtaaaactgaatatgccccaaactcttcactaggcgaacaagcatcagcaaggtcacgacaccaaacggtagtgccagctctcaccaggcagagaagataagccaccagtggacgactcgagcttctgaagatggcaaaacaaaaagacctaggaaatttatgcacaatccaaagaaacacacatgctgtcaacaaaaaattgttgttttattccaagatgtacgagttcagacacttttcaaaggtgtaaggtatgcaaattcgattcactttgttaaaagtcgcctcacatcgcataaatgatttgagcttcttaaagagctttggtgctacctgcagaggcatgtttcatagaaaatttgttatttctagcttgacaatgacaaatggtgaagtgcaagctggaattaagtacttatacttacacatttgtcgatgcatgaccagtaatcaaaatattacccaatgcagttttggtgaccagtatcatcattctcaactctcttgacacatttctaaaaaaacagatccaccattaaaggttgaacacaaatactcatgtgcgtggcagagttgtcgatgttcgccgatggaatatcatgaccacgcgacaacaaaacgatggcgctacgaccccatttgtctcgcgcctgtgcaacttaaacagctagcgcgtaaacaggtaacacaaaagcagtcaatgaaaagcacttcataaaaagaaggtcgaccagatgcacttaaacagctagcgcgtaaacatgtagcaagaaacgagaagtaatctaaaaatatatatttaagtcatggaatgagtcactgaaatgatttaagtgctactgctatgagtacattgcatgaaaaaagcaagtgcagatctgaatataactctctacaatgtgatttaagtctgtgattcttttaagtgctgatctgagtataccaataataaaaaaacttagcaatatagcactgatctgaatataccaataatcaagaaaaacttgtgtgctactgctatgtttcctctctcttagtaatgaaacaacatgcatgtagccctgtacaataatcaagacaaaatataactcactatcttgaggttttacacaagttacatgctagaggggagctcgtatagaagaatgcatccacatctacataaacatctacatacatatctacatacacttttataagattgtcggtcaaataaagaatgcaggtagttatggaatgtcacattttaaaaagatagcctattccattacttagatttcaattctcaaagtgaagggaaacagacggtccctaagacattattcgataattagtagttataaaattatagaaaatatgacaacttctcagtatgcatgtataccaaaagagttttaatggaggacaatttcaaccctatgtatgtgaaggcacaataattaaatcatgaaggaaaaagaccattttttccttttttgtgcatgtggctacccaccagtgttgtccactcatgctggttcacgaaagggttccagatggtgttgccagcaagacaaatattataaaaatatgccaaaatgaaatctaatccaatcaacatattgcgatgaggagaggaagaacatgtcgtgtgcttaagtataatctacatacttgacactgaacctaacccaagtgttggaagcaggcacagctcacaccacacatagcttataatttagggacatgggaaaaaagacaggtactgaagcaaagcagaggtgagagacaatctacgacatttcatggtgtcaaaagagaccatatcttccagtaaaaaaagaacaagctttcaattttcaatgaaaaggaaaacatggggtccatgcacaaatacactactactaacctgttattgtagatgcatgcatagaactacactgactgttcgcgtagtgacccattaagtctaacaacacctcgagggcagtaattgggtgccattttctgcacctgttgcgagatcatgtgtatgcacctcaggggcatcgtcaggatcatcaaattgataatgtatggatagaaagaaaaacaacagaaatagctagaacaaaagatat

SEQ ID NO: 72174 - DNA, 966 bp, Zea Mays
agagaaaaaggaacagggaaaacaaaataaaaaagtgtgatgtgggaattcttaaaataaaacctaagtaatgattaaacatgaaaaaagacactctatgaagtcatggagacataatacaacagaaaaaaacttcatacagctgcaagcttgaccctaacatgaaaaacattaacttgttaccaggtacttgttgtcttaaaattttaattctatgcattctgaaataactcatatttgtacttattgtcttaaaattttaattccatgtattctgaaatagctcatgttttgtcaataagtaattaaatatagtagtcatcgaatcatactatgaacaacaaaacatcaattaccatggcggcatacattgtctaaagtaaagttgctccacagatagagctaaaagtttaattgtgtgattgtatctaaatatcttgtccatatacattaaaatcaatcttatcgttgcacaaaacagaagacatgaatgataaatttatggcatccaacaatagattataatagcattggcatcctgcaggtatcaagctgggccaaatctagctttgatgaaaacaggatagtcttttgtactggcacaaccaaaaataataatattggtcaatggaaacctggtctgatatccctattttttcaattacatagtgtagcggtcacctcctacttatgtacagtagggataactcagacatataaacccacaaagctatatgggaataaataaagcattcagttgtactggtgaatggacacacccacaattgttgaacctgtccaatttgtcaaatttcttttgttgtattaacaatgaatcatattgtgaataagaaaaatgaagtttgtacgtggagctccctaccacttatgggacgacgagagcaacctctatccttgttagttcatttactctaatgccattctctagtaggagctgcaaaatcc

SEQ ID NO: 72175 - DNA, 1429 bp, Zea Mays
ggtcatgctcctattctcgttgccccactcatcggcgttgatgtcgaggacgtcacaggacctgtggcagacctccttgcccttggccgacagtgccatctacaatggcttcctggggggaggagacgaagcatcacgcctggcgcggtggcgaggggagatggaggatgagtccctccccttgtttcgcatcagaccaaagaggatttagtgagccccaaccttcctctagcagagcagtctcccaatgcaataattcctagtactgccgtaaaaaaatattacaatggcaatggcaattggcaagggttggaaatagattacctgtgtggccagcaatacatggatttctgctcagtttgaattctctacaactcgcacataacaacaagtgtgataagttaaaaaacacaatgtgtcatattaggaacgtaagttatcattgcagcttcctttttattagaaactgctcacatgctactgatcatccaatatattgtacatcaaaaaaaggtaatgctactgatcataagtaaagttattccaataagtgatcttggtgtcggccaaaattagtacgttctgttttttcgaagacaaggataaacaagaatgttgttaaacacatgattatgcatttgtttttggagaagaatcatgtaacataccaatcaaaagagagacaatatgaagcctaaccaattccttaccttttaaagatggacacattctggtcattggattgaggtccttaccttttaacataccatgagctaactaacaagaaaaaatgtgcctcggtcattgagacgttcccctccatttgccaagactaatttctaagtcccctttcctttcctcattgaattaatagagagaagatctgcatatggtgcgttggtgatgtcctccaagcttgttaacattggattgaggtgaggtgttttgaacctaaacaaatccacgaccgtcatgcacgacagagcatatctacgcagaaatggagaaagaaactaacctccgggatcgggcagaggagcacctagatgacgccaaaggagctggatgcgtcgagcgtggatggcggtgcgacatcacgctggtactatggagcgcgcgcccggtgcgttgagcaagcttgtcgtcgggcacgaccttcttggcgtcgtgaactcgacgagaggtcgtcgaagaaggcgacgtcgagggatgtgcgccccgctcggcacacttggcggcgggggcctacggctgcggcgtcggatcggcctgtggcggagccgctcctcggcgaggtggccctgtccatggagtcgtgcgccccgctcggtggacttgacggcggggcctgcgactgcaacattggcgagtcgccctcgaacggggaggtagccctgtccatggagtcgtgcgccccgcccgcgcggac

SEQ ID NO: 72176 - DNA, 1010 bp, Zea Mays
tcaacgtcagagctggacagtcaaatcggccttggtgttgacgccagaacagaaaaggtttagttgaacacttctgtactagagctggaccagggacattttggaccttcccagatgcaagaggggaaaaagtaaacatactatcagtggcatagcagtgaggagccccaaatccactccaacgatggaggaaagcctgtgcgccgtggagaagcgcgggcgggtgcacgtcatcaccctcaccggcgcggaggagcaccgcctcagcccggccctgctctccgccctccgctccgcggtcgcagccgcccgccgcgccctcccccggtgcgctcgtcctggccggcgagggcaagttcttcagcaacggctacgacctcgcgtgggcgcgcgcggggccggccccggcgccggggcaccgcctctccgagatgcgcgccgcgttccgcggcctcgtcgccgacctgctcgcgctccccgtgccaacggtcgcggccgtcacgggccacgccgcgggcgccggctgcgcgctcgcgctggcgcacgacgccgtcgccatgcgcgcctcccgcgggttcctctacatgagcgaggtcgacgccgggatcaagatcgtcgattttgtcggcgagctggttcggcagaaggtccccgacgcggccgctaggagggacctggtgatgaagggggagaagatgacggccgcgcaggccgcgcgccgaggcatcgtggatgcggccgtggacggcggcgtggaggacgtcgtggccgcggcggtcgccatggctgaggagctcgcagccagagactgggatggagagaacctagccgccatcaggaaggacgcatggccggttttgtggagcaaggtcaaggactacggcggcgatgtgctggcgcggccgcgtctgtaattgcctgcttgcgaatttcggtcgtttctgttacttgccatttggtcgttatcaacaatctgaaagtaatgatctgtggccttgggaatgtgcaga

SEQ ID NO: 72177 - DNA, 532 bp, Zea Mays
tcaaggtccaagtatgtcttgacatcaaaaaataagtaccaccacacatctgcaaagagcttttcgaaaggaaaaaaacttccaaaacacacatctgcaaagaggacagagaagagcatcaagaatctgctgatgccttgaaagagatcgagatccggaacaaatccaatcgatgcggaataagcaatgctggcataaattaatagtgtgatcgtgtcagaatcttgattagtactagtattgctgccagtataaaatggtcatccctcgttctgtcgtgcatcatcctgtgcagctatagacatgatggtgatgcaattgatagtcactgataacaataccttgccactagatccgaattggcgtgtttataaagggacattcaagtttcttacctactttctgaagcacgagctgccaagcagcctttattcaagaagcaaagtaaaaaactgaaacgtggacgaactattccctttccgtactttacaatttgtttgccagcaactttcttcttgctggctgatcattc

SEQ ID NO: 72178 - DNA, 5065 bp, Zea Mays
aggaaagccaagcagcagccgcaccggcgcacgcacccacggccacgacccacctgcgggcggcgctcaacccgagtggatgtggacggagccgcccgcaggccgcacgacagacagagatagagagagagcacaggcggccacgcccgctcctaccaccgcaccgcatcgccacttacccctcgtgccgccgcgctgccttttcctccccgcgtccctttcgtccctcaccttgtcggagaccgacgcaccccccctctccgctctccgctcctcctccccacaccccaccccacccgctctccagtccacctcacgctcacactcccgcagcccgcccgccagccgccatcctgctgccacctctttcttccttgcgggggcggcaaccaggcgcacggcacctgctccctcccactcccactcccacaccgcgccagccaccagaataaagcagccgttgcggcgtcgcgtcggcgagcacagcgcagcgcagcgcgcagcggcccgggtgcatgaggagggggcggcggctgccgaggccgaggctgtgacgaaggagcgcggagggcgatgccgctggtcaggttcgaggtgcggaatgaggtggggctgggggaccccggcctctacggcggcggagctgccgctgccgccgccgccaccgccgccgcgggggaggaggagcccaaggcgctgctcgagggcgtcgccgtcgcgggcctcgtcgggatcctgcgccagctcggagatctcgcggactttggtcataccagattcgcggctgatgttttccatgacctacacgagcaagttatagctacatctgctaggggtcgcaaggtgctgactcgagtacagaacatcgaagcagcacttccatctctcgaaaaggctgtgaagaatcagaagagtcacatacattttgcctatgttccgggctctgattggcacactcagcttcaaaatgagcaaaatcacctgctagcgactgatctgcctcgttttatgatggattcgtatgaagaatgccgagatccgccacggctttaccttcttgataaatttgacaatgctggtgcgggggcttgtgtaaagagatattctgatccatcttatttcaagaaagcatgggatacgatgagagcagataagaatgctaatgtacaaagagaaaagagatcacagaaaattaagagaaaaggatcacgactaagggaaccatatcatggacaagccatgcctaggcataggggcactgaatttcagcgatcacttactgctggccaacttgttaacaggcagtttgcatctcccagcaacgatggtcagggtatctcagagcataagtctacacctgatgcaagatctaatcctgacaatatgagcagatcttcttctcttagttcgaagacacaactgagttcagtagaacaagctatcgatacaaaaccttctgcagtttctcatgagaatggccatgggaagtcattggatactaagttgcacaagcctggtggtctgccttcgcccgtactgcttaacagcaccactgtggatgatcatagtgaccatttgaagcaaggttccccgccagatggtatggttgctagatcaccttatgttaaatgggatgaaaagactgcaattatcatgtctacaagttctatctactgtgacgatgttgttatggatgaggttgaagatgcagaacctacttgtattagctctgtgcagaaagaaactgaccataaggtaatggatacattgcaccagcaagatgccttacttaaaaagacaaaatcactgttagtgccatcagtcttgaaccaccatgatgacattccaggagaagccgacaactacatggatgcacttaatacacttgaatctgagacagaaacagaatctgaatttcaaactaaaaatcgggtgccagcaccttccttcaaagctgaagcccctcaagtgggggcaattgacaatattgttccacagtgtcttgattcctctgctgctgactttattgacacatgtcaagaatctgatattatttgtacttctgaaagagcaattgattttcccagtttgtcaaatgcagattctcttgaggtttcacaactagaactttcagattatacgtctgtaagcccctataaagagtcatctgtcatcactaatatccacgagagtggtgcagagggtgctcgtggagatccttgtgagattatagagcctctgcaggtccattcagccatacttgccaatgatggttcccctgtttgcaatgaaataccaaagagtaagccagatgatgatcttgggtattttcaagagattcctcaaccaggtttctccacctgtatggttattccatcaaacaaagagtctgctgttgccaacaaaaaccttgaaggtgacgcaaaaagtgatgatgatcttattgatggtaccgctgataatgttgtatcgggacctaagattgccaacatggtagttgatgaggtgggtttcaagatggcacctgctaatagaagttcacctggtgacccctctgatgactcatgtgtcattcctgaaagtaggcctcaggattatgctgtaaagagctatgagggagttggtgattgtggtgtgactgaagtgtctaagttatgtagtgagcctcttaacaaaccatcagataatatatgtgcaactcaagatgttcctacaaatacctctactatgtctgctggtgccagtgaagtgtctagttcgtggagtgagcctgttaccgaactaatcgatgacagatgtgcaactcaaggtgttccagcaaatgcctctaccacgtctactgttgtaccatctgttaaactctggacaaatgctgggctctttggacttgaaccatccaaacctccagtatttggtaatggtccaagggaggatactccacctggttttaaagaagctcaaccagtccattcaactgaattcacagaagtgcactgttcaaagccaactgaatcagcagctgtagatgtcccaaatggaaacacatccattaccagcagctttgtggaaaagcttgttggtattcgtcctggttctgcaaacctcaatagctcaggggcaaatcaatcagcagccagaatacctgatccaattcatagtcatacagatgggcactcagatttttcgtcatcctttgagcacaataacatgactggcaaacatacttcaataagcgaacttctagaatttgaggggagtgctgatactggcaccaaaatatactcaactgacatgagaaataacgctgtgtctgcatcaagcttttcaagcattgcacaaaggtttcttgctaatacacttcagagaagaacttccaaatatactgatcttcctatgtcttctgagagggcaaatgctgatacaagtgcaaaatctgaatctactctaaatcctgttgtagaaccaagtgaagcggtatttgcagaggaaactaagtttgagaacaaaacagaaaatggaatggatggattgtccaaaacatcaatattttctagccgccattactctgagaaatcgtctccgccacttgagtacatgaaaatatcttttcaccctatgagcgcatttgagatgtcaaagctgaacctagatttctgtgatggaaatattcatgaaatttctgatgatatgatgttaccgacatttcagttactttcagagtcttccattccacagccaggcagtggttctgagtctgaagatgacacctttggtaggtcatatagttattcttcatatgatgatctgagtccccggctatattcaaactctgaggcatgggatcaagatgatggaactggactggaggaacatgagttatatgatgattcaaatcagataggatcctcaacagcacctttatctagctacatgggattcgagcagatgaacttatctgacatgaagtcagatatttcacttgcaaacattggggatcagaatgtaataggcactttacaatcctgtactgttgaagaacttccaaactttgatacattgatgtccagaagtgatgatcaaaatggtgaaacccccattccacataatctggggaatatgacaccagatgaagatcagttgccaccaccacctcctctccccccaatgcagtggaggatgacaagacaaacaacttcactagaagaggaaacttgcattacaactaaagatatgcttagaaaaacttctagcctaccacatatacacacctctgcccaggaagaacactgtcctccaactgcaccattggatctacaagggcatgctggggaagtgggtgtccagaaaactggtggggtacgagaaattactaatcctcctagtatcatcgatataaaatcaagtttgcttcagcagatcagggataagctgaagcttaatggacatgaaaggtcaaaaaaagcagtaggcggtgacattaaaagcttagacgaaagggaggagttgcttcagcaaatcaggagcaagaccttcaatttaagacgcacaaacgcatctaaggcagatggctcatcacaatctacagccagttccaacgttgcagcaattttggagaaagccaacgctatccggcaggctgtggccagtgatgagggtggcgatgatgatacatggagtgatatatgaccacctaattgcagacgttcatggtagtcttttcctgtatattaagctattacaagatgaagtgattaaatgtgaataccatccttttcttcattgtaattagattttgcaggtcttgttttgtaccttccttagttcatattagtgaatcctaccgtaggtcgctgtggtcgtggaaatgtcagagcatttccacattatgtaaatgcatctttattatttatttatgatagtgagaacagctgaatagctgataaaaataagcatactaatctatctttttatcattgtattgattttttttgcaatgataataagatggagcatgatgttgcaaaaggttgtccttttagctgctatcaagtaaaatatttctaaa

SEQ ID NO: 72179 - DNA, 5059 bp, Zea Mays
aggaaagccaagcagcagccgcaccggcgcacgcacccacggccacgacccacctgcgggcggcgctcaacccgagtggatgtggacggagccgcccgcaggccgcacgacagacagagatagagagagagcacaggcggccacgcccgctcctaccaccgcaccgcatcgccacttacccctcgtgccgccgcgctgccttttcctccccgcgtccctttcgtccctcaccttgtcggagaccgacgcaccccccctctccgctctccgctcctcctccccacaccccaccccacccgctctccagtccacctcacgctcacactcccgcagcccgcccgccagccgccatcctgctgccacctctttcttccttgcgggggcggcaaccaggcgcacggcacctgctccctcccactcccactcccacaccgcgccagccaccagaataaagcagccgttgcggcgtcgcgtcggcgagcacagcgcagcgcagcgcgcagcggcccgggtgcatgaggagggggcggcggctgccgaggccgaggctgtgacgaaggagcgcggagggcgatgccgctggtcaggttcgaggtgcggaatgaggtggggctgggggaccccggcctctacggcggcggagctgccgctgccgccgccgccaccgccgccgcgggggaggaggagcccaaggcgctgctcgagggcgtcgccgtcgcgggcctcgtcgggatcctgcgccagctcggagatctcgcggaattcgcggctgatgttttccatgacctacacgagcaagttatagctacatctgctaggggtcgcaaggtgctgactcgagtacagaacatcgaagcagcacttccatctctcgaaaaggctgtgaagaatcagaagagtcacatacattttgcctatgttccgggctctgattggcacactcagcttcaaaatgagcaaaatcacctgctagcgactgatctgcctcgttttatgatggattcgtatgaagaatgccgagatccgccacggctttaccttcttgataaatttgacaatgctggtgcgggggcttgtgtaaagagatattctgatccatcttatttcaagaaagcatgggatacgatgagagcagataagaatgctaatgtacaaagagaaaagagatcacagaaaattaagagaaaaggatcacgactaagggaaccatatcatggacaagccatgcctaggcataggggcactgaatttcagcgatcacttactgctggccaacttgttaacaggcagtttgcatctcccagcaacgatggtcagggtatctcagagcataagtctacacctgatgcaagatctaatcctgacaatatgagcagatcttcttctcttagttcgaagacacaactgagttcagtagaacaagctatcgatacaaaaccttctgcagtttctcatgagaatggccatgggaagtcattggatactaagttgcacaagcctggtggtctgccttcgcccgtactgcttaacagcaccactgtggatgatcatagtgaccatttgaagcaaggttccccgccagatggtatggttgctagatcaccttatgttaaatgggatgaaaagactgcaattatcatgtctacaagttctatctactgtgacgatgttgttatggatgaggttgaagatgcagaacctacttgtattagctctgtgcagaaagaaactgaccataaggtaatggatacattgcaccagcaagatgccttacttaaaaagacaaaatcactgttagtgccatcagtcttgaaccaccatgatgacattccaggagaagccgacaactacatggatgcacttaatacacttgaatctgagacagaaacagaatctgaatttcaaactaaaaatcgggtgccagcaccttccttcaaagctgaagcccctcaagtgggggcaattgacaatattgttccacagtgtcttgattcctctgctgctgactttattgacacatgtcaagaatctgatattatttgtacttctgaaagagcaattgattttcccagtttgtcaaatgcagattctcttgaggtttcacaactagaactttcagattatacgtctgtaagcccctataaagagtcatctgtcatcactaatatccacgagagtggtgcagagggtgctcgtggagatccttgtgagattatagagcctctgcaggtccattcagccatacttgccaatgatggttcccctgtttgcaatgaaataccaaagagtaagccagatgatgatcttgggtattttcaagagattcctcaaccaggtttctccacctgtatggttattccatcaaacaaagagtctgctgttgccaacaaaaaccttgaaggtgacgcaaaaagtgatgatgatcttattgatggtaccgctgataatgttgtatcgggacctaagattgccaacatggtagttgatgaggtgggtttcaagatggcacctgctaatagaagttcacctggtgacccctctgatgactcatgtgtcattcctgaaagtaggcctcaggattatgctgtaaagagctatgagggagttggtgattgtggtgtgactgaagtgtctaagttatgtagtgagcctcttaacaaaccatcagataatatatgtgcaactcaagatgttcctacaaatacctctactatgtctgctggtgccagtgaagtgtctagttcgtggagtgagcctgttaccgaactaatcgatgacagatgtgcaactcaaggtgttccagcaaatgcctctaccacgtctactgttgtaccatctgttaaactctggacaaatgctgggctctttggacttgaaccatccaaacctccagtatttggtaatggtccaagggaggatactccacctggttttaaagaagctcaaccagtccattcaactgaattcacagaagtgcactgttcaaagccaactgaatcagcagctgtagatgtcccaaatggaaacacatccattaccagcagctttgtggaaaagcttgttggtattcgtcctggttctgcaaacctcaatagctcaggggcaaatcaatcagcagccagaatacctgatccaattcatagtcatacagatgggcactcagatttttcgtcatcctttgagcacaataacatgactggcaaacatacttcaataagcgaacttctagaatttgaggggagtgctgatactggcaccaaaatatactcaactgacatgagaaataacgctgtgtctgcatcaagcttttcaagcattgcacaaaggtttcttgctaatacacttcagagaagaacttccaaatatactgatcttcctatgtcttctgagagggcaaatgctgatacaagtgcaaaatctgaatctactctaaatcctgttgtagaaccaagtgaagcggtatttgcagaggaaactaagtttgagaacaaaacagaaaatggaatggatggattgtccaaaacatcaatattttctagccgccattactctgagaaatcgtctccgccacttgagtacatgaaaatatcttttcaccctatgagcgcatttgagatgtcaaagctgaacctagatttctgtgatggaaatattcatgaaatttctgatgatatgatgttaccgacatttcagttactttcagagtcttccattccacagccaggcagtggttctgagtctgaagatgacacctttggtaggtcatatagttattcttcatatgatgatctgagtccccggctatattcaaactctgaggcatgggatcaagatgatggaactggactggaggaacatgagttatatgatgattcaaatcagataggatcctcaacagcacctttatctagctacatgggattcgagcagatgaacttatctgacatgaagtcagatatttcacttgcaaacattggggatcagaatgtaataggcactttacaatcctgtactgttgaagaacttccaaactttgatacattgatgtccagaagtgatgatcaaaatggtgaaacccccattccacataatctggggaatatgacaccagatgaagatcagttgccaccaccacctcctctccccccaatgcagtggaggatgacaagacaaacaacttcactagaagaggaaacttgcattacaactaaagatatgcttagaaaaacttctagcctaccacatatacacacctctgcccaggaagaacactgtcctccaactgcaccattggatctacaagggcatgctggggaagtgggtgtccagaaaactggtggggtacgagaaattactaatcctcctagtatcatcgatataaaatcaagtttgcttcagcagatcagggataagtcagagcagctgaagcttaatggacatgaaaggtcaaaaaaagcagtaggcggtgacattaaaagcttagacgaaagggaggagttgcttcagcaaatcaggagcaagaccttcaatttaagacgcacaaacgcatctaaggcagatggctcatcacaatctacagccagttccaacgttgcagcaattttggagaaagccaacgctatccggcaggctgtggccagtgatgagggtggcgatgatgatacatggagtgatatatgaccacctaattgcagacgttcatggtagtcttttcctgtatattaagctattacaagatgaagtgattaaatgtgaataccatccttttcttcattgtaattagattttgcaggtcttgttttgtaccttccttagttcatattagtgaatcctaccgtaggtcgctgtggtcgtggaaatgtcagagcatttccacattatgtaaatgcatctttattatttatttatgatagtgagaacagctgaatagctgataaaaataagcatactaatctatctttttatcattgtattgattttttttgcaatgataataagatggagcatgatgttgcaaaaggttgtccttttagctgctatcaagtaaaatatttctaaa

SEQ ID NO: 72180 - DNA, 4889 bp, Zea Mays
gccgcccgcaggccgcacgacagacagagatagagagagagcacaggcggccacgcccgctcctaccaccgcaccgcatcgccacttacccctcgtgccgccgcgctgccttttcctccccgcgtccctttcgtccctcaccttgtcggagaccgacgcaccccccctctccgctctccgctcctcctccccacaccccaccccacccgctctccagtccacctcacgctcacactcccgcagcccgcccgccagccgccatcctgctgccacctctttcttccttgcgggggcggcaaccaggcgcacggcacctgctccctcccactcccactcccacaccgcgccagccaccagaataaagcagccgttgcggcgtcgcgtcggcgagcacagcgcagcgcagcgcgcagcggcccgggtgcggaatgaggtggggctgggggaccccggcctctacggcggcggagctgccgctgccgccgccgccaccgccgccgcgggggaggaggagcccaaggcgctgctcgagggcgtcgccgtcgcgggcctcgtcgggatcctgcgccagctcggagatctcgcggaattcgcggctgatgttttccatgacctacacgagcaagttatagctacatctgctaggggtcgcaaggtgctgactcgagtacagaacatcgaagcagcacttccatctctcgaaaaggctgtgaagaatcagaagagtcacatacattttgcctatgttccgggctctgattggcacactcagcttcaaaatgagcaaaatcacctgctagcgactgatctgcctcgttttatgatggattcgtatgaagaatgccgagatccgccacggctttaccttcttgataaatttgacaatgctggtgcgggggcttgtgtaaagagatattctgatccatcttatttcaagaaagcatgggatacgatgagagcagataagaatgctaatgtacaaagagaaaagagatcacagaaaattaagagaaaaggatcacgactaagggaaccatatcatggacaagccatgcctaggcataggggcactgaatttcagcgatcacttactgctggccaacttgttaacagcaggcagtttgcatctcccagcaacgatggtcagggtatctcagagcataagtctacacctgatgcaagatctaatcctgacaatatgagcagatcttcttctcttagttcgaagacacaactgagttcagtagaacaagctatcgatacaaaaccttctgcagtttctcatgagaatggccatgggaagtcattggatactaagttgcacaagcctggtggtctgccttcgcccgtactgcttaacagcaccactgtggatgatcatagtgaccatttgaagcaaggttccccgccagatggtatggttgctagatcaccttatgttaaatgggatgaaaagactgcaattatcatgtctacaagttctatctactgtgacgatgttgttatggatgaggttgaagatgcagaacctacttgtattagctctgtgcagaaagaaactgaccataaggtaatggatacattgcaccagcaagatgccttacttaaaaagacaaaatcactgttagtgccatcagtcttgaaccaccatgatgacattccaggagaagccgacaactacatggatgcacttaatacacttgaatctgagacagaaacagaatctgaatttcaaactaaaaatcgggtgccagcaccttccttcaaagctgaagcccctcaagtgggggcaattgacaatattgttccacagtgtcttgattcctctgctgctgactttattgacacatgtcaagaatctgatattatttgtacttctgaaagagcaattgattttcccagtttgtcaaatgcagattctcttgaggtttcacaactagaactttcagattatacgtctgtaagcccctataaagagtcatctgtcatcactaatatccacgagagtggtgcagagggtgctcgtggagatccttgtgagattatagagcctctgcaggtccattcagccatacttgccaatgatggttcccctgtttgcaatgaaataccaaagagtaagccagatgatgatcttgggtattttcaagagattcctcaaccaggtttctccacctgtatggttattccatcaaacaaagagtctgctgttgccaacaaaaaccttgaaggtgacgcaaaaagtgatgatgatcttattgatggtaccgctgataatgttgtatcgggacctaagattgccaacatggtagttgatgaggtgggtttcaagatggcacctgctaatagaagttcacctggtgacccctctgatgactcatgtgtcattcctgaaagtaggcctcaggattatgctgtaaagagctatgagggagttggtgattgtggtgtgactgaagtgtctaagttatgtagtgagcctcttaacaaaccatcagataatatatgtgcaactcaagatgttcctacaaatacctctactatgtctgctggtgccagtgaagtgtctagttcgtggagtgagcctgttaccgaactaatcgatgacagatgtgcaactcaaggtgttccagcaaatgcctctaccacgtctactgttgtaccatctgttaaactctggacaaatgctgggctctttggacttgaaccatccaaacctccagtatttggtaatggtccaagggaggatactccacctggttttaaagaagctcaaccagtccattcaactgaattcacagaagtgcactgttcaaagccaactgaatcagcagctgtagatgtcccaaatggaaacacatccattaccagcagctttgtggaaaagcttgttggtattcgtcctggttctgcaaacctcaatagctcaggggcaaatcaatcagcagccagaatacctgatccaattcatagtcatacagatgggcactcagatttttcgtcatcctttgagcacaataacatgactggcaaacatacttcaataagcgaacttctagaatttgaggggagtgctgatactggcaccaaaatatactcaactgacatgagaaataacgctgtgtctgcatcaagcttttcaagcattgcacaaaggtttcttgctaatacacttcagagaagaacttccaaatatactgatcttcctatgtcttctgagagggcaaatgctgatacaagtgcaaaatctgaatctactctaaatcctgttgtagaaccaagtgaagcggtatttgcagaggaaactaagtttgagaacaaaacagaaaatggaatggatggattgtccaaaacatcaatattttctagccgccattactctgagaaatcgtctccgccacttgagtacatgaaaatatcttttcaccctatgagcgcatttgagatgtcaaagctgaacctagatttctgtgatggaaatattcatgaaatttctgatgatatgatgttaccgacatttcagttactttcagagtcttccattccacagccaggcagtggttctgagtctgaagatgacacctttggtaggtcatatagttattcttcatatgatgatctgagtccccggctatattcaaactctgaggcatgggatcaagatgatggaactggactggaggaacatgagttatatgatgattcaaatcagataggatcctcaacagcacctttatctagctacatgggattcgagcagatgaacttatctgacatgaagtcagatatttcacttgcaaacattggggatcagaatgtaataggcactttacaatcctgtactgttgaagaacttccaaactttgatacattgatgtccagaagtgatgatcaaaatggtgaaacccccattccacataatctggggaatatgacaccagatgaagatcagttgccaccaccacctcctctccccccaatgcagtggaggatgacaagacaaacaacttcactagaagaggaaacttgcattacaactaaagatatgcttagaaaaacttctagcctaccacatatacacacctctgcccaggaagaacactgtcctccaactgcaccattggatctacaagggcatgctggggaagtgggtgtccagaaaactggtggggtacgagaaattactaatcctcctagtatcatcgatataaaatcaagtttgcttcagcagatcagggataagtcagagcagctgaagcttaatggacatgaaaggtcaaaaaaagcagtaggcggtgacattaaaagcttagacgaaagggaggagttgcttcagcaaatcaggagcaagaccttcaatttaagacgcacaaacgcatctaaggcagatggctcatcacaatctacagccagttccaacgttgcagcaattttggagaaagccaacgctatccggcaggctgtggccagtgatgagggtggcgatgatgatacatggagtgatatatgaccacctaattgcagacgttcatggtagtcttttcctgtatattaagctattacaagatgaagtgattaaatgtgaataccatccttttcttcattgtaattagattttgcaggtcttgttttgtaccttccttagttcatattagtgaatcctaccgtaggtcgctgtggtcgtggaaatgtcagagcatttccacattatgtaaatgcatctttattatttatttatgatagtgagaacagctgaatagctgataaaaataagcatactaatctatctttttatcattgtattgattttttttgcaatgataataagatggagcatgatgttgcaaaaggttgtccttttagctgctatcaagtaaaatatttctaaa

SEQ ID NO: 72181 - DNA, 4836 bp, Zea Mays
accttgtcggagaccgacgcaccccccctctccgctctccgctcctcctccccacaccccaccccacccgctctccagtccacctcacgctcacactcccgcagcccgcccgccagccgccatcctgctgccacctctttcttccttgcgggggcggcaaccaggcgcacggcacctgctccctcccactcccactcccacaccgcgccagccaccagaataaagcagccgttgcggcgtcgcgtcggcgagcacagcgcagcgcagcgcgcagcggcccgggtgcatgaggagggggcggcggctgccgaggccgaggctgtgacgaaggagcgcggagggcgatgccgctggtcaggttcgaggtgcggaatgaggtggggctgggggaccccggcctctacggcggcggagctgccgctgccgccgccgccaccgccgccgcgggggaggaggagcccaaggcgctgctcgagggcgtcgccgtcgcgggcctcgtcgggatcctgcgccagctcggagatctcgcggactttggtcataccagattcgcggctgatgttttccatgacctacacgagcaagttatagctacatctgctaggggtcgcaaggtgctgactcgagtacagaacatcgaagcagcacttccatctctcgaaaaggctgtgaagaatcagaagagtcacatacattttgcctatgttccgggctctgattggcacactcagcttcaaaatgagcaaaatcacctgctagcgactgatctgcctcgttttatgatggattcgtatgaagaatgccgagatccgccacggctttaccttcttgataaatttgacaatgctggtgcgggggcttgtgtaaagagatattctgatccatcttatttcaagaaagcatgggatacgatgagagcagataagaatgctaatgtacaaagagaaaagagatcacagaaaattaagagaaaaggatcacgactaagggaaccatatcatggacaagccatgcctaggcataggggcactgaatttcagcgatcacttactgctggccaacttgttaacaggcagtttgcatctcccagcaacgatggtcagggtatctcagagcataagtctacacctgatgcaagatctaatcctgacaatatgagcagatcttcttctcttagttcgaagacacaactgagttcagtagaacaagctatcgatacaaaaccttctgcagtttctcatgagaatggccatgggaagtcattggatactaagttgcacaagcctggtggtctgccttcgcccgtactgcttaacagcaccactgtggatgatcatagtgaccatttgaagcaaggttccccgccagatggtatggttgctagatcaccttatgttaaatgggatgaaaagactgcaattatcatgtctacaagttctatctactgtgacgatgttgttatggatgaggttgaagatgcagaacctacttgtattagctctgtgcagaaagaaactgaccataaggtaatggatacattgcaccagcaagatgccttacttaaaaagacaaaatcactgttagtgccatcagtcttgaaccaccatgatgacattccaggagaagccgacaactacatggatgcacttaatacacttgaatctgagacagaaacagaatctgaatttcaaactaaaaatcgggtgccagcaccttccttcaaagctgaagcccctcaagtgggggcaattgacaatattgttccacagtgtcttgattcctctgctgctgactttattgacacatgtcaagaatctgatattatttgtacttctgaaagagcaattgattttcccagtttgtcaaatgcagattctcttgaggtttcacaactagaactttcagattatacgtctgtaagcccctataaagagtcatctgtcatcactaatatccacgagagtggtgcagagggtgctcgtggagatccttgtgagattatagagcctctgcaggtccattcagccatacttgccaatgatggttcccctgtttgcaatgaaataccaaagagtaagccagatgatgatcttgggtattttcaagagattcctcaaccaggtttctccacctgtatggttattccatcaaacaaagagtctgctgttgccaacaaaaaccttgaaggtgacgcaaaaagtgatgatgatcttattgatggtaccgctgataatgttgtatcgggacctaagattgccaacatggtagttgatgaggtgggtttcaagatggcacctgctaatagaagttcacctggtgacccctctgatgactcatgtgtcattcctgaaagtaggcctcaggattatgctgtaaagagctatgagggagttggtgattgtggtgtgactgaagtgtctaagttatgtagtgagcctcttaacaaaccatcagataatatatgtgcaactcaagatgttcctacaaatacctctactatgtctgctggtgccagtgaagtgtctagttcgtggagtgagcctgttaccgaactaatcgatgacagatgtgcaactcaaggtgttccagcaaatgcctctaccacgtctactgttgtaccatctgttaaactctggacaaatgctgggctctttggacttgaaccatccaaacctccagtatttggtaatggtccaagggaggatactccacctggttttaaagaagctcaaccagtccattcaactgaattcacagaagtgcactgttcaaagccaactgaatcagcagctgtagatgtcccaaatggaaacacatccattaccagcagctttgtggaaaagcttgttggtattcgtcctggttctgcaaacctcaatagctcaggggcaaatcaatcagcagccagaatacctgatccaattcatagtcatacagatgggcactcagatttttcgtcatcctttgagcacaataacatgactggcaaacatacttcaataagcgaacttctagaatttgaggggagtgctgatactggcaccaaaatatactcaactgacatgagaaataacgctgtgtctgcatcaagcttttcaagcattgcacaaaggtttcttgctaatacacttcagagaagaacttccaaatatactgatcttcctatgtcttctgagagggcaaatgctgatacaagtgcaaaatctgaatctactctaaatcctgttgtagaaccaagtgaagcggtatttgcagaggaaactaagtttgagaacaaaacagaaaatggaatggatggattgtccaaaacatcaatattttctagccgccattactctgagaaatcgtctccgccacttgagtacatgaaaatatcttttcaccctatgagcgcatttgagatgtcaaagctgaacctagatttctgtgatggaaatattcatgaaatttctgatgatatgatgttaccgacatttcagttactttcagagtcttccattccacagccaggcagtggttctgagtctgaagatgacacctttggtaggtcatatagttattcttcatatgatgatctgagtccccggctatattcaaactctgaggcatgggatcaagatgatggaactggactggaggaacatgagttatatgatgattcaaatcagataggatcctcaacagcacctttatctagctacatgggattcgagcagatgaacttatctgacatgaagtcagatatttcacttgcaaacattggggatcagaatgtaataggcactttacaatcctgtactgttgaagaacttccaaactttgatacattgatgtccagaagtgatgatcaaaatggtgaaacccccattccacataatctggggaatatgacaccagatgaagatcagttgccaccaccacctcctctccccccaatgcagtggaggatgacaagacaaacaacttcactagaagaggaaacttgcattacaactaaagatatgcttagaaaaacttctagcctaccacatatacacacctctgcccaggaagaacactgtcctccaactgcaccattggatctacaagggcatgctggggaagtgaaaactggtggggtacgagaaattactaatcctcctagtatcatcgatataaaatcaagtttgcttcagcagatcagggataagtcagagcagctgaagcttaatggacatgaaaggtcaaaaaaagcagtaggcggtgacattaaaagcttagacgaaagggaggagttgcttcagcaaatcaggagcaagaccttcaatttaagacgcacaaacgcatctaaggcagatggctcatcacaatctacagccagttccaacgttgcagcaattttggagaaagccaacgctatccggcaggctgtggccagtgatgagggtggcgatgatgatacatggagtgatatatgaccacctaattgcagacgttcatggtagtcttttcctgtatattaagctattacaagatgaagtgattaaatgtgaataccatccttttcttcattgtaattagattttgcaggtcttgttttgtaccttccttagttcatattagtgaatcctaccgtaggtcgctgtggtcgtggaaatgtcagagcatttccacattatgtaaatgcatctttattatttatttatgatagtgagaacagctgaatagctgataaaaataagcatactaatctatctttttatcattgtattgattttttttgcaatgataataagatggagcatgatgttgcaaaaggttgtccttttagctgctatcaagtaaaatatttctaaa

SEQ ID NO: 72182 - DNA, 5300 bp, Zea Mays
accttgtcggagaccgacgcaccccccctctccgctctccgctcctcctccccacaccccaccccacccgctctccagtccacctcacgctcacactcccgcagcccgcccgccagccgccatcctgctgccacctctttcttccttgcgggggcggcaaccaggcgcacggcacctgctccctcccactcccactcccacaccgcgccagccaccagaataaagcagccgttgcggcgtcgcgtcggcgagcacagcgcagcgcagcgcgcagcggcccgggtgcatgaggagggggcggcggctgccgaggccgaggctgtgacgaaggagcgcggagggcgatgccgctggtcaggttcgaggtgcggaatgaggtggggctgggggaccccggcctctacggcggcggagctgccgctgccgccgccgccaccgccgccgcgggggaggaggagcccaaggcgctgctcgagggcgtcgccgtcgcgggcctcgtcgggatcctgcgccagctcggagatctcgcggactttggtcataccagattcgcggctgatgttttccatgacctacacgagcaagttatagctacatctgctaggggtcgcaaggtgctgactcgagtacagaacatcgaagcagcacttccatctctcgaaaaggctgtgaagaatcagaagagtcacatacattttgcctatgttccgggctctgattggcacactcagcttcaaaatgagcaaaatcacctgctagcgactgatctgcctcgttttatgatggattcgtatgaagaatgccgagatccgccacggctttaccttcttgataaatttgacaatgctggtgcgggggcttgtgtaaagagatattctgatccatcttatttcaagaaagcatgggatacgatgagagcagataagaatgctaatgtacaaagagaaaagagatcacagaaaattaagagaaaaggatcacgactaagggaaccatatcatggacaagccatgcctaggcataggggcactgaatttcagcgatcacttactgctggccaacttgttaacagcaggcagtttgcatctcccagcaacgatggtcagggtatctcagagcataagtctacacctgatgcaagatctaatcctgacaatatgagcagatcttcttctcttagttcgaagacacaactgagttcagtagaacaagctatcgatacaaaaccttctgcagtttctcatgagaatggccatgggaagtcattggatactaagttgcacaagcctggtggtctgccttcgcccgtactgcttaacagcaccactgtggatgatcatagtgaccatttgaagcaaggttccccgccagatggtatggttgctagatcaccttatgttaaatgggatgaaaagactgcaattatcatgtctacaagttctatctactgtgacgatgttgttatggatgaggttgaagatgcagaacctacttgtattagctctgtgcagaaagaaactgaccataaggtaatggatacattgcaccagcaagatgccttacttaaaaagacaaaatcactgttagtgccatcagtcttgaaccaccatgatgacattccaggagaagccgacaactacatggatgcacttaatacacttgaatctgagacagaaacagaatctgaatttcaaactaaaaatcgggtgccagcaccttccttcaaagctgaagcccctcaagtgggggcaattgacaatattgttccacagtgtcttgattcctctgctgctgactttattgacacatgtcaagaatctgatattatttgtacttctgaaagagcaattgattttcccagtttgtcaaatgcagattctcttgaggtttcacaactagaactttcagattatacgtctgtaagcccctataaagagtcatctgtcatcactaatatccacgagagtggtgcagagggtgctcgtggagatccttgtgagattatagagcctctgcaggtccattcagccatacttgccaatgatggttcccctgtttgcaatgaaataccaaagagtaagccagatgatgatcttgggtattttcaagagattcctcaaccaggtttctccacctgtatggttattccatcaaacaaagagtctgctgttgccaacaaaaaccttgaaggtgacgcaaaaagtgatgatgatcttattgatggtaccgctgataatgttgtatcgggacctaagattgccaacatggtagttgatgaggtgggtttcaagatggcacctgctaatagaagttcacctggtgacccctctgatgactcatgtgtcattcctgaaagtaggcctcaggattatgctgtaaagagctatgagggagttggtgattgtggtgtgactgaagtgtctaagttatgtagtgagcctcttaacaaaccatcagataatatatgtgcaactcaagatgttcctacaaatacctctactatgtctgctggtgccagtgaagtgtctagttcgtggagtgagcctgttaccgaactaatcgatgacagatgtgcaactcaaggtgttccagcaaatgcctctaccacgtctactgttgtaccatctgttaaactctggacaaatgctgggctctttggacttgaaccatccaaacctccagtatttggtaatggtccaagggaggatactccacctggttttaaagaagctcaaccagtccattcaactgaattcacagaagtgcactgttcaaagccaactgaatcagcagctgtagatgtcccaaatggaaacacatccattaccagcagctttgtggaaaagcttgttggtattcgtcctggttctgcaaacctcaatagctcaggggcaaatcaatcagcagccagaatacctgatccaattcatagtcatacagatgggcactcagatttttcgtcatcctttgagcacaataacatgactggcaaacatacttcaataagcgaacttctagaatttgaggggagtgctgatactggcaccaaaatatactcaactgacatgagaaataacgctgtgtctgcatcaagcttttcaagcattgcacaaaggtttcttgctaatacacttcagagaagaacttccaaatatactgatcttcctatgtcttctgagagggcaaatgctgatacaagtgcaaaatctgaatctactctaaatcctgttgtagaaccaagtgaagcggtatttgcagaggaaactaagtttgagaacaaaacagaaaatggaatggatggattgtccaaaacatcaatattttctagccgccattactctgagaaatcgtctccgccacttgagtacatgaaaatatcttttcaccctatgagcgcatttgagatgtcaaagctgaacctagatttctgtgatggaaatattcatgaaatttctgatgatatgatgttaccgacatttcagttactttcagagtcttccattccacagccaggcagtggttctgagtctgaagatgacacctttggtaggtcatatagttattcttcatatgatgatctgagtccccggctatattcaaactctgaggcatgggatcaagatgatggaactggactggaggaacatgagttatatgatgattcaaatcagataggatcctcaacagcacctttatctagctacatgggattcgagcagatgaacttatctgacatgaagtcagatatttcacttgcaaacattggggatcagaatgtaataggcactttacaatcctgtactgttgaagaacttccaaactttgatacattgatgtccagaagtgatgatcaaaatggtgaaacccccattccacataatctggggaatatgacaccagatgaagatcagttgccaccaccacctcctctccccccaatgcagtggaggatgacaagacaaacaacttcactagaagaggaaacttgcattacaactaaagatatgcttagaaaaacttctagcctaccacatatacacacctctgcccaggaagaacactgtcctccaactgcaccattggatctacaagggcatgctggggaagtgggtgtccagaaaactggtggggtacgagaaattactaatcctcctagtatcatcgatataaaatcaagtttgcttcagcagatcagggataaggtttgttctgccttttgaattggaaaaaaagaccaatatgttcttctttatgattttatagtgctgttttacttttactataaaaaagtagcctacaagaaacaaatgtagaccatctttggatgtgagagatctcacttttttataaagtatattcatatagctgttgacttgacccataaggataacaagatggaatgcttaccgtgaattttatgaactgtgattcaaaaaagctatctgacccaagacactctgtcacatgctaaccatgtccagtacagaattcttgtggccatttattttatcaactaaaacaaatacaagtcccagtaatggccattgaccagttgattcttgaagtcaggaagctcattaccagttttatagtttctgatcgttgcataaaatttatgattattttatccatttcgcctaatgaattatcacagtcagagcagctgaagcttaatggacatgaaaggtcaaaaaaagcagtaggcggtgacattaaaagcttagacgaaagggaggagttgcttcagcaaatcaggagcaagaccttcaatttaagacgcacaaacgcatctaaggcagatggctcatcacaatctacagccagttccaacgttgcagcaattttggagaaagccaacgctatccggcaggctgtggccagtgatgagggtggcgatgatgatacatggagtgatatatgaccacctaattgcagacgttcatggtagtcttttcctgtatattaagctattacaagatgaagtgattaaatgtgaataccatccttttcttcattgtaattagattttgcaggtcttgttttgtaccttccttagttcatattagtgaatcctaccgtaggtcgctgtggtcgtggaaatgtcagagcatttccacattatgtaaatgcatctttattatttatttatgatagtgagaacagctgaatagctgataaaaataagcatactaatctatctttttatcattgtattgattttttttgcaatgataataagatggagcatgatgttgcaaaaggttgtccttttagctgctatcaagtaaaatatttctaaa

SEQ ID NO: 72183 - DNA, 4347 bp, Zea Mays
cctcctcctgcccggtctatgcgcgccttcgacctgccgcccgccgattcgcggctgatgttttccatgacctacacgagcaagttatagctacatctgctaggggtcgcaaggtgctgactcgagtacagaacatcgaagcagcacttccatctctcgaaaaggctgtgaagaatcagaagagtcacatacattttgcctatgttccgggctctgattggcacactcagcttcaaaatgagcaaaatcacctgctagcgactgatctgcctcgttttatgatggattcgtatgaagaatgccgagatccgccacggctttaccttcttgataaatttgacaatgctggtgcgggggcttgtgtaaagagatattctgatccatcttatttcaagaaagcatgggatacgatgagagcagataagaatgctaatgtacaaagagaaaagagatcacagaaaattaagagaaaaggatcacgactaagggaaccatatcatggacaagccatgcctaggcataggggcactgaatttcagcgatcacttactgctggccaacttgttaacagcaggcagtttgcatctcccagcaacgatggtcagggtatctcagagcataagtctacacctgatgcaagatctaatcctgacaatatgagcagatcttcttctcttagttcgaagacacaactgagttcagtagaacaagctatcgatacaaaaccttctgcagtttctcatgagaatggccatgggaagtcattggatactaagttgcacaagcctggtggtctgccttcgcccgtactgcttaacagcaccactgtggatgatcatagtgaccatttgaagcaaggttccccgccagatggtatggttgctagatcaccttatgttaaatgggatgaaaagactgcaattatcatgtctacaagttctatctactgtgacgatgttgttatggatgaggttgaagatgcagaacctacttgtattagctctgtgcagaaagaaactgaccataaggtaatggatacattgcaccagcaagatgccttacttaaaaagacaaaatcactgttagtgccatcagtcttgaaccaccatgatgacattccaggagaagccgacaactacatggatgcacttaatacacttgaatctgagacagaaacagaatctgaatttcaaactaaaaatcgggtgccagcaccttccttcaaagctgaagcccctcaagtgggggcaattgacaatattgttccacagtgtcttgattcctctgctgctgactttattgacacatgtcaagaatctgatattatttgtacttctgaaagagcaattgattttcccagtttgtcaaatgcagattctcttgaggtttcacaactagaactttcagattatacgtctgtaagcccctataaagagtcatctgtcatcactaatatccacgagagtggtgcagagggtgctcgtggagatccttgtgagattatagagcctctgcaggtccattcagccatacttgccaatgatggttcccctgtttgcaatgaaataccaaagagtaagccagatgatgatcttgggtattttcaagagattcctcaaccaggtttctccacctgtatggttattccatcaaacaaagagtctgctgttgccaacaaaaaccttgaaggtgacgcaaaaagtgatgatgatcttattgatggtaccgctgataatgttgtatcgggacctaagattgccaacatggtagttgatgaggtgggtttcaagatggcacctgctaatagaagttcacctggtgacccctctgatgactcatgtgtcattcctgaaagtaggcctcaggattatgctgtaaagagctatgagggagttggtgattgtggtgtgactgaagtgtctaagttatgtagtgagcctcttaacaaaccatcagataatatatgtgcaactcaagatgttcctacaaatacctctactatgtctgctggtgccagtgaagtgtctagttcgtggagtgagcctgttaccgaactaatcgatgacagatgtgcaactcaaggtgttccagcaaatgcctctaccacgtctactgttgtaccatctgttaaactctggacaaatgctgggctctttggacttgaaccatccaaacctccagtatttggtaatggtccaagggaggatactccacctggttttaaagaagctcaaccagtccattcaactgaattcacagaagtgcactgttcaaagccaactgaatcagcagctgtagatgtcccaaatggaaacacatccattaccagcagctttgtggaaaagcttgttggtattcgtcctggttctgcaaacctcaatagctcaggggcaaatcaatcagcagccagaatacctgatccaattcatagtcatacagatgggcactcagatttttcgtcatcctttgagcacaataacatgactggcaaacatacttcaataagcgaacttctagaatttgaggggagtgctgatactggcaccaaaatatactcaactgacatgagaaataacgctgtgtctgcatcaagcttttcaagcattgcacaaaggtttcttgctaatacacttcagagaagaacttccaaatatactgatcttcctatgtcttctgagagggcaaatgctgatacaagtgcaaaatctgaatctactctaaatcctgttgtagaaccaagtgaagcggtatttgcagaggaaactaagtttgagaacaaaacagaaaatggaatggatggattgtccaaaacatcaatattttctagccgccattactctgagaaatcgtctccgccacttgagtacatgaaaatatcttttcaccctatgagcgcatttgagatgtcaaagctgaacctagatttctgtgatggaaatattcatgaaatttctgatgatatgatgttaccgacatttcagttactttcagagtcttccattccacagccaggcagtggttctgagtctgaagatgacacctttggtaggtcatatagttattcttcatatgatgatctgagtccccggctatattcaaactctgaggcatgggatcaagatgatggaactggactggaggaacatgagttatatgatgattcaaatcagataggatcctcaacagcacctttatctagctacatgggattcgagcagatgaacttatctgacatgaagtcagatatttcacttgcaaacattggggatcagaatgtaataggcactttacaatcctgtactgttgaagaacttccaaactttgatacattgatgtccagaagtgatgatcaaaatggtgaaacccccattccacataatctggggaatatgacaccagatgaagatcagttgccaccaccacctcctctccccccaatgcagtggaggatgacaagacaaacaacttcactagaagaggaaacttgcattacaactaaagatatgcttagaaaaacttctagcctaccacatatacacacctctgcccaggaagaacactgtcctccaactgcaccattggatctacaagggcatgctggggaagtgggtgtccagaaaactggtggggtacgagaaattactaatcctcctagtatcatcgatataaaatcaagtttgcttcagcagatcagggataagtcagagcagctgaagcttaatggacatgaaaggtcaaaaaaagcagtaggcggtgacattaaaagcttagacgaaagggaggagttgcttcagcaaatcaggagcaagaccttcaatttaagacgcacaaacgcatctaaggcagatggctcatcacaatctacagccagttccaacgttgcagcaattttggagaaagccaacgctatccggcaggctgtggccagtgatgagggtggcgatgatgatacatggagtgatatatgaccacctaattgcagacgttcatggtagtcttttcctgtatattaagctattacaagatgaagtgattaaatgtgaataccatccttttcttcattgtaattagattttgcaggtcttgttttgtaccttccttagttcatattagtgaatcctaccgtaggtcgctgtggtcgtggaaatgtcagagcatttccacattatgtaaatgcatctttattatttatttatgatagtgagaacagctgaatagctgataaaaataagcatactaatctatctttttatcattgtattgattttttttgcaatgataataagatggagcatgatgttgcaaaaggttgtccttttagctgctatcaagtaaaatatttctaaa

SEQ ID NO: 72184 - DNA, 4334 bp, Zea Mays
ctttgtttctcgggtgcgacatggaggtcttaaattcgcggctgatgttttccatgacctacacgagcaagttatagctacatctgctaggggtcgcaaggtgctgactcgagtacagaacatcgaagcagcacttccatctctcgaaaaggctgtgaagaatcagaagagtcacatacattttgcctatgttccgggctctgattggcacactcagcttcaaaatgagcaaaatcacctgctagcgactgatctgcctcgttttatgatggattcgtatgaagaatgccgagatccgccacggctttaccttcttgataaatttgacaatgctggtgcgggggcttgtgtaaagagatattctgatccatcttatttcaagaaagcatgggatacgatgagagcagataagaatgctaatgtacaaagagaaaagagatcacagaaaattaagagaaaaggatcacgactaagggaaccatatcatggacaagccatgcctaggcataggggcactgaatttcagcgatcacttactgctggccaacttgttaacagcaggcagtttgcatctcccagcaacgatggtcagggtatctcagagcataagtctacacctgatgcaagatctaatcctgacaatatgagcagatcttcttctcttagttcgaagacacaactgagttcagtagaacaagctatcgatacaaaaccttctgcagtttctcatgagaatggccatgggaagtcattggatactaagttgcacaagcctggtggtctgccttcgcccgtactgcttaacagcaccactgtggatgatcatagtgaccatttgaagcaaggttccccgccagatggtatggttgctagatcaccttatgttaaatgggatgaaaagactgcaattatcatgtctacaagttctatctactgtgacgatgttgttatggatgaggttgaagatgcagaacctacttgtattagctctgtgcagaaagaaactgaccataaggtaatggatacattgcaccagcaagatgccttacttaaaaagacaaaatcactgttagtgccatcagtcttgaaccaccatgatgacattccaggagaagccgacaactacatggatgcacttaatacacttgaatctgagacagaaacagaatctgaatttcaaactaaaaatcgggtgccagcaccttccttcaaagctgaagcccctcaagtgggggcaattgacaatattgttccacagtgtcttgattcctctgctgctgactttattgacacatgtcaagaatctgatattatttgtacttctgaaagagcaattgattttcccagtttgtcaaatgcagattctcttgaggtttcacaactagaactttcagattatacgtctgtaagcccctataaagagtcatctgtcatcactaatatccacgagagtggtgcagagggtgctcgtggagatccttgtgagattatagagcctctgcaggtccattcagccatacttgccaatgatggttcccctgtttgcaatgaaataccaaagagtaagccagatgatgatcttgggtattttcaagagattcctcaaccaggtttctccacctgtatggttattccatcaaacaaagagtctgctgttgccaacaaaaaccttgaaggtgacgcaaaaagtgatgatgatcttattgatggtaccgctgataatgttgtatcgggacctaagattgccaacatggtagttgatgaggtgggtttcaagatggcacctgctaatagaagttcacctggtgacccctctgatgactcatgtgtcattcctgaaagtaggcctcaggattatgctgtaaagagctatgagggagttggtgattgtggtgtgactgaagtgtctaagttatgtagtgagcctcttaacaaaccatcagataatatatgtgcaactcaagatgttcctacaaatacctctactatgtctgctggtgccagtgaagtgtctagttcgtggagtgagcctgttaccgaactaatcgatgacagatgtgcaactcaaggtgttccagcaaatgcctctaccacgtctactgttgtaccatctgttaaactctggacaaatgctgggctctttggacttgaaccatccaaacctccagtatttggtaatggtccaagggaggatactccacctggttttaaagaagctcaaccagtccattcaactgaattcacagaagtgcactgttcaaagccaactgaatcagcagctgtagatgtcccaaatggaaacacatccattaccagcagctttgtggaaaagcttgttggtattcgtcctggttctgcaaacctcaatagctcaggggcaaatcaatcagcagccagaatacctgatccaattcatagtcatacagatgggcactcagatttttcgtcatcctttgagcacaataacatgactggcaaacatacttcaataagcgaacttctagaatttgaggggagtgctgatactggcaccaaaatatactcaactgacatgagaaataacgctgtgtctgcatcaagcttttcaagcattgcacaaaggtttcttgctaatacacttcagagaagaacttccaaatatactgatcttcctatgtcttctgagagggcaaatgctgatacaagtgcaaaatctgaatctactctaaatcctgttgtagaaccaagtgaagcggtatttgcagaggaaactaagtttgagaacaaaacagaaaatggaatggatggattgtccaaaacatcaatattttctagccgccattactctgagaaatcgtctccgccacttgagtacatgaaaatatcttttcaccctatgagcgcatttgagatgtcaaagctgaacctagatttctgtgatggaaatattcatgaaatttctgatgatatgatgttaccgacatttcagttactttcagagtcttccattccacagccaggcagtggttctgagtctgaagatgacacctttggtaggtcatatagttattcttcatatgatgatctgagtccccggctatattcaaactctgaggcatgggatcaagatgatggaactggactggaggaacatgagttatatgatgattcaaatcagataggatcctcaacagcacctttatctagctacatgggattcgagcagatgaacttatctgacatgaagtcagatatttcacttgcaaacattggggatcagaatgtaataggcactttacaatcctgtactgttgaagaacttccaaactttgatacattgatgtccagaagtgatgatcaaaatggtgaaacccccattccacataatctggggaatatgacaccagatgaagatcagttgccaccaccacctcctctccccccaatgcagtggaggatgacaagacaaacaacttcactagaagaggaaacttgcattacaactaaagatatgcttagaaaaacttctagcctaccacatatacacacctctgcccaggaagaacactgtcctccaactgcaccattggatctacaagggcatgctggggaagtgggtgtccagaaaactggtggggtacgagaaattactaatcctcctagtatcatcgatataaaatcaagtttgcttcagcagatcagggataagtcagagcagctgaagcttaatggacatgaaaggtcaaaaaaagcagtaggcggtgacattaaaagcttagacgaaagggaggagttgcttcagcaaatcaggagcaagaccttcaatttaagacgcacaaacgcatctaaggcagatggctcatcacaatctacagccagttccaacgttgcagcaattttggagaaagccaacgctatccggcaggctgtggccagtgatgagggtggcgatgatgatacatggagtgatatatgaccacctaattgcagacgttcatggtagtcttttcctgtatattaagctattacaagatgaagtgattaaatgtgaataccatccttttcttcattgtaattagattttgcaggtcttgttttgtaccttccttagttcatattagtgaatcctaccgtaggtcgctgtggtcgtggaaatgtcagagcatttccacattatgtaaatgcatctttattatttatttatgatagtgagaacagctgaatagctgataaaaataagcatactaatctatctttttatcattgtattgattttttttgcaatgataataagatggagcatgatgttgcaaaaggttgtccttttagctgctatcaagtaaaatatttctaaa

SEQ ID NO: 72185 - DNA, 2016 bp, Zea Mays
aaatggaaataaaatataattcactaacaagtctgtattttttatattaaaaacagacaagtatcacaatttaaaatatcatcagcagtctaaatatttaaatttagataataaatactgattgaaactgtgatccaaacaaccatagagtcgtgtacttaaatatacagaaaataaatttaaaagtaaatttggcccagccaaacatatggccgaacagccgaggcagcccagccggccagcccagcggcacagtgcccatgcggcccaaccggccatatagaaaggctaggcggttagagttaggaaaccctaaccgcccaccacatcgaccagcgcgcggcggcgcgggagcagcctaggcgcggccatggcggtcggactagcgcctgcgcggcggtcccggcccaacggcgcgaggcacggctcgcgtgggcggcggcgcggtcggcccaacctcggcacgacggccctagcagcgcggcgtggccctaagggcgggcagcccccccccggacgcggcgcgcggcctcccggcttccctgtgcgggcgcggcccccatgcgcaggtgcggaaccgctgcttggcggcgcggcgcgggtgcccggccctggcgcagacgcggcgacctggcacggcgcgggcggggcgcgagtgcgggctccagcggcggtgcgcggggcggttgcccggccacgggacgggcgctcaggcggccatggtggcacgcaggcacgacatccccggcggatcgggtgtgctgccctcggccagcgcgggtgcgcggcccccagcgcgcgactggatctccgggcggcgcgggcgcgggcgagtccccatcggcggcgtgggtgtgcgtcccccggcgcgcacgttcagcctcggtggcgtggccccgtcaggccatctctgcgtggtccagtagtcggcaacgcgaagtagcgctgtcacgcggcctctagcgcaggcgtgcatccaggcggccgcgcccagcacgtcctcggccacagccgttcatcacagaaacgagcacccgcacgttgtgaccgtgaccacatgcatgcactgtcatttctgtgagcactgggagcatcaagtttctgaaaaattctttcgctaagagtaacttgtttctccttttttccatctcgtgagcagtgctgataacgtgttgaagtatactcagtgataacgagattgagagagagacaaatgacagcgatctttcattattgcaggggagtcctggttatatacatgtgaaggggtgtatcccaagggattcctcttggttggtcaaccacaaccaggccaggaagcttaatcatggcccatccagtagccaattgctttccaaagatagccgctgctggtcttccattgaagtgaaacaggaataattaagctctcagaaagaacaggccgacgaccttcggttcagcaacagcttaatcatggcaatatagagacttggctgtactacaaccacggccagcactactgtccattattgttttgtttgaccgctgctcatcgtcggtaaaacaaaccacggttgtaatcctcattttttgtggaaatcccagcgctgttcctgcgtgctgaaaaaatcgaaagaacgtgtccaagtcaatagtgtggcacgatgcaacgcaacgggggtacaacaggacaaagtctgacagcttgttcgcttgcttgcctgtgcaactcaagtccaactttgttaataaagaagaagaagaagacacagtggcttgctgtttagctcgggaagggggttaggggatccatactcaaagttgctgcctccgttttttagagctgttgcctgctttccaactccaagtctcctgtcagccgacgggtatggtatatgagcacttgggttttggccgccgtccggccggtcgaaaggaaccaccaccaagtcttgcacggatgacaggctacgctgtccaattgcatcggtgcagccatagaaaaactggagggagccaagccacggatgtgag

SEQ ID NO: 72186 - DNA, 4909 bp, Zea Mays
gtggctatgtgcagattctgacgttgtcacagtactaacacagaggatcagaactaagcacagcagatcagatctgcgatccaagtatcgcagccggtgtaccaatggacttaaattacaggtgttgcagtgtccggcctctccgggagcaaagaggaggcgcagagccaggtgctgatcgggatggggctgctcgccggttccaccgtcttcctcctcaccctgctctggggaacctgtgtggtcgttggcaagtgtgacctcgggccaggccgtgaggcagtagatgtgacagacaccaagggcttcagcttgactggcactggtgttacgaccgacgtgcagaccagctacgcggcacggatcatggggctatctgtcatccccttcatcatcgctcagttccccaagatgttgaagacgcaccacgggcagcgcctcgctatgctgctggcccttgtcgtgtcgttcgcgctcgtgcttgcctactgcctgtaccaggttttccagccctggattcagaggaggaagctcgcgtacgcgaagcacaagcacgtgatctccgggatactgaggcacgcccagatgcagtcgctcggccgcctgctgaacgacgacggcacgcccaatgaacaagtcatcagaaagctgttccgcaagatcgacatggacgagagccggtccctgtcccgcgccgagctccacgccctcatcgtcggcatcaacttcgaggaggtcgacttcgacaggacggacgcggtggacaaggtcatggacgacttcgacacgtcccgcaacgacgtcgtcgaggaggaggagttcgtgcaggggatgaggaagtggctggacgaggccaggcgcagcgtgcccgtgggcggcgccttctccagcaagttcatccacgagtaccacgagaggacgaggcaggagcacgacgagctggtcgacaggtccgacgaggcggtggagagcgtggagaaccccgggtggtgcatagccaaggccgtggcgctgctgctgctgggctccgccgccgccgccgcgttcgccgacccgctcgtggacgccgtccacggcttctccaacgccacgcgcatcccgtccttcttcatctccttcatcgccctcccgctcgccaccaactccagcgaggccgtctccgccatcatcttcgccagcaggaagaagcagaggacctgctccctcaccttctccgaggtgtacggcggcgtgacgatgaacaacacgctgtgcctcggcgtgttcctggcgctcatctacttcaggaacctgacgtgggacttctcgtcggaggtgctcatcatcctgctggtctgcgtcgtcatggccctcttcaccagcttccggaccacgttcccgctctggacctgcctcgtcgcctacatgctctacccgctctcgctgatcatcgtctacatcctcgactatgtcttcggctggtcatagacctgattggctcaagtgaacacctggttttcagacagccgccggtgtttctgtttgacctccttgtaattttaactatatgtccagactttttctcatgtgatgctgtgatcatgttctactttctctaatccctcgtgtatccgaagcacacaacagtgcattcttcagctccacactcccgtgccagactcatttggcacgcctagcggctccggctgcggctctacccgaagccctgccctaccaaaccggcatcctttttaagtcacaaatggcccttaaatcaaagccacaaaaaaataatattatgaattgtaaattggaacagggatccctagatcgtaaatagaagtatagaaccataataaccgcaaaaatcataaaaaacagtggcagattatcattgctctgaaacggcgtagaagacacttttgagtgctatggacagacggtgcccaaagtcgacacgcttccccagaagcagagagctacacagaactaccgaagtacttgtacagaaggactacctgcacctgacgcgaaaaaaagcatgagatccctaagctgtcaataaaacagagttcatgtacaccaacggacgtgtcagcttcgcaaagagcacttcttttgagaatgcccaagaagatggcatcggccacactggacgatccgcttcggccgcttcatgctctcgatctttagaatcttcatcttgggtcggccaggaggcctccggatattgggcgggccaagcaccacatcggccttgctgaccgcaccttgtgaccagggagacgaatcgttccagtggctcctgtccgggataggatatattggctgggagtaggtttctcggtacttcatcacactgaagcagtcatcagcatagaggcgggggtcttcaccgcatgagagcagtgcggcggcggcatgtgcgcatgggatgccgtaaatttgccatcggcggcacgagcagaacctagcttgggtgtccacaatgttggttcgctccgatgacacaatctcaaactccaccttgtttgctcgaaggacttgatagcattgtgagtcatggatggcttcgaggataactttctcagctgacggaacaagaaccgagttgtatgactgtgccaggttctggcgttcagcaaaccagcaagccagttggtgcctgatgtgctcgatggtttgcacgatgggaagttcatggcagtcaagggacaagttatacaatatctcggttatcccaagactaaaatggccatatctgataccctggaagtaagaaaatgcccacaggtttggcggaaaacgctgtaaccatggcataacatcctgaacctgcatcatttcatttacctttgcatcaaattctgatgctgtgagagcatacacagcactccagaaaatgttaagcagtttagtattcttgaactcatcacggaaattctcactcacgtgtctcaagcaaaacccatgaaaagcagtggggaaattagatccgaccgctgcaaccacttgccgttttctctcagaaactatagtcaacaccggcatcttatctgtgttaactccgagcatcttcctcaattccgatataaaccaattccagttatcatcgctctcgcaatcaacaacaccgaatgctagagggaacatcatgtgatcagcatcaatagctgaagcacacagcaatgtcccaagatactttcccttcaagtcagccttgtcaatttctagaaggggcctgcacccatttaagaaaccataaatggatgcacgaaacgagacaaacagccgctggaaggcattccctggtccaatacctctataggttgcaacactaccaggattcgtcttaacaatctgctcacaatatgcaggaagaagtcggtatccatcctcaagagtaccattaactgcagccatgcttctctcctttccacgccatgcctgcatataagaaacagcgaccccatgctgctctcgaatatcctgcagtatctcctttggcttaatctgcgggttatccctgagtcttgcctcgacagacctagcaacccaaccaacagtagcctgctgatgatgcaggttaagaacaccctcacatttgtgctctccgtgcaaagtccggacagtgaaagttggaacgccggggcacttggcgatgtgcacacgccaagggcaaccttcttttgagcattttgcaatgaaacggctacgatcagatttcactacacggagttcatagtgcaaagcaatggccatgtccttgacagccctccgacatgtgtcaacatctgcaaactcttgaccaatgacaagggtccgcgaacctggtataaggttatgctctgactgaaccaaaatctggttgtcttccatcaatgagcagacccactaggtgaagaatatctgtttctctcaaccataaaaaaactttcaaataacttgatagcaacaaatgtgaattatctgtttagctgcagaaatactgacctgcacagcattaacaagagtaaattgtccattaaagcaacaacaaaaatagtttcattccaaacagggaaatggtcttgtggctaccgatcattcgtgcagggtacaaacgttagattagtgtcctgcctattggttactagtttaggccatctgctttgtgttggagtgtagaaactggatctatatactatatagcaatccaatgtcctgtttccagtagtaacatcgtcagtttgctaatcgatttgagggcaaagtttcctgaaatcaaaagttgagacaaaaggcctccctctaggctttgacagaaccacatctccaggagacctaacatgcctagaataagtgtgacttaaaaaattcgtgaaaaggtgacttcaatgtagtttgaagtcctttagtaacctgcattgtatgctggtgaaatctttagctacacctgcagaatggactactcagataccccccagatacatatttacaaaaaaaaaaaaacatcactgactaagtacggttagatttgcaatggtgggcagtggacacaatcagcttcctagtgattgaagccagcacatcgttgctgaaaacacaatggtctccagtaacaatggcttgctcctctcgaaaaacaaaacaaaacaaaaaccaatggtttccttttatctttgctgctgcctcccctttctcaacaataaattacgaaatgtaattatgtgttcagaagctacttcacttattcagcaaccaagtttgttttttaaaataataaacaactatcgaagtgaaaatccataattttggtgcgtgggggtttcagttgaactcgtgttttttggaggatacagagataacagtacccccgaccgcaaacagccaaacccttaacaaaaaattaggaatacaagccgactcccagggaaaaaaatccggtgcc

SEQ ID NO: 72187 - DNA, 1851 bp, Zea Mays
actctataaggagctagcgagggcgtccacagcttcaccacgccctcgcccggacgtcgcgcaagccccgctgtccgcctgcccccggaaatttcgcccacacgatgcccccaatctcgcgatgcccccgaccgcctcccccgccgtgacagccgcctcgacgtcctcaccacggctcacgatgcccccatcgacccatcgtctgtgtcccccttcctccctgcgtctccctctcaccctctatcgcccaaaagctccaacctgtcgccagagacttggcgcagacccgtcgactaacacgtcgtcgtcctcacgccgtgggggatgactggacacgatgctccccacccgcacccaacaccacgccagcctcgccctcgatccaggctgccgcaggtgtcctcgacgccacccttccggctcgccggtggttgattcctcttctccttcctctggtcgcaggggatggcgtcgtagctcgggtacgccacccttccgcatgcgccatccacgccaggaacaacatgggcggcggcggccacgatgccagcagcaacacacagccagcgccacgggtcagcggccagaagcccccgccagccctagaggcgacgccgacgccgacgcgcggacgagctggatctggtgcacgtgtccaatctcccccgcccgctcagcctcagcgacctgtccccggcgcccatgcacgggtcgcagctccgcgtggcgtaccagggcgtcccgggctgcgacgccattccctgcggccaccctgtttggggtgccttccaggccgtcgagctctggatcgctgaccgcatcgtgctccccgtggagaactccctcggcggcagcatccaccgcaactacgacctcctcctccggcaccgcctccacatcgtcggggaggtccagctccccatccaccactgcctcctcgcgtctgcggggaatgtggcggccatggtgtggcggcctgaggcccctgcccagggctgcaggctgttgcaacgggttctgttcaatctccttgtcaaatttgaatgtgtatgcgtgcttggtctatggaaaatatttccaaggaagagggttgaaatctcatgcatatacgcatagccttgaagcaggccatccaaacagcaccatggatcgatgtatggtcctagatcctacaagggacgccagcaaggtagcaaatttggtggcagtactacaagttggagttctgctggccgcagatttggtactatcgacttgagtggcaatcaacaaaggggcagcatgccatttggtagtcacaatggctctctggagttcatgaatgagcaaaaccatgggccacgtgctacaaaaccgaagatacaaggcacagagaacacctcaggagatgagagaagcgagaaaattgttcctctgattgatagcgaactgtacaatcgctctgattttataactgagtacaaagatgtcaaattctttgtaataaagtcctacactgaggaccatgtacataggagcattaagtataaagtttgggccagcacagccaacgggaacaggaagctggattctgcttaccatgcagccaaagagaaagaagagcattaccctattttcttgtttttctcggttaatggaagtggccaattctgtggcgtggctgagatgattggacctgtcgattttgatagaagtgttgattactggcagcaggataagtggagtggccagttccctttgaagtggcacataattaaggatgtatcgaacaatcttctgcggcacatcattcttgagaacaatgacaataaacctgtcacaaatagcaaggacacacaggaggtaaaccat

SEQ ID NO: 72188 - DNA, 2317 bp, Zea Mays
actctataaggagctagcgagggcgtccacagcttcaccacgccctcgcccggacgtcgcgcaagccccgctgtccgcctgcccccggaaatttcgcccacacgatgcccccaatctcgcgatgcccccgaccgcctcccccgccgtgacagccgcctcgacgtcctcaccacggctcacgatgcccccatcgacccatcgtctgtgtcccccttcctccctgcgtctccctctcaccctctatcgcccaaaagctccaacctgtcgccagagacttggcgcagacccgtcgactaacacgtcgtcgtcctcacgccgtgggggatgactggacacgatgctccccacccgcacccaacaccacgccagcctcgccctcgatccaggctgccgcaggtgtcctcgacgccacccttccggctcgccggtggttgattcctcttctccttcctctggtcgcaggggatggcgtcgtagctcgggtacgccacccttccgcatgcgccatccacgccaggaacaacatgggcggcggcggccacgatgccagcagcaacacacagccagcgccacgggtcagcggccagaagcccccgccagccctagaggcgacgccgacgccgacgcgcggacgagctggatctggtgcacgtgtccaatctcccccgcccgctcagcctcagcgacctgtccccggcgcccatgcacgggtcgcagctccgcgtggcgtaccagggcgtcccgggctgcgacgccattccctgcggccaccctgtttggggtgccttccaggccgtcgagctctggatcgctgaccgcatcgtgctccccgtggagaactccctcggcggcagcatccaccgcaactacgacctcctcctccggcaccgcctccacatcgtcggggaggtccagctccccatccaccactgcctcctcgcgtctgcggggaatgtggcggccatggtgtggcggcctgaggcccctgcccagggctgcaggctgttgcaacggggtatggactaaaaatcactccatgcattagttcacttgtttggatggcctaggactaaattttaggtgactaaacattttagtcctggtatccaaacaggctcttgttgtgtgtatgttatgtatctacagtctgtattctgctgatttatttctccattgttctggtccgtgtaacattttttgatctggtccatgtaacattttttgatctggttcatgtaacatttttcattacgtcttatggttatttacaactgagtttatcttgtgctgctttgcatgttcttgattttgattttgagaagttctgttcaatctccttgtcaaatttgaatgtgtatgcgtgcttggtctatggaaaatatttccaaggaagagggttgaaatctcatgcatatacgcatagccttgaagcaggccatccaaacagcaccatggatcgatgtatggtcctagatcctacaagggacgccagcaaggtagcaaatttggtggcagtactacaagttggagttctgctggccgcagatttggtactatcgacttgagtggcaatcaacaaaggggcagcatgccatttggtagtcacaatggctctctggagttcatgaatgagcaaaaccatgggccacgtgctacaaaaccgaagatacaaggcacagagaacacctcaggagatgagagaagcgagaaaattgttcctctgattgatagcgaactgtacaatcgctctgattttataactgagtacaaagatgtcaaattctttgtaataaagtcctacactgaggaccatgtacataggagcattaagtataaagtttgggccagcacagccaacgggaacaggaagctggattctgcttaccatgcagccaaagagaaagaagagcattaccctattttcttgtttttctcggttaatggaagtggccaattctgtggcgtggctgagatgattggacctgtcgattttgatagaagtgttgattactggcagcaggataagtggagtggccagttccctttgaagtggcacataattaaggatgtatcgaacaatcttctgcggcacatcattcttgagaacaatgacaataaacctgtcacaaatagcaaggacacacaggagatcgacagggacgtggcgcgcgcaaggtaaggacactccaaaagctaggccgcaaggacgctccgaaagctaggccgagctgtgaaagactcaccaaaatcgtcgggattgagcccaatcctggcaaccgcgaaagggggcccgccccggcttgccagggaaattgag

SEQ ID NO: 72189 - DNA, 457 bp, Zea Mays
gtccaacccaacactgcagataaaagggaaaagctacaggtatctcacgcattgggccaaccctccacatgtaccgcctaccagcccaaatgtagtacacatgaaaaaaggcaacaaaaaaggacaaaaaaatcccagtgcagtacacaacccccccagtcgccagccctccagccagccaccagcagcccccaacacaaaaccacaaaaccccagcccccagccctccaccccagccgcgagcgcccagcacaaaatcctcccccctctccagaaaaaagaacagaacgttcaatgtctatgaggatacaaagtacatgatgatgacagaggaagatgaaaaaggcaaagaaattgaaaagattcatgttgatggtactaacaagtttgtcactgaagacaacatattctcagaagatgaaattaccaattttgagcagcatatattggagataat

SEQ ID NO: 72190 - DNA, 2001 bp, Zea Mays
gccttgccctccctacccagtacccacccccccaccgacccaccccctccgtgttccgccgcctccgccgaaatcaccaaatccccgcctccgatccgccgccgacctcgatccgccgcagccgttgacccgcccagaatggcctctgggactccctcgccgtccggcaaaccctactcccgcaaatctcacgccagctccaaggctcccagcgtcccctccttcgacgcccacaacggccggctcctccccaccgtcaccttcccgctgccctccactaccgcctcccgccgggagctgcggcgccgcctctcctccgagctctcccaggtgcgcgccgcggccaagcgcctgagctccctcccggctcccgcaccttcctcggcgctctccgccaccgacccctccacgccgctcccgccgcacccgccggggtccaagcacaagtccaggaagcccgggggagccccgtacccgcagccgcacctctcggcggaggcgcggcgcaagctctacgcgcccgtgttcaagacctgctccgcgctgctccagaggctgatgaagcacaagcacagctgggtgttcaacactccggtagacgcgagcgcgcttggactgcacgactaccatacgatcatcaccaagcccatggacctcggcacggtcaagtcaaagctagcggctggacagtacaggtcgccacgggagtttgcaggcgatgtgcgtctcacgttccggaacgccatgacgtacaaccccaaggggcaggacgtgcacttcatggccgagcagctgctgaacatgttcgaggagaagtggttggagattgaggctgagctagctcagctatcgccacagcctccgacaccatcctcagcagcacccaggaagcccaaggagatagataattctagggcattagagaggtcggattcgacagttcatgctgccgggatggaggctaccccaaagacgcacaatggcagacccccggtttcaaagaagcccaaggcaagggagcccaataagagggatatgacattctgggagaagcagcggcttagcaataacctccaggatttgccaccggagaagctagacaatgttgtccagatcataaagaagaggaactcgtcgctcaaccagcatgacgatgagattgaggttgatatcgatagctttgatgttgagacgttatgggagcttgatagattcgtgacaaactataggaagagtataactaagaataagcggaaggctgagctttctgcggtaaggccagatgaagctgatcctgatcaggagccagagaaggtagaacgtgtgaggcaggacgaggcagatcaggatcgaatccctgcagtacaagagccgattccagaaccagaatcagttgatgtcgagccacctaaggaaattgcagcagatgacaatgggagatatgtgggtgaatcatcacctggtcatttggaagatcaggagggagagaatcctggtagatcaagtagttctggaagctctagcagtgactcagggtcgtcctctagtgatacagacacagatagttcatcagcagatggttctgatgctgcacaatcgcccagaacgtagcatctataggccaggaaagctgcatatcattacattaagaaagaaaacaccaagtacaaagggaggtgcgagacctccctgaattcataacagcacttacaaaaacacctatagaaagaaaccctgcacagctacctttgcggctacgggagaatcacactccatgagaggagatcttgcattccagaggccccggctagacaccaccagtgactctacagccacatgggcaagaactatttgcgcctgagggcggattccatcaaacacgcaggcattcctgtgcttccacaattcttgggtgactaggatgaccaaggaattgaaacctttccgcagacctttttcaatagaaacggttgcctttctccaccaagaacaaaagcggct

SEQ ID NO: 72191 - DNA, 2716 bp, Zea Mays
ctccatcgaaaggacccgatcaaactttagtctaggccagttgcactcgtcctcctcttctcgcagcagccagcagaccaatcgggacaagcaaactcccccgattagtttaagcagcccgggcccggcgacgaccagctccgttccgcgcggggatttaaacgcgcgaagcgagaaggcacgcagcaggcggcagcggcaagcaacgaacgcgatcgcgcgccgacgacgacgcgcggtgccggcgcctggtggtgccgtgttgcggactccgctgcatcgcctcggtcggtcgtcgtcatatcatgggtgtccggctgccggtggcgtggtccgccgtcctcgtcctcctcgtgcgggcggccgtggcgcgggagtacgcggccatcttcaacttcggggactccctggtggacgccggcaacctggtggtggacggcatcccggactacctggccacggcgcgcctgccctacggcatgacccacttcggctaccccaccggccgctgctccgacggccgcctcgtcgttgacttcatcggagctgggcgtgccgctgctgccgccgtccaaggcgaagaacgcgacgttccaccgcggcgccaacttcgcgatcacgggcgccacgtcgctggacacgcccttcttcgtggagcgcgggctggggaagacggtctggaactcggggtccctgcacacgcagatccagtggttccaggacatgaagcccaagctgtgcgggcaggagcaggagtgccgggacctgttccggcggtcgctgttcatcgtgggcgagttcggcgggaacgactacaactcgccgctgttcgcgttccggccgctggcggaggcgcacgacatggtgccgcacgtggtggagtccatcgggcggggcgtggagcggctcatcgcggagggcgccgcggagctggtggtgcccggggtgctccccatcggctgcttccccgtctacctctccatcttccgcaggcagccggccggcggctacggcgcccgcagcggctgcgtcaaggagctcaacacgctgtcgtgggtgcacaacgccgcgctgcgccgcaaggtcgaggagctccgcgccaggcaccccggcgtgcgcatcgtgtacgccgactactacacgccggccatccagttcgtcctccacgccgagaaatacggtatcttgtttataagatcacggaaattcgtccgttcacgcattcaaaaaagtatgggggacgacgacgtgcgggagcgagtaataattgaagcagaagcggccgcggcacgtcgctgggcgaatctgccttccattccatcgctggccgctcaaccggaacccaggggcgaatctgccttccattccgacgagaaatccacggtcttacgcgggcagggacgcatttctgggcgaacaaacgaatcaagcgtggcggggcggggtggttgggacggctgcgtgttggcgcggtcccgtgacctcatcgatcagcctaaaataaaaagagagcgactttgaagcgcgcgggcctctgctctgctctcgaacttgcgctccatgttctgagaagattgtttctgctgtgcgccgcagggatgctgaagcagacgccgcgggcgtgctgcggcgcgccgggcgtgggcgagtacaacttcaacctgacgtccaagtgcggcgagccgggggcgtacgcgtgcccggacccctccaaccactggagctgggacggcatccacctcacggaggccgcctacggccacatcgccaggggctggctctacgggcccttcgccgacccgcccatcctcgacgccaagcacctcggctaacgtcgtccatccaccgtcttctccaacgccggccccgcccgcccagtacagactactcctccggctctgggcgccgtcgtatgtgcgtccttattaccgacctgcaaattggattggttgcttgtagtagaagtgtagagagagcgagacagagatagatgacaaacacgaaacgaaccggaaggaggacgataaggcgcgcgtgccggccggtcttctactcctctctgttcatagctgtcccatatctatcgtagtcaagaaaactgagcagggaaagaaaccgggcgatatttctgttgcatcttgctttgtttgagagtgtgcgtgcgtgtgcggccagctcgatctgaagtcgataggcaggtgcgtcgcgtcgtggatgaactggtccgtggacgtgatcttgtttatttttttaaggagcaggtgttgtcaaaagtccatcgctaagatgtgcttaaggatctcagcccaggagactgattttaaagaccaccgtaacaataacacggcactcgagtctttgagtcctgttaaggacgaagggaatagcctaatattaaatgacattatataaaagtatctaaataagatgactctccatatgctaaaaggcacatcggaccgtccgatgcagcatgattagagctgggcattcggtctattagagtaatttggttcgatctattcgggttttttaaatttcggattctgaaaaataagaaccgaaattttcaaaaataattttagaaactgaacccgaatagacccacaaattcggttcggtctattcagtccaccaaatagacccgaatagtagagagactagtatattttgttaaactatatacaatgaataattaattggaagtactattatt

SEQ ID NO: 72192 - DNA, 2584 bp, Zea Mays
tttccttctattcttatccagccaccgctcaagatcctctcagccttatccctaacccccctcctctctgttgatttcgtggagcaccagccgagctcctccctgcggctcgcctccctcacggcgccgcctgctccccattaccgacctccactccagcacctgagcaagcgctcctaaggtcatcttccccatcccctccccatcttcctctagtgctggctgccatgtcgtcttccccatccctcccatggtaccctcacctctgctcctcccagcgccctggctctgctcgaccttcatagtgagctcaccctcagccatggagggtgccgcctccacctcccccttggtgctcgccgagctcgccctcagccttgccgcgcccctgcttcctgttcccagtgccgacgcccctgcctttttccccatctccttcccttgacgtgctcgcccaggtcgcgcgcgtccagctcgccggccgaactccctcagcttcgtcttcaaccaccgccgaccccatggtgagctcgcacaaactccatctccctgtgcgccctttgttctgctccaaccgttctccacgccgtgttccccccccatggctccccttgcctctccggtcagcactagcccgaacggtatagcagcataccggtgccaaacccgtgttcgcgacgctcgccaagtgctcgatgaaataccgcagtgagctccacctcgagttgtgcagccccaacccgcgacgttgcaacacccttgccctccgtcgatgttgcgcttcgtgcattgctcctcgacgaagagccagaaccgtggtagacatgcatgcgcgatccaaactgatttcaccagatacgctaggtgattatgcgatatgaagggcatgggcctgactggaccacaagatgatatcgatggaccacaccctataggaatgatcagatcaagtaccaggatggaagatgctcaccaagtggtcgtcatttaacaacactaacgtagtgtttatcccaggcaagtcctgatgcatttaccacctccttctattttaaaggcttttatcacttatatgttgcattaggcgataggagttgtgtgaataaacagttgatgcattaccattccttggaatttgattactattccttgattcctgtttacaaaagagaactaaagatgcttagccctgcttagataattaaaagttgttctttttaaaaaaggatgatgtgttacacgagatatagtaaatttttgtgaaaaagaaattgggatggtgaatccatatggtcatgatggattcaacattcgtaaaagtacctttgtcaggtaccaaagattgggaaatggtttaaataaaatgagaccagacgttgagcaggaaaggtcgccgtttgtgtcgattaaggaccgttccgattgttggcctgatgatctaggatcctttaactggccacatgcctcatcatgggtaagctttgcctcggtcgaaccaataacagaacagctcacacacactgggagtggagagatggcgagagtaacgtctgcccacctggcaagtggctggatggtggggtgttgtgctctcgggtcgcgtgaacccgttctggtcttgagaaacccggtggcgagttgacatatacaagggttaagtgctacatatgtcatgtggttggagatccccagctgggtattaatcgattcggatcgtcgaacttctcggatatgaagactggatcttcgaccttcagcgtagataacaagtgaaactaaagatgctaaaatgaagctagtgtaggacaagtgaatgctctagattaggcaaatctagaatcaggaaagaactccacttgttaataaaaaatttggcataaggatccactactagtaagctcttctgcaaacaacgagtctttgaaatttgatgagctttgccttgattcccgacaaactagcatacccttgaaagtcttttctttagtcgggtaagtcttgctgagtaattgcgtactcagggttttattcccattgttgctgcaggttacaagtcgcttgattgtgattgatgttaagtgcagatgggctcgactttcttatataagtatatcccatctttagcttctttattgaggactgtcacttaagctagcatgtattttaaaacttataaatgttttatacattcaaattgtaatctttttgaatcaatttcttttgtaatcaactccgatgatatatattgtaatcttgttataacatgaaatgttgtaacttgtaaccattttgtaataaagaatttcccctgcaaatggtggtgtgtgatttgtgtttatttaatcacgtgatctttgcgataagtcatttatccggggtcctcggggcactcggacagatcctgttaagttgtttggtgcaaatacatagccgtctgaggtctttgagacaaggacagatcctattaagttgtttggtgcacatacataacttggcaggttctgcgacagtagcaatacaaacaaacatggtatatgcaaaattaacatcacaccaaacataagcacaactaaataataatgat

SEQ ID NO: 72193 - DNA, 4489 bp, Zea Mays
cagccttatccctaacccccctcctctctgttgatttcgtggagcaccagccgagctcctccctgcggctcgcctccctcacggcgccgcctgctccccattaccgacctccactccagcacctgagcaagcgctcctaaggtcatcttccccatcccctccccatcttcctctagtgctggctgccatgtcgtcttccccatccctcccatggtaccctcacctctgctcctcccagcgccctggctctgctcgaccttcatagtgagctcaccctcagccatggagggtgccgcctccacctcccccttggtgctcgccgagctcgccctcagccttgccgcgcccctgcttcctgttcccagtgccgacgcccctgcctttttccccatctccttcccttgacgtgctcgcccaggtcgcgcgcgtccagctcgccggccgaactccctcagcttcgtcttcaaccaccgccgaccccatggtgagctcgcacaaactccatctccctgtgcgccctttgttctgctccaaccgttctccacgccgtgttccccccccatggctccccttgcctctccggtcagcactagcccgaacggtatagcagcataccggtgccaaacccgtgttcgcgacgctcgccaagtgctcgatgaaataccgcagtgagctccacctcgagttgtgcagccccaacccgcgacgttgcaacacccttgccctccgtcgatgttgcgcttcgtgcattgctcctcgacgaagagccagaaccgtggtagacatgcatgcgcgatccaaactgatttcaccaggttgttcgctttatgtgattgtagttttctctaattacgtgtggtcgatggcgtgaatatgtgtgtgaaaatgtacgtctatgaatggtgggctaaatagttatgtggtcgatgattttttgtgattagcataggtgcactgtggtagctgtctccggatgtgtttgtgtgcttcttatggcaatgtactgggaaacatattcttcctcaatttcattcgtgatgagtatagttatattaggtgtcatattagatactgtgaaatgtctacccgcagatagtgataaggttgtttgtataattataaagttgtcgcatcgtgtgttgagatctagaattttgatgtaaatctaaatgaaggatactagtaagcaagtgtgatgtttgatgtaatgttttagtgcttgtgatgacatgaccctatttgcaagttaaaagtagagatactgttcgatgtgcgagttaaagttcgaattgttgttttatgtgaagagtattagttctatgtatgtaatatgtgattaagtaaatggttttagctctaattcataacaaggtattaaagcattctaagtgtcaagaatatgatagatgtagaaactagataggaacaaagttagagttcttgctgtttggactgcatgtccaatttcattacgtggctagttaagtaaagtaaaccgtgttttctgtagaagtgttatatataaaacttgtagataatcgttttatcttgcttgtataaaattttcatgaccataggtttagtagtttaggagttatgatgtttccaagtacagtacacgaatctgtccagattctgtatagatttcaaaaactgccttgtttggttaagttaaactaagaatcagcccttattaattatagaagaattgtagtacttttcttaggctttccaaaaagtcttggatcaccccttttggttgtctagaagtcaagttatggctgtttgaaatgtgatgtttgaatctgccaaaagtctggacagtaatgtttgattgtaataactgacttcgataaacattgaatcaccttgagatgattataaatgagttgtagacaattttattagctttctaaaaattctaggatcacatgttttggatgtctaaatctctagttatggaattttaaaatgagtagtcgaattatgtccaaatctggacagaatttacgtttagtaccgtttgaccattctaaaggtcgaatcttgttatgatgataatacaaaagttatagagaactttataagctttccaaaaagtcttagtttactatttttggatgaatatcgtgtaatttatgaataaaacaactgactgttgtactgctgtccaaaatcagcaatgattaagatgattacttggagtttcttttctgtgagtacgatgaccttagtaatacgaaggagttttagtagacatgtttacctagcattaaaaagttgattcagtaatattgtgtttataaaggtaatgtaaatgtcttatgattaagagcagtgtgatgttctatttgatggcatgctatgcataataacctggcgtacaaatgttgaagcatgttgaaatgcttctattcattgttctaagtttgggtccttagattttaaatcatggtatggtagaattctatgattcttggtaataacttatgtttggtaatggtgagtcctagtatttgatgttacgctttggttaggaagatgatagaacgtgtgtttcttattgttttataatgtttgagttagcccgaataagttgaagtgtggttgttgtgtttagtgatatatcgatatctagtgtttagttgtgaatgttttaatgtcattacattaggagtttaatttattatcgtgcgtccttgtttagccttatattattcatctttataatcattcatgtgcatcttgcatatcaaatagatacgctaggtgattatgcgatatgaagggcatgggcctgactggaccacaagatgatatcgatggaccacaccctataggaatgatcagatcaagtaccaggatggaagatgctcaccaagtggtcgtcatttaacaacactaacgtagtgtttatcccaggcaagtcctgatgcatttaccacctccttctattttaaaggcttttatcacttatatgttgcattaggcgataggagttgtgtgaataaacagttgatgcattaccattccttggaatttgattactattccttgattcctgtttacaaaagagaactaaagatgcttagccctgcttagataattaaaagttgttctttttaaaaaaggatgatgtgttacacgagatatagtaaatttttgtgaaaaagaaattgggatggtgaatccatatggtcatgatggattcaacattcgtaaaagtacctttgtcaggtaccaaagattgggaaatggtttaaataaaatgagaccagacgttgagcaggaaaggtcgccgtttgtgtcgattaaggaccgttccgattgttggcctgatgatctaggatcctttaactggccacatgcctcatcatgggtaagctttgcctcggtcgaaccaataacagaacagctcacacacactgggagtggagagatggcgagagtaacgtctgcccacctggcaagtggctggatggtggggtgttgtgctctcgggtcgcgtgaacccgttctggtcttgagaaacccggtggcgagttgacatatacaagggttaagtgctacatatgtcatgtggttggagatccccagctgggtattaatcgattcggatcgtcgaacttctcggatatgaagactggatcttcgaccttcagcgtagataacaagtgaaactaaagatgctaaaatgaagctagtgtaggacaagtgaatgctctagattaggcaaatctagaatcaggaaagaactccacttgttaataaaaaatttggcataaggatccactactagtaagctcttctgcaaacaacgagtctttgaaatttgatgagctttgccttgattcccgacaaactagcatacccttgaaagtcttttctttagtcgggtaagtcttgctgagtaattgcgtactcagggttttattcccattgttgctgcaggttacaagtcgcttgattgtgattgatgttaagtgcagatgggctcgactttcttatataagtatatcccatctttagcttctttattgaggactgtcacttaagctagcatgtattttaaaacttataaatgttttatacattcaaattgtaatctttttgaatcaatttcttttgtaatcaactccgatgatatatattgtaatcttgttataacatgaaatgttgtaacttgtaaccattttgtaataaagaatttcccctgcaaatggtggtgtgtgatttgtgtttatttaatcacgtgatctttgcgataagtcatttatccggggtcctcggggcactcggacagatcctgttaagttgtttggtgcaaatacatagccgtctgaggtctttgagacaaggacagatcctattaagttgtttggtgcacatacataacttggcaggttctgcgacagtagcaatacaaacaaacatggtatatgcaaaattaacatcacaccaaacataagcacaactaaataataatgat

SEQ ID NO: 72194 - DNA, 1373 bp, Zea Mays
ctggactatgttttcctacttctcttccaaaaataatgccccgtcgccattctggaacattgctaactggagactgaagtggtgaacgcggaagaaggttgtcattttgctaagttaaagttagatcattggagcaatgccgccccataagatcgagacggggcaccaagatgtggtgcatgatgtcgccatggattactatggcaagcgcctagctacatcctcctctgataatacaataaagatcattggcgtaagtggaacctcacaccagcagcttgcaactttgagtggacaccagggcccagtatggcaagtcgcatgggctcatcccaagtttggttccatgcttgcatcctgcagctacgacggccgagtgatcatctggaaggaaggaagcaagcctgatgaatgggcactggtacacacctttgctgagcacaagtcctccgtgaattccatcgcgtgggcgcctcatgagctgggtctatgcttggcttgtggttcatcagatgggaacatttcagtcttcactgctcgttctgatggaggttgggataccacgcgtattgatcaggcgcatccggttggtgtgacctcagtttcttgggctcctgcaatggcaccgggagctctaatcagcgcggggtcttctggtcagtttgagtatgttcagaaactcgcttccggtggctgtgacaacacggtgaaggtgtggaagctcaacaacggcagttggcggatggactgtttccccgccctacagatgcacaaggactgggtgagagacgtcgcgtgggcgccaaacctgggccttccaaagtccaccatcgccagcgcctctcaggatggaacagttgttatctggacagcagcaaaagaaggcgagcagtgggaaggccggttgctgtatgatttcaggacccctgtgtggaggctgtcgtggtcactgactgggaatatactggcggtgtctgacggcaacaacaatgtgaccctgtggaaggaagctgtggacggcgaatggcagcaagtgacgactgttgagccataggtctctagagttgtccctcgtctatattgccttaatacttgtagtttttgtgtacctatggccctgtgtgggtagcaagcaggccacggtgcatgactacttgagacgtgatttcaggctcgggcagaagtgaaaaatgaacttgttgtatatgtggagcattctgtttctcgattcagtgccttttctttcccatggttaattcgttgctcactcaggtgttcatatatcagttattctgttcaggataatggttaattggatatatttggtgctctaatgcaagctttgcacttgtagcgcaaagttttttccggtg

SEQ ID NO: 72195 - DNA, 1331 bp, Zea Mays
tcatatgaatatatgatgtttatctcggagactgaagtggtgaacgcggaagaaggttgtcattttgctaagttaaagttagatcattggagcaatgccgccccataagatcgagacggggcaccaagatgtggtgcatgatgtcgccatggattactatggcaagcgcctagctacatcctcctctgataatacaataaagatcattggcgtaagtggaacctcacaccagcagcttgcaactttgagtggacaccagggcccagtatggcaagtcgcatgggctcatcccaagtttggttccatgcttgcatcctgcagctacgacggccgagtgatcatctggaaggaaggaagcaagcctgatgaatgggcactggtacacacctttgctgagcacaagtcctccgtgaattccatcgcgtgggcgcctcatgagctgggtctatgcttggcttgtggttcatcagatgggaacatttcagtcttcactgctcgttctgatggaggttgggataccacgcgtattgatcaggcgcatccggttggtgtgacctcagtttcttgggctcctgcaatggcaccgggagctctaatcagcgcggggtcttctggtcagtttgagtatgttcagaaactcgcttccggtggctgtgacaacacggtgaaggtgtggaagctcaacaacggcagttggcggatggactgtttccccgccctacagatgcacaaggactgggtgagagacgtcgcgtgggcgccaaacctgggccttccaaagtccaccatcgccagcgcctctcaggatggaacagttgttatctggacagcagcaaaagaaggcgagcagtgggaaggccggttgctgtatgatttcaggacccctgtgtggaggctgtcgtggtcactgactgggaatatactggcggtgtctgacggcaacaacaatgtgaccctgtggaaggaagctgtggacggcgaatggcagcaagtgacgactgttgagccataggtctctagagttgtccctcgtctatattgccttaatacttgtagtttttgtgtacctatggccctgtgtgggtagcaagcaggccacggtgcatgactacttgagacgtgatttcaggctcgggcagaagtgaaaaatgaacttgttgtatatgtggagcattctgtttctcgattcagtgccttttctttcccatggttaattcgttgctcactcaggtgttcatatatcagttattctgttcaggataatggttaattggatatatttggtgctctaatgcaagctttgcacttgtagcgcaaagttttttccggtg

SEQ ID NO: 72196 - DNA, 1282 bp, Zea Mays
ggaaaagtagttcgtgctccaaaaccaaaaggagattaacaccattttttgacaaagaaaaaaaaagctaatggcgagaaacataaattcagattatatagacttttcacatttgggtggattcgacatgggcatcaattttgacgaatttgaagaaaatgtgaaaaagctcatggagtatcttgattcagctcatgataaagctgtcgaattcattgaagatgtccatgcaaaattttatggtccctttactgatgatgaggtgccaaataacgatcaatctagtcgctatgttatcaccgagtcttcaccaacatctattgagaaggagctagttggaccaaacactgaactttcaactcctcctgcatgcttcattaccatggagaacagttctactggctgtgatactgatgctcataaaacccaatcagaatcattttcaacaaaaagtacagatatcctaatacacactacagatttttgtaatgcactgctgctagaagattctagcacaaattatgagatgacagtttgcttgcaaccctaccaggcaactttgcctgggacacaagcaaaccggcctgaagtgcacatggtatcaaccatatcatacagtgcaaatagccctgtggaatcaactatacatggaacttgcacttcacatgactctagcacaagtgcgtccagctgtgctgacgatccaagtatgtcgactgacagcatggttaaatctgtggacatggatggtcagaagcacatgaaaaacgacaaaattaaggtgcacctagcccctcaaccagaaaacgcgtcatttaagaaaatgcttttgaggaacctgtcgaggaaactcaggtggtcaaaggcgcaggcagacacgcatcagaccatggcgcctggatcccagggcgcagaagaccctggatatccactggtttctccatcggatgatgatctggaggatagttgggagatcctgtaatatataataaaccgccaagaacctccgtgacttttcttttttgagctaagtttatccatgtcaggttaactggttttgagggaaggcacgtggcgtattttttacagatctccttggttacagacacgtgagatgttgcacgtacgtgcggcacatccatcggcataataactgtaattctagttgaggatacgtaaagctgtttggattctgtttcggaccttaactgcatgcagacaagacaatgagacaagcgtgtgtccacagcttcgactgtcagatctgtcactagctagtcct

SEQ ID NO: 72197 - DNA, 1866 bp, Zea Mays
gttcgcgattggccactattgctttgtttgttgttttcttttctttcttccccgaaaaggctggacggcggctccgagctcactcgtcgccggcggctgttgcaggagattaacaccattttttgacaaagaaaaaaaaagctaatggcgagaaacataaattcagattatatagacttttcacatttgggtggattcgacatgggcatcaattttgacgaatttgaagaaaatgtgaaaaagctcatggaggattttcttgacaatgctttgttactaactttccccattcatggacggatcccgatcaagtatcttgattcagctcatgataaagctgtcgaattcattgaagatgtccatgcaaaattttatggtccctttactgatgatgaggtgccaaataacgatcaatctagtcgctatgttatcaccgagtcttcaccaacatctattgagaaggagctagttggaccaaacactgaactttcaactcctcctgcatgcttcattaccatggagaacagttctactggctgtgatactgatgctcataaaacccaatcagaatcattttcaacaaaaagtacaggtttatcctcaatgaatcatgtgtatccagaaaataatttatctgaaggagctcatatcgactcaaacgatctttgtattagaatatatgacagctctgaggaagttattttatggaatccagtgagttctgtaaaaccacagcaatcacatgaacttaccaccatacctcaagatgatcatgcacttcatgctttggaaacagaagtgacagagcaagttggactcaactgttctggacattcagattcttctgtttgcagtggagtgtcaccgctagaaaattcttgtgcaaattgtgaagagaaaatggtattacacagtgcaaatgaccctgttggagtaacagtgcatgattccactaccctaacccaagaatatcatgtatcttacacattacacatggaacaaatgatagagcaagctggactgcattgttctggacattcagatatcctaatacacactacagatttttgtaatgcactgctgctagaagattctagcacaaattatgagatgacagtttgcttgcaaccctaccaggcaactttgcctgggacacaagcaaaccggcctgaagtgcacatggtatcaaccatatcatacagtgcaaatagccctgtggaatcaactatacatggaacttgcacttcacatgactctagcacaagtgcgtccagctgtgctgacgatccaagtatgtcgactgacagcatggttaaatctgtggacatggatggtcagaagcacatgaaaaacgacaaaattaaggtgcacctagcccctcaaccagaaaacgcgtcatttaagaaaatgcttttgaggaacctgtcgaggaaactcaggtggtcaaaggcgcaggcagacacgcatcagaccatggcgcctggatcccagggcgcagaagaccctggatatccactggtttctccatcggatgatgatctggaggatagttgggagatcctgtaatatataataaaccgccaagaacctccgtgacttttcttttttgagctaagtttatccatgtcaggttaactggttttgagggaaggcacgtggcgtattttttacagatctccttggttacagacacgtgagatgttgcacgtacgtgcggcacatccatcggcataataactgtaattctagttgaggatacgtaaagctgtttggattctgtttcggaccttaactgcatgcagacaagacaatgagacaagcgtgtgtccacagcttcgactgtcagatctgtcactagctagtcct

SEQ ID NO: 72198 - DNA, 2079 bp, Zea Mays
gttttcttttctttcttccccgaaaaggctggacggcggctccgagctcactcgtcgccggcggctgttgcaggagattaacaccattttttgacaaagaaaaaaaaagctaatggcgagaaacataaattcagattatatagacttttcacatttgggtggattcgacatgggcatcaattttgacgaatttgaagaaaatgtgaaaaagctcatggagtatcttgattcagctcatgataaagctgtcgaattcattgaagatgtccatgcaaaattttatggtccctttactgatgatgaggtgccaaataacgatcaatctagtcgctatgttatcaccgagtcttcaccaacatctattgagaaggagctagttggaccaaacactgaactttcaactcctcctgcatgcttcattaccatggagaacagttctactggctgtgatactgatgctcataaaacccaatcagaatcattttcaacaaaaagtacaggtttatcctcaatgaatcatgtgtatccagaaaataatttatctgaaggagctcatatcgactcaaacgatctttgtattagaatatatgacagctctgaggaagttattttatggaatccagtgagttctgtaaaaccacagcaatcacatgaacttaccaccatacctcaagatgatcatgcacttcatgctttggaaacagaagtgacagagcaagttggactcaactgttctggacattcagattcttctgtttgcagtggagtgtcaccgctagaaaattcttgtgcaaattgtgaagagaaaatggtattacacagtgcaaatgaccctgttggagtaacagtgcatggtttgcatctttcaccttttaactgtgactgattgttctgttacctctccccttgtatttacgaaaatattctcaatcatataccttttattaaatatgcatgacaacaatctgtcgtacttagggaaaagtaattagatgtgagtatacaaacttgtatgatttagcaaaccacattatggtcctgcactcctgcttgttaagatgtataactggcttactttaacatttaaccacatgtcataaatacactaacctgttttacatttattttgattaagaaaatggtgtacgtgtcctggcagattccactaccctaacccaagaatatcatgtatcttacacattacacatggaacaaatgatagagcaagctggactgcattgttctggacattcagatatcctaatacacactacagatttttgtaatgcactgctgctagaagattctagcacaaattatgagatgacagtttgcttgcaaccctaccaggcaactttgcctgggacacaagcaaaccggcctgaagtgcacatggtatcaaccatatcatacagtgcaaatagccctgtggaatcaactatacatggaacttgcacttcacatgactctagcacaagtgcgtccagctgtgctgacgatccaagtatgtcgactgacagcatggttaaatctgtggacatggatggtcagaagcacatgaaaaacgacaaaattaaggtgcacctagcccctcaaccagaaaacgcgtcatttaagaaaatgcttttgaggaacctgtcgaggaaactcaggtggtcaaaggcgcaggcagacacgcatcagaccatggcgcctggatcccagggcgcagaagaccctggatatccactggtttctccatcggatgatgatctggaggatagttgggagatcctgtaatatataataaaccgccaagaacctccgtgacttttcttttttgagctaagtttatccatgtcaggttaactggttttgagggaaggcacgtggcgtattttttacagatctccttggttacagacacgtgagatgttgcacgtacgtgcggcacatccatcggcataataactgtaattctagttgaggatacgtaaagctgtttggattctgtttcggaccttaactgcatgcagacaagacaatgagacaagcgtgtgtccacagcttcgactgtcagatctgtcactagctagtcct

SEQ ID NO: 72199 - DNA, 2132 bp, Zea Mays
tttctttcttccccgaaaaggctggacggcggctccgagctcactcgtcgccggcggctgttgcaggagattaacaccattttttgacaaagaaaaaaaaagctaatggcgagaaacataaattcagattatatagacttttcacatttgggtggattcgacatgggcatcaattttgacgaatttgaagaaaatgtgaaaaagctcatggaggattttcttgacaatgctttgttactaactttccccattcatggacggatcccgatcaagtatcttgattcagctcatgataaagctgtcgaattcattgaagatgtccatgcaaaattttatggtccctttactgatgatgaggtgccaaataacgatcaatctagtcgctatgttatcaccgagtcttcaccaacatctattgagaaggagctagttggaccaaacactgaactttcaactcctcctgcatgcttcattaccatggagaacagttctactggctgtgatactgatgctcataaaacccaatcagaatcattttcaacaaaaagtacaggtttatcctcaatgaatcatgtgtatccagaaaataatttatctgaaggagctcatatcgactcaaacgatctttgtattagaatatatgacagctctgaggaagttattttatggaatccagtgagttctgtaaaaccacagcaatcacatgaacttaccaccatacctcaagatgatcatgcacttcatgctttggaaacagaagtgacagagcaagttggactcaactgttctggacattcagattcttctgtttgcagtggagtgtcaccgctagaaaattcttgtgcaaattgtgaagagaaaatggtattacacagtgcaaatgaccctgttggagtaacagtgcatggtttgcatctttcaccttttaactgtgactgattgttctgttacctctccccttgtatttacgaaaatattctcaatcatataccttttattaaatatgcatgacaacaatctgtcgtacttagggaaaagtaattagatgtgagtatacaaacttgtatgatttagcaaaccacattatggtcctgcactcctgcttgttaagatgtataactggcttactttaacatttaaccacatgtcataaatacactaacctgttttacatttattttgattaagaaaatggtgtacgtgtcctggcagattccactaccctaacccaagaatatcatgtatcttacacattacacatggaacaaatgatagagcaagctggactgcattgttctggacattcagatatcctaatacacactacagatttttgtaatgcactgctgctagaagattctagcacaaattatgagatgacagtttgcttgcaaccctaccaggcaactttgcctgggacacaagcaaaccggcctgaagtgcacatggtatcaaccatatcatacagtgcaaatagccctgtggaatcaactatacatggaacttgcacttcacatgactctagcacaagtgcgtccagctgtgctgacgatccaagtatgtcgactgacagcatggttaaatctgtggacatggatggtcagaagcacatgaaaaacgacaaaattaaggtgcacctagcccctcaaccagaaaacgcgtcatttaagaaaatgcttttgaggaacctgtcgaggaaactcaggtggtcaaaggcgcaggcagacacgcatcagaccatggcgcctggatcccagggcgcagaagaccctggatatccactggtttctccatcggatgatgatctggaggatagttgggagatcctgtaatatataataaaccgccaagaacctccgtgacttttcttttttgagctaagtttatccatgtcaggttaactggttttgagggaaggcacgtggcgtattttttacagatctccttggttacagacacgtgagatgttgcacgtacgtgcggcacatccatcggcataataactgtaattctagttgaggatacgtaaagctgtttggattctgtttcggaccttaactgcatgcagacaagacaatgagacaagcgtgtgtccacagcttcgactgtcagatctgtcactagctagtcct

SEQ ID NO: 72200 - DNA, 1788 bp, Zea Mays
ctttcttccccgaaaaggctggacggcggctccgagctcactcgtcgccggcggctgttgcaggagattaacaccattttttgacaaagaaaaaaaaagctaatggcgagaaacataaattcagattatatagacttttcacatttgggtggattcgacatgggcatcaattttgacgaatttgaagaaaatgtgaaaaagctcatggagtatcttgattcagctcatgataaagctgtcgaattcattgaagatgtccatgcaaaattttatggtccctttactgatgatgaggtgccaaataacgatcaatctagtcgctatgttatcaccgagtcttcaccaacatctattgagaaggagctagttggaccaaacactgaactttcaactcctcctgcatgcttcattaccatggagaacagttctactggctgtgatactgatgctcataaaacccaatcagaatcattttcaacaaaaagtacaggtttatcctcaatgaatcatgtgtatccagaaaataatttatctgaaggagctcatatcgactcaaacgatctttgtattagaatatatgacagctctgaggaagttattttatggaatccagtgagttctgtaaaaccacagcaatcacatgaacttaccaccatacctcaagatgatcatgcacttcatgctttggaaacagaagtgacagagcaagttggactcaactgttctggacattcagattcttctgtttgcagtggagtgtcaccgctagaaaattcttgtgcaaattgtgaagagaaaatggtattacacagtgcaaatgaccctgttggagtaacagtgcatgaaaatggtgtacgtgtcctggcagattccactaccctaacccaagaatatcatgtatcttacacattacacatggaacaaatgatagagcaagctggactgcattgttctggacattcagatatcctaatacacactacagatttttgtaatgcactgctgctagaagattctagcacaaattatgagatgacagtttgcttgcaaccctaccaggcaactttgcctgggacacaagcaaaccggcctgaagtgcacatggtatcaaccatatcatacagtgcaaatagccctgtggaatcaactatacatggaacttgcacttcacatgactctagcacaagtgcgtccagctgtgctgacgatccaagtatgtcgactgacagcatggttaaatctgtggacatggatggtcagaagcacatgaaaaacgacaaaattaaggtgcacctagcccctcaaccagaaaacgcgtcatttaagaaaatgcttttgaggaacctgtcgaggaaactcaggtggtcaaaggcgcaggcagacacgcatcagaccatggcgcctggatcccagggcgcagaagaccctggatatccactggtttctccatcggatgatgatctggaggatagttgggagatcctgtaatatataataaaccgccaagaacctccgtgacttttcttttttgagctaagtttatccatgtcaggttaactggttttgagggaaggcacgtggcgtattttttacagatctccttggttacagacacgtgagatgttgcacgtacgtgcggcacatccatcggcataataactgtaattctagttgaggatacgtaaagctgtttggattctgtttcggaccttaactgcatgcagacaagacaatgagacaagcgtgtgtccacagcttcgactgtcagatctgtcactagctagtcct

SEQ ID NO: 72201 - DNA, 1764 bp, Zea Mays
ctttcttccccgaaaaggctggacggcggctccgagctcactcgtcgccggcggctgttgcaggagattaacaccattttttgacaaagaaaaaaaaagctaatggcgagaaacataaattcagattatatagacttttcacatttgggtggattcgacatgggcatcaattttgacgaatttgaagaaaatgtgaaaaagctcatggagtatcttgattcagctcatgataaagctgtcgaattcattgaagatgtccatgcaaaattttatggtccctttactgatgatgaggtgccaaataacgatcaatctagtcgctatgttatcaccgagtcttcaccaacatctattgagaaggagctagttggaccaaacactgaactttcaactcctcctgcatgcttcattaccatggagaacagttctactggctgtgatactgatgctcataaaacccaatcagaatcattttcaacaaaaagtacaggtttatcctcaatgaatcatgtgtatccagaaaataatttatctgaaggagctcatatcgactcaaacgatctttgtattagaatatatgacagctctgaggaagttattttatggaatccagtgagttctgtaaaaccacagcaatcacatgaacttaccaccatacctcaagatgatcatgcacttcatgctttggaaacagaagtgacagagcaagttggactcaactgttctggacattcagattcttctgtttgcagtggagtgtcaccgctagaaaattcttgtgcaaattgtgaagagaaaatggtattacacagtgcaaatgaccctgttggagtaacagtgcatgattccactaccctaacccaagaatatcatgtatcttacacattacacatggaacaaatgatagagcaagctggactgcattgttctggacattcagatatcctaatacacactacagatttttgtaatgcactgctgctagaagattctagcacaaattatgagatgacagtttgcttgcaaccctaccaggcaactttgcctgggacacaagcaaaccggcctgaagtgcacatggtatcaaccatatcatacagtgcaaatagccctgtggaatcaactatacatggaacttgcacttcacatgactctagcacaagtgcgtccagctgtgctgacgatccaagtatgtcgactgacagcatggttaaatctgtggacatggatggtcagaagcacatgaaaaacgacaaaattaaggtgcacctagcccctcaaccagaaaacgcgtcatttaagaaaatgcttttgaggaacctgtcgaggaaactcaggtggtcaaaggcgcaggcagacacgcatcagaccatggcgcctggatcccagggcgcagaagaccctggatatccactggtttctccatcggatgatgatctggaggatagttgggagatcctgtaatatataataaaccgccaagaacctccgtgacttttcttttttgagctaagtttatccatgtcaggttaactggttttgagggaaggcacgtggcgtattttttacagatctccttggttacagacacgtgagatgttgcacgtacgtgcggcacatccatcggcataataactgtaattctagttgaggatacgtaaagctgtttggattctgtttcggaccttaactgcatgcagacaagacaatgagacaagcgtgtgtccacagcttcgactgtcagatctgtcactagctagtcct

SEQ ID NO: 72202 - DNA, 1749 bp, Zea Mays
ctttcttccccgaaaaggctggacggcggctccgagctcactcgtcgccggcggctgttgcaggagattaacaccattttttgacaaagaaaaaaaaagctaatggcgagaaacataaattcagattatatagacttttcacatttgggtggattcgacatgggcatcaattttgacgaatttgaagaaaatgtgaaaaagctcatggagtatcttgattcagctcatgataaagctgtcgaattcattgaagatgtccatgcaaaattttatggtccctttactgatgatgaggtgccaaataacgatcaatctagtcgctatgttatcaccgagtcttcaccaacatctattgagaaggagctagttggaccaaacactgaactttcaactcctcctgcatgcttcattaccatggagaacagttctactggctgtgatactgatgctcataaaacccaatcagaatcattttcaacaaaaagtacaggtttatcctcaatgaatcatgtgtatccagaaaataatttatctgaaggagctcatatcgactcaaacgatctttgtattagaatatatgacagctctgaggaagttattttatggaatccagtgagttctgtaaaaccacagcaatcacatgaacttaccaccatacctcaagatgatcatgcacttcatgctttggaaacagaagtgacagagcaagttggactcaactgttctggacattcagattcttctgtttgcagtggagtgtcaccgctagaaaattcttgtgcaaattgtgaagagaaaatggtattacacagtgcaaatgaccctgttggagtaacagtgcatgaaaatggtgtacgtgtcctggcagattccactaccctaacccaagaatatcatgtatcttacacattacacatggaacaaatgatagagcaagctggactgcattgttctggacattcagatatcctaatacacactacagatttttgtaatgcactgctgctagaagattctagcacaaattatgagatgacagtttgcttgcaaccctaccaggcaactttgcctgggacacaagcaaaccggcctgaagtgcacatggtatcaaccatatcatacagtgcaaatagccctgtggaatcaactatacatggaacttgcacttcacatgactctagcacaagtgcgtccagctgtgctgacgatccaagtatgtcgactgacagcatggttaaatctgtggacatggatggtcagaagcacatgaaaaacgacaaaattaagaaaatgcttttgaggaacctgtcgaggaaactcaggtggtcaaaggcgcaggcagacacgcatcagaccatggcgcctggatcccagggcgcagaagaccctggatatccactggtttctccatcggatgatgatctggaggatagttgggagatcctgtaatatataataaaccgccaagaacctccgtgacttttcttttttgagctaagtttatccatgtcaggttaactggttttgagggaaggcacgtggcgtattttttacagatctccttggttacagacacgtgagatgttgcacgtacgtgcggcacatccatcggcataataactgtaattctagttgaggatacgtaaagctgtttggattctgtttcggaccttaactgcatgcagacaagacaatgagacaagcgtgtgtccacagcttcgactgtcagatctgtcactagctagtcct

SEQ ID NO: 72203 - DNA, 2028 bp, Zea Mays
ctggggttctgcaagtgcaaggagagattaacaccattttttgacaaagaaaaaaaaagctaatggcgagaaacataaattcagattatatagacttttcacatttgggtggattcgacatgggcatcaattttgacgaatttgaagaaaatgtgaaaaagctcatggaggtatatcttgattcagctcatgataaagctgtcgaattcattgaagatgtccatgcaaaattttatggtccctttactgatgatgaggtgccaaataacgatcaatctagtcgctatgttatcaccgagtcttcaccaacatctattgagaaggagctagttggaccaaacactgaactttcaactcctcctgcatgcttcattaccatggagaacagttctactggctgtgatactgatgctcataaaacccaatcagaatcattttcaacaaaaagtacaggtttatcctcaatgaatcatgtgtatccagaaaataatttatctgaaggagctcatatcgactcaaacgatctttgtattagaatatatgctctgaggaagttattttatggaatccagtgagttctgtaaaaccacagcaatcacatgaacttaccaccatacctcaagatgatcatgcacttcatgctttggaaacagaagtgacagagcaagttggactcaactgttctggacattcagattcttctgtttgcagtggagtgtcaccgctagaaaattcttgtgcaaattgtgaagagaaaatggtattacacagtgcaaatgaccctgttggagtaacagtgcatggtttgcatctttcaccttttaactgtgactgattgttctgttacctctccccttgtatttacgaaaatattctcaatcatataccttttattaaatatgcatgacaacaatctgtcgtacttagggaaaagtaattagatgtgagtatacaaacttgtatgatttagcaaaccacattatggtcctgcactcctgcttgttaagatgtataactggcttactttaacatttaaccacatgtcataaatacactaacctgttttacatttattttgattaagaaaatggtgtacgtgtcctggcagattccactaccctaacccaagaatatcatgtatcttacacattacacatggaacaaatgatagagcaagctggactgcattgttctggacattcagatatcctaatacacactacagatttttgtaatgcactgctgctagaagattctagcacaaattatgagatgacagtttgcttgcaaccctaccaggcaactttgcctgggacacaagcaaaccggcctgaagtgcacatggtatcaaccatatcatacagtgcaaatagccctgtggaatcaactatacatggaacttgcacttcacatgactctagcacaagtgcgtccagctgtgctgacgatccaagtatgtcgactgacagcatggttaaatctgtggacatggatggtcagaagcacatgaaaaacgacaaaattaaggtgcacctagcccctcaaccagaaaacgcgtcatttaagaaaatgcttttgaggaacctgtcgaggaaactcaggtggtcaaaggcgcaggcagacacgcatcagaccatggcgcctggatcccagggcgcagaagaccctggatatccactggtttctccatcggatgatgatctggaggatagttgggagatcctgtaatatataataaaccgccaagaacctccgtgacttttcttttttgagctaagtttatccatgtcaggttaactggttttgagggaaggcacgtggcgtattttttacagatctccttggttacagacacgtgagatgttgcacgtacgtgcggcacatccatcggcataataactgtaattctagttgaggatacgtaaagctgtttggattctgtttcggaccttaactgcatgcagacaagacaatgagacaagcgtgtgtccacagcttcgactgtcagatctgtcactagctagtcct

SEQ ID NO: 72204 - DNA, 1634 bp, Zea Mays
gattaacaccattttttgacaaagaaaaaaaaagctaatggcgagaaacataaattcagattatatagacttttcacatttgggtggattcgacatgggcatcaattttgacgaatttgaagaaaatgtgaaaaagctcatggagacagctctgaggaagttattttatggaatccagtgagttctgtaaaaccacagcaatcacatgaacttaccaccatacctcaagatgatcatgcacttcatgctttggaaacagaagtgacagagcaagttggactcaactgttctggacattcagattcttctgtttgcagtggagtgtcaccgctagaaaattcttgtgcaaattgtgaagagaaaatggtattacacagtgcaaatgaccctgttggagtaacagtgcatggtttgcatctttcaccttttaactgtgactgattgttctgttacctctccccttgtatttacgaaaatattctcaatcatataccttttattaaatatgcatgacaacaatctgtcgtacttagggaaaagtaattagatgtgagtatacaaacttgtatgatttagcaaaccacattatggtcctgcactcctgcttgttaagatgtataactggcttactttaacatttaaccacatgtcataaatacactaacctgttttacatttattttgattaagaaaatggtgtacgtgtcctggcagattccactaccctaacccaagaatatcatgtatcttacacattacacatggaacaaatgatagagcaagctggactgcattgttctggacattcagatatcctaatacacactacagatttttgtaatgcactgctgctagaagattctagcacaaattatgagatgacagtttgcttgcaaccctaccaggcaactttgcctgggacacaagcaaaccggcctgaagtgcacatggtatcaaccatatcatacagtgcaaatagccctgtggaatcaactatacatggaacttgcacttcacatgactctagcacaagtgcgtccagctgtgctgacgatccaagtatgtcgactgacagcatggttaaatctgtggacatggatggtcagaagcacatgaaaaacgacaaaattaaggtgcacctagcccctcaaccagaaaacgcgtcatttaagaaaatgcttttgaggaacctgtcgaggaaactcaggtggtcaaaggcgcaggcagacacgcatcagaccatggcgcctggatcccagggcgcagaagaccctggatatccactggtttctccatcggatgatgatctggaggatagttgggagatcctgtaatatataataaaccgccaagaacctccgtgacttttcttttttgagctaagtttatccatgtcaggttaactggttttgagggaaggcacgtggcgtattttttacagatctccttggttacagacacgtgagatgttgcacgtacgtgcggcacatccatcggcataataactgtaattctagttgaggatacgtaaagctgtttggattctgtttcggaccttaactgcatgcagacaagacaatgagacaagcgtgtgtccacagcttcgactgtcagatctgtcactagctagtcct

SEQ ID NO: 72205 - DNA, 1233 bp, Zea Mays
atggcgagaaacataaattcagattatatagacttttcacatttgggtggattcgacatgggcatcaattttgacgaatttgaagaaaatgtgaaaaagctcatggaggattttcttgacaatgctttgttactaactttccccattcatggacggatcccgatcaagtatcttgattcagctcatgataaagctgtcgaattcattgaagatgtccatgcaaaattttatggtccctttactgatgatgaggtgccaaataacgatcaatctagtcgctatgttatcaccgagtcttcaccaacatctattgagaaggagctagttggaccaaacactgaactttcaactcctcctgcatgcttcattaccatggagaacagttctactggctgtgatactgatgctcataaaacccaatcagaatcattttcaacaaaaagtacagatatcctaatacacactacagatttttgtaatgcactgctgctagaagattctagcacaaattatgagatgacagtttgcttgcaaccctaccaggcaactttgcctgggacacaagcaaaccggcctgaagtgcacatggtatcaaccatatcatacagtgcaaatagccctgtggaatcaactatacatggaacttgcacttcacatgactctagcacaagtgcgtccagctgtgctgacgatccaagtatgtcgactgacagcatggttaaatctgtggacatggatggtcagaagcacatgaaaaacgacaaaattaagaaaatgcttttgaggaacctgtcgaggaaactcaggtggtcaaaggcgcaggcagacacgcatcagaccatggcgcctggatcccagggcgcagaagaccctggatatccactggtttctccatcggatgatgatctggaggatagttgggagatcctgtaatatataataaaccgccaagaacctccgtgacttttcttttttgagctaagtttatccatgtcaggttaactggttttgagggaaggcacgtggcgtattttttacagatctccttggttacagacacgtgagatgttgcacgtacgtgcggcacatccatcggcataataactgtaattctagttgaggatacgtaaagctgtttggattctgtttcggaccttaactgcatgcagacaagacaatgagacaagcgtgtgtccacagcttcgactgtcagatctgtcactagctagtcct

SEQ ID NO: 72206 - DNA, 1292 bp, Zea Mays
atggcgagaaacataaattcagattatatagacttttcacatttgggtggattcgacatgggcatcaattttgacgaatttgaagaaaatgtgaaaaagctcatggagacagctctgaggaagttattttatggaatccagtgagttctgtaaaaccacagcaatcacatgaacttaccaccatacctcaagatgatcatgcacttcatgctttggaaacagaagtgacagagcaagttggactcaactgttctggacattcagattcttctgtttgcagtggagtgtcaccgctagaaaattcttgtgcaaattgtgaagagaaaatggtattacacagtgcaaatgaccctgttggagtaacagtgcatgattccactaccctaacccaagaatatcatgtatcttacacattacacatggaacaaatgatagagcaagctggactgcattgttctggacattcagatatcctaatacacactacagatttttgtaatgcactgctgctagaagattctagcacaaattatgagatgacagtttgcttgcaaccctaccaggcaactttgcctgggacacaagcaaaccggcctgaagtgcacatggtatcaaccatatcatacagtgcaaatagccctgtggaatcaactatacatggaacttgcacttcacatgactctagcacaagtgcgtccagctgtgctgacgatccaagtatgtcgactgacagcatggttaaatctgtggacatggatggtcagaagcacatgaaaaacgacaaaattaaggtgcacctagcccctcaaccagaaaacgcgtcatttaagaaaatgcttttgaggaacctgtcgaggaaactcaggtggtcaaaggcgcaggcagacacgcatcagaccatggcgcctggatcccagggcgcagaagaccctggatatccactggtttctccatcggatgatgatctggaggatagttgggagatcctgtaatatataataaaccgccaagaacctccgtgacttttcttttttgagctaagtttatccatgtcaggttaactggttttgagggaaggcacgtggcgtattttttacagatctccttggttacagacacgtgagatgttgcacgtacgtgcggcacatccatcggcataataactgtaattctagttgaggatacgtaaagctgtttggattctgtttcggaccttaactgcatgcagacaagacaatgagacaagcgtgtgtccacagcttcgactgtcagatctgtcactagctagtcct

SEQ ID NO: 72207 - DNA, 1062 bp, Zea Mays
caaatttcttattcttctgtttgcagtggagtgtcaccgctagaaaattcttgtgcaaattgtgaagagaaaatggtattacacagtgcaaatgaccctgttggagtaacagtgcatgaaaatggtgtacgtgtcctggcagattccactaccctaacccaagaatatcatgtatcttacacattacacatggaacaaatgatagagcaagctggactgcattgttctggacattcagatatcctaatacacactacagatttttgtaatgcactgctgctagaagattctagcacaaattatgagatgacagtttgcttgcaaccctaccaggcaactttgcctgggacacaagcaaaccggcctgaagtgcacatggtatcaaccatatcatacagtgcaaatagccctgtggaatcaactatacatggaacttgcacttcacatgactctagcacaagtgcgtccagctgtgctgacgatccaagtatgtcgactgacagcatggttaaatctgtggacatggatggtcagaagcacatgaaaaacgacaaaattaaggtgcacctagcccctcaaccagaaaacgcgtcatttaagaaaatgcttttgaggaacctgtcgaggaaactcaggtggtcaaaggcgcaggcagacacgcatcagaccatggcgcctggatcccagggcgcagaagaccctggatatccactggtttctccatcggatgatgatctggaggatagttgggagatcctgtaatatataataaaccgccaagaacctccgtgacttttcttttttgagctaagtttatccatgtcaggttaactggttttgagggaaggcacgtggcgtattttttacagatctccttggttacagacacgtgagatgttgcacgtacgtgcggcacatccatcggcataataactgtaattctagttgaggatacgtaaagctgtttggattctgtttcggaccttaactgcatgcagacaagacaatgagacaagcgtgtgtccacagcttcgactgtcagatctgtcactagctagtcct

SEQ ID NO: 72208 - DNA, 881 bp, Zea Mays
gatactagctactccttactaatcctgggcagggcaggaggaggggagctctgcccggccatgcagcgtggggatccgctggtggtgggccgcatcatcggcgacgtggtggaccccttcgtgcgccgggtgccgctccgcgtcgcctacgccgcgcgcgaggtctccaacggctgcgagctcaggccctccgccatcgccgaccagccgcgcgtcgaggtcggcggacccgacatgcgcaccttctacaccctcgtgatggtagatcctgatgcgccgagccccagcgatcccaacctcagggagtacctgcactgcatgctacaacacacgtactgtcaggatcttgtctacattctccacctcgtacggctggtcactgatattccggcgacgactggagtatcttttgggaccgaggtcgtgtgctacgagagcccacggccggtgctggggatccaccgggtcgtgtttctgctcttccagcagctcggccggcagacggtgtacgccccggggtggcggcagaacttcagcacccgcgacttcgccgagctctacaacctcggcttgccggtcgccgccgtctacttcaactgccagagggagtccggaaccggtgggagaagaatgtgatctcgacccggccgggtggaaattaataagatgacgggtaatcgggtatatgtatatatttatatatatatgtatatgtacgtgtatttgatctggtggcctttggttatatttgggtggggtgtatttgatatattatctgtggcagattggcgcattctctggcgcatatttgatagctacatgtatctatttatacagatataaagcgagcaataatatgcatatgagagggttcagccaca

SEQ ID NO: 72209 - DNA, 878 bp, Zea Mays
agcaaccaaacacccccttagccgaattacgcggtagatccaatgcccagccctattccaactcaattcgccgcgtcacctcctcgtctgctttgacgacccgaccacgccagccatggacgccctgacgcgcctccaccgctccctcgtcggcggcgacgacgaggatcagccggaggactccatccttgctgataccgaagacctctgctccctctcccctctccagaggatctacgccttcgcggcatgtttggtggccggactcaccctcatgatcttgtcttttattgtcttcgcaagacctatcaaattcgcagtaatgtttacatttggaaacatattggcagttgggagcctttgttatgggccctcaaaaacagctaaggatgatgtttgatccagttcgtctgtatgcaacggctgtttatgttggatgtgttgttttggctctaatctttgctctttggattcatgacaagctgctaacactgatcgctgtcatatgtgagatctgcgccctattttggtatagtttgagctacattcctttggcacgaaggatggtttccgacctgatggtgaagttctgtgacactgaactttgagctgctgcacgcaataacaacaacaacaaaattcttctgtgtctgaagcctgataaacctatgggttcttctcatttgtccatttcctttgggtttaactttattttgtaaacaaaacgagttaatatgtactttttttttgtaaatgtatgtcagtgtatttatctgtaaatgtacactgcatctttgaatcagatattctgatcttgtagtgctgcaaaacgatgagttcacagattggggaactaatcacgggtgcaaatataagaa

SEQ ID NO: 72210 - DNA, 757 bp, Zea Mays
gtagatccaatgcccagccctattccaactcaattcgccgcgtcacctcctcgtctgctttgacgacccgaccacgccagccatggacgccctgacgcgcctccaccgctccctcgtcggcggcgacgacgaggatcagccggaggactccatccttgctgataccgaagacctctgctccctctcccctctccagaggatctacgccttcgcggcatgtttggtggccggactcaccctcatgatcttgtcttttattgtcttcgcaagacctatcaaattcgcagtaatgtttacatttggaaacatattggcagttgggagcacagcctttgttatgggccctcaaaaacagctaaggatgatgtttgatccagttcgtctgtatgcaacggctgtttatgttggatgtgttgttttggctctaatctttgctctttggattcatgacaagctgctaacactgatcgctgtcatatgtgagatctgcgccctattttggtaagtcatactcatacaactgccgttgcactaacaatactgaatgcaaatatgtcttccttaatgtgactgataaataacatatcagacatcatatggaatgttacccttctaaatatcttatgagtcaaaatagctgccaattagactggtagctggtaccttactatcgggacaatacaaaattgttgtcacctgctattttccatgaatcgactgcagttgttactcatagttttcgtctatgttatgcatg

SEQ ID NO: 72211 - DNA, 624 bp, Zea Mays
gttcttttgttcaaagagagaggcagaggataagatagttccacgagaaatcgatgcagatgactccgatgtggagcctaaaagtgatgatgagagcgatgaagatggcgacgacgacgacaccgaagctctaatggcagagcttgagaggattaagaaagagagagcagaggagaagcttagaaaggagcggcaacaagcagaggaggaggccaagatgaaggaggctgaactgatgcggggaaaccctttgattaatatcaacaatcctggctccttcagtgtcaagagaaggtgggacgacgacgtggtgttcaagaatcaagcacgtggagagaccaagacgccgaaacggttcatcaacgacaccatcaggagtgacttccaccgtaaatttcttcatagatacatgaagtaatggtattgtcgtgtacaattcagatgtctccgtgctgtttatgtcagtgcattggttctctctcatcgttgttatgtttcgtgtatgagtgaacggccattgttgtgttgtatatgaaacaaaacatctgtcagcatcttaacaatgcctacctcatggtgtccaagttgatctgatttcactcacttttgtccccaactgtccat

SEQ ID NO: 72212 - DNA, 931 bp, Zea Mays
atggcggtccagcttaattatgcagatgaccatgatggttccaccttcgttcccgcaagaacactctctgaacaaggccggagcacaggctgcttcgctggttggctggttctggttgtgaagcacagagacgcggtatacggaccggagttcgtcaaggatgacgggaggaacgagctcagcggtttcagccttgctcatatgaaggatgtcgacgatactgaacttgactgaaacgatgaagattcggatggtgattcagacgaccgacgagtatgcggtcaaggaggaaggagaggaggagaagtagaactgcttggccaggtttctgcagtttcatttgtgttggcagatgcattttctggggtctcatcgagtatgtggattttttttattattataatatagtagtagcataggatgagagtctcatagcctatcatcaacttgattctaacacacttttgcagtgtcgagcatatgcttgtcattagatgtttcaggcgtgctctgcttctttcaatcatggtatataacgttcatggtagtgtgtttatgggttaccaaggttaggtcacaatttctaaggggctgatttggtgaacagagaattggagaagatccatgagaaggaatcctcttggtattcaattttaaataacaagaggatccctttccataaatctcatctaattctctggtcaccaaatcagtcccaagaacttatttggatcagccgagtctcgacgagtccacagacccactttgttatatttttctcgttgagctgtagatgggtaggtactgccaggttctacagcaatttgaatgtttgatctattcacgtaacaacacaggtgtatcatttatttaccacatggatgtaaagttttgtatacatgtcatcgcatttgttcgttgtatatctcta

SEQ ID NO: 72213 - DNA, 1108 bp, Zea Mays
gattctagcatcagcatcacccgtcaattcagatcttcagctccctacgtggaagaacaggcacacacacaccagcccacttaggcccatcaacgccccaaggcccaacattccgtcaagtccttcgacaaagtcagcctcggctacggcggcaacaagaagctcgacggccgccactaccaggtccagcttaattatgcagatgaccatgatggttccaccttcgttcccgcaagaacactctctgaacaaggccggagcacaggctgcttcgctggttggctggttctggttgtgaagcacagagacgcggtatacggaccggagttcgtcaaggatgacgggaggaacgagctcagcggtttcagccttgctcatatgaaggatgtcgacgatactgaacttgactgaaacgatgaagattcggatggtgattcagacgaccgacgagtatgcggtcaaggaggaaggagaggaggagaagtagaactgcttggccaggtttctgcagtttcatttgtgttggcagatgcattttctggggtctcatcgagtatgtggattttttttattattataatatagtagtagcataggatgagagtctcatagcctatcatcaacttgattctaacacacttttgcagtgtcgagcatatgcttgtcattagatgtttcaggcgtgctctgcttctttcaatcatggtatataacgttcatggtagtgtgtttatgggttaccaaggttaggtcacaatttctaaggggctgatttggtgaacagagaattggagaagatccatgagaaggaatcctcttggtattcaattttaaataacaagaggatccctttccataaatctcatctaattctctggtcaccaaatcagtcccaagaacttatttggatcagccgagtctcgacgagtccacagacccactttgttatatttttctcgttgagctgtagatgggtaggtactgccaggttctacagcaatttgaatgtttgatctattcacgtaacaacacaggtgtatcatttatttaccacatggatgtaaagttttgtatacatgtcatcgcatttgttcgttgtatatctcta

SEQ ID NO: 72214 - DNA, 1125 bp, Zea Mays
cctcctttctccgaattgccgtcgtcgcggagttttataattcgcgcgctcttgtcttggccccggtcccccggataggtgcatgttttaattgaaaaagagtgttcgagggaaatgcctaaaggaaccgtgggtttgcgggtttcggacttagatggtgccatcggcgtgctcgataaaatgcccaagtagattttcaggtccagcttaattatgcagatgaccatgatggttccaccttcgttcccgcaagaacactctctgaacaaggccggagcacaggctgcttcgctggttggctggttctggttgtgaagcacagagacgcggtatacggaccggagttcgtcaaggatgacgggaggaacgagctcagcggtttcagccttgctcatatgaaggatgtcgacgatactgaacttgactgaaacgatgaagattcggatggtgattcagacgaccgacgagtatgcggtcaaggaggaaggagaggaggagaagtagaactgcttggccaggtttctgcagtttcatttgtgttggcagatgcattttctggggtctcatcgagtatgtggattttttttattattataatatagtagtagcataggatgagagtctcatagcctatcatcaacttgattctaacacacttttgcagtgtcgagcatatgcttgtcattagatgtttcaggcgtgctctgcttctttcaatcatggtatataacgttcatggtagtgtgtttatgggttaccaaggttaggtcacaatttctaaggggctgatttggtgaacagagaattggagaagatccatgagaaggaatcctcttggtattcaattttaaataacaagaggatccctttccataaatctcatctaattctctggtcaccaaatcagtcccaagaacttatttggatcagccgagtctcgacgagtccacagacccactttgttatatttttctcgttgagctgtagatgggtaggtactgccaggttctacagcaatttgaatgtttgatctattcacgtaacaacacaggtgtatcatttatttaccacatggatgtaaagttttgtatacatgtcatcgcatttgttcgttgtatatctcta

SEQ ID NO: 72215 - DNA, 561 bp, Zea Mays
cgtgggtttggccgggtcctcggcctcgcattcggaatataaatgggaacgttcgccgctccctgaccgcaggaccgccaggttgtagccatcatcgcgtgcagatagcagagggaaaaaaattgagatccgctccgttgattgaggtcgcaatcgcaccatcgcctaagccaactcaatgcgtctgaagatcgtgggcgcgcgccgcacctggccataccctcgcgcgacgaagactgtggctgggcgctgagaacagagatctcaggctgggcgcaggtctggggcttcacggggttcctcgggtggtggttgtggtcgtcctggtcgaagtggtgcaccaggatctcgttgatttctcgtcggggcgtggatccaggggttctcggtggtactcggcgaggagttcctgatgcgcgtgcttcggttcctggagctgtgggcgatgggaggccagggtcccgcaatgtaccgtgtgctcagttctctgctgctcgaccaccgcagcgaggtttcgagtcacctgaagatcaccctggtaactggaatctcaagtgccag

SEQ ID NO: 72216 - DNA, 897 bp, Zea Mays
gtgatgtatgcttcaattgattattgttaaggaggcttatctctgcttacctactaaagatttgtcgtcactgcaagtgcaaactagtaccttctagttcgagagatgacattgtcttcacagaccctttgaatacattcaagggcctggaaaattacaagacgatattctgggcgcttcgttttactggccggatcttcttcaaggcattgtgggttgatatagttagtatatggcagcctgctgagaacattatcatgattcgctggatcgcccacggcattcctcgagtaccttgggatgggcatggccgcttcgatggtgcttctgtgtataaactcgacaaggatggtaagatctacgagcataaggtccacaatgttgctatgaatccaccaacgaagttcaaggtcctaccagtccatgagctaatcagatcacttggttgcccctctactgcaaaaccaacttattttgaagcttcatcacaatatctgtgcgctgggccatcttatttgagattagcttggataagatgctacatctcattgtgccgcatgctttcgctcgcaaatctgggagaaggatagcctgggtttagtgatacctccaaattttgtattttcagtatgacagcacacatgttactaagtactattgagtcatgacagttgtatatatgaacactgatagtttatagaataagacctcttagttaaggtgtacaacacttgttattgattgttataagcatcagtcagcaaactagtctgacatgtttctgttcccagtatcgagagtggtgttcttgtggccgagtttagtgagcatatttgtgtcaaccctgcacattatatttatgatgtcatatatatgctaagaaaaacagaaaaaaga

SEQ ID NO: 72217 - DNA, 885 bp, Zea Mays
gacatgatttttttccctctccaagcaacatggcctttacttccccatatagttatatccatttgtttcgttgtttaataaaaaaaaacagagatgacattgtcttcacagaccctttgaatacattcaagggcctggaaaattacaagacgatattctgggcgcttcgttttactggccggatcttcttcaaggcattgtgggttgatatagttagtatatggcagcctgctgagaacattatcatgattcgctggatcgcccacggcattcctcgagtaccttgggatgggcatggccgcttcgatggtgcttctgtgtataaactcgacaaggatggtaagatctacgagcataaggtccacaatgttgctatgaatccaccaacgaagttcaaggtcctaccagtccatgagctaatcagatcacttggttgcccctctactgcaaaaccaacttattttgaagcttcatcacaatatctgtgcgctgggccatcttatttgagattagcttggataagatgctacatctcattgtgccgcatgctttcgctcgcaaatctgggagaaggatagcctgggtttagtgatacctccaaattttgtattttcagtatgacagcacacatgttactaagtactattgagtcatgacagttgtatatatgaacactgatagtttatagaataagacctcttagttaaggtgtacaacacttgttattgattgttataagcatcagtcagcaaactagtctgacatgtttctgttcccagtatcgagagtggtgttcttgtggccgagtttagtgagcatatttgtgtcaaccctgcacattatatttatgatgtcatatatatgctaagaaaaacagaaaaaaga

SEQ ID NO: 72218 - DNA, 764 bp, Zea Mays
gaaaggaggctgagttagcagtatcgaaattttctggaaatggtgcgggggtcatgtctgctgctggtactattgctagcacattcgtattggtttttgttgctgaatggggtgataaatcatttttctccacaattgcactagcagcagcttcatcccctctgggtgtcattgcgggatcactagctggtcatgccattgcaacattgattgcagttcttggtggctctttgctgggaacattcctgtctgaaaagattatagcatacattggagggagcctattcttggcctttgctgcgattaccatagttgagatagtgacttgaaaagggagttccagcttccacaattcataaaaagtactgatcttttgtcagggcaatgaaaaatcagcttgatcgtaatggtagtacattgatgtgttaccgaacatgattgtccacaggaacttcattgttcgtatgggacgtcctaggcttgcgtagagtgttttgtttctggtgatgagaatttctgcttctttatccaagaacaatgtttttgtcatcatcatgatttgtagtggaaacactgatagtcaggttggtcggaagatgggactgggagcaaaactatgaattccatgtagcttttgaacttcctcttacattatttacaagtatatgaatcagccttttcgtatttatggggaagacttccctggtttatgtcttccctagactttattcacactagttcaaccctttttatatgaatctaag

SEQ ID NO: 72219 - DNA, 953 bp, Zea Mays
cccgaagattgcgaccagacttgcgttcgagctcggagctcctccctctatccacttgcaacggtcgagaggaagcggaggtccatatcgctcattcccgcccgtcccgcaaccaccaccgcggccgcggtgccatggcatccgccgccggcgccgccttgtgcccatgctctttctccaccgtactctcctcctccccctcaactcccttccgtcccgcaaggacgacgcctcgcccttctctccgcccgctgccgcgccgcgccaggctaccgctgcggccgggccactcggtactgaggtgcctcccgaaatgcgactcggggaagccggacggaggaggagatgctgggttatcgggtcggaaggcggcccggccagcgggtcagggaggacccaggcggcccgcacagttcggcgcgtcgtcgtgcggactcgcattcacgacggtggcgggggtgataatgctccaggcatcgcagcaggcgcttgccgccacgcagttcgctggcctgcagcctgcggacgtgctgggggatctcggggacgtcagtacaggttttgcttcagctttcctgttgatcttcttttctgagctaggggacagaacgttcttcattgcggcactgttagcagctagaagttctggagctgtcatttttctaggcacatttggagctcttgcggtaatgaccattatatctgtagttcttggtcgagcattccactatgttgatggcatcattccgttcagctttggtggtactgatttcccagttgatgacattgctgcggcatgtctcttggtttattatggggttactacattacttgatgcagcctcaggtgatgatgaaaagatcaatgaggagcaagaggagggagatcatggtcatgtgaaactagtgctgaacttaagctacgtgatggcacggttggttagaaaaaactcg

SEQ ID NO: 72220 - DNA, 1434 bp, Zea Mays
cgaagattgcgaccagacttgcgttcgagctcggagctcctccctctatccacttgcaacggtcgagaggaagcggaggtccatatcgctcattcccgcccgtcccgcaaccaccaccgcggccgcggtgccatggcatccgccgccggcgccgccttgtgcccatgctctttctccaccgtactctcctcctccccctcaactcccttccgtcccgcaaggacgacgcctcgcccttctctccgcccgctgccgcgccgcgccaggctaccgctgcggccgggccactcggtactgaggtgcctcccgaaatgcgactcggggaagccggacggaggaggagatgctgggttatcgggtcggaaggcggcccggccagcgggtcagggaggacccaggcggcccgcacagttcggcgcgtcgtcgtgcggactcgcattcacgacggtggcgggggtgataatgctccaggcatcgcagcaggcgcttgccgccacgcagttcgctggcctgcagcctgcggacgtgctgggggatctcggggacgtcagtacaggttttgcttcagctttcctgttgatcttcttttctgagctaggggacagaacgttcttcattgcggcactgttagcagctagaagttctggagctgtcatttttctaggcacatttggagctcttgcggtaatgaccattatatctgtagttcttggtcgagcattccactatgttgatggcatcattccgttcagctttggtggtactgatttcccagttgatgacattgctgcggcatgtctcttggtttattatggggttactacattacttgatgcagcctcaggtgatgatgaaaagatcaatgaggagcaagaggagattgcagttcttggtggctctttgctgggaacattcctgtctgaaaagattatagcatacattggagggagcctattcttggcctttgctgcgattaccatagttgagatagtgacttgaaaagggagttccagcttccacaattcataaaaagtactgatcttttgtcagggcaatgaaaaatcagcttgatcgtaatggtagtacattgatgtgttaccgaacatgattgtccacaggaacttcattgttcgtatgggacgtcctaggcttgcgtagagtgttttgtttctggtgatgagaatttctgcttctttatccaagaacaatgtttttgtcatcatcatgatttgtagtggaaacactgatagtcaggttggtcggaagatgggactgggagcaaaactatgaattccatgtagcttttgaacttcctcttacattatttacaagtatatgaatcagccttttcgtatttatggggaagacttccctggtttatgtcttccctagactttattcacactagttcaaccctttttatatgaatctaag

SEQ ID NO: 72221 - DNA, 1635 bp, Zea Mays
cgaagattgcgaccagacttgcgttcgagctcggagctcctccctctatccacttgcaacggtcgagaggaagcggaggtccatatcgctcattcccgcccgtcccgcaaccaccaccgcggccgcggtgccatggcatccgccgccggcgccgccttgtgcccatgctctttctccaccgtactctcctcctccccctcaactcccttccgtcccgcaaggacgacgcctcgcccttctctccgcccgctgccgcgccgcgccaggctaccgctgcggccgggccactcggtactgaggtgcctcccgaaatgcgactcggggaagccggacggaggaggagatgctgggttatcgggtcggaaggcggcccggccagcgggtcagggaggacccaggcggcccgcacagttcggcgcgtcgtcgtgcggactcgcattcacgacggtggcgggggtgataatgctccaggcatcgcagcaggcgcttgccgccacgcagttcgctggcctgcagcctgcggacgtgctgggggatctcggggacgtcagtacaggttttgcttcagctttcctgttgatcttcttttctgagctaggggacagaacgttcttcattgcggcactgttagcagctagaagttctggagctgtcatttttctaggcacatttggagctcttgcggtaatgaccattatatctgtagttcttggtcgagcattccactatgttgatggcatcattccgttcagctttggtggtactgatttcccagttgatgacattgctgcggcatgtctcttggtttattatggggttactacattacttgatgcagcctcaggtgatgatgaaaagatcaatgaggagcaagaggaggctgagttagcagtatcgaaattttctggaaatggtgcgggggtcatgtctgctgctggtactattgctagcacattcgtattggtttttgttgctgaatggggtgataaatcatttttctccacaattgcactagcagcagcttcatcccctctgggtgtcattgcgggatcactagctggtcatgccattgcaacattgattgcagttcttggtggctctttgctgggaacattcctgtctgaaaagattatagcatacattggagggagcctattcttggcctttgctgcgattaccatagttgagatagtgacttgaaaagggagttccagcttccacaattcataaaaagtactgatcttttgtcagggcaatgaaaaatcagcttgatcgtaatggtagtacattgatgtgttaccgaacatgattgtccacaggaacttcattgttcgtatgggacgtcctaggcttgcgtagagtgttttgtttctggtgatgagaatttctgcttctttatccaagaacaatgtttttgtcatcatcatgatttgtagtggaaacactgatagtcaggttggtcggaagatgggactgggagcaaaactatgaattccatgtagcttttgaacttcctcttacattatttacaagtatatgaatcagccttttcgtatttatggggaagacttccctggtttatgtcttccctagactttattcacactagttcaaccctttttatatgaatctaag

SEQ ID NO: 72222 - DNA, 1630 bp, Zea Mays
gacttgcgttcgagctcggagctcctccctctatccacttgcaacggtcgagaggaagcggaggtccatatcgctcattcccgcccgtcccgcaaccaccaccgcggccgcggtgccatggcatccgccgccggcgccgccttgtgcccatgctctttctccaccgtactctcctcctccccctcaactcccttccgtcccgcaaggacgacgcctcgcccttctctccgcccgctgccgcgccgcgccaggctaccgctgcggccgggccactcgcgagtcggatcgtgtctgcaggtactgaggtgcctcccgaaatgcgactcggggaagccggacggaggaggagatgctgggttatcgggtcggaaggcggcccggccagcgggtcagggaggacccaggcggcccgcacagttcggcgcgtcgtcgtgcggactcgcattcacgacggtggcgggggtgataatgctccaggcatcgcagcaggcgcttgccgccacgcagttcgctggcctgcagcctgcggacgtgctgggggatctcggggacgtcagtacaggctttcctgttgatcttcttttctgagctaggggacagaacgttcttcattgcggcactgttagcagctagaagttctggagctgtcatttttctaggcacatttggagctcttgcggtaatgaccattatatctgtagttcttggtcgagcattccactatgttgatggcatcattccgttcagctttggtggtactgatttcccagttgatgacattgctgcggcatgtctcttggtttattatggggttactacattacttgatgcagcctcaggtgatgatgaaaagatcaatgaggagcaagaggaggctgagttagcagtatcgaaattttctggaaatggtgcgggggtcatgtctgctgctggtactattgctagcacattcgtattggtttttgttgctgaatggggtgataaatcatttttctccacaattgcactagcagcagcttcatcccctctgggtgtcattgcgggatcactagctggtcatgccattgcaacattgattgcagttcttggtggctctttgctgggaacattcctgtctgaaaagattatagcatacattggagggagcctattcttggcctttgctgcgattaccatagttgagatagtgacttgaaaagggagttccagcttccacaattcataaaaagtactgatcttttgtcagggcaatgaaaaatcagcttgatcgtaatggtagtacattgatgtgttaccgaacatgattgtccacaggaacttcattgttcgtatgggacgtcctaggcttgcgtagagtgttttgtttctggtgatgagaatttctgcttctttatccaagaacaatgtttttgtcatcatcatgatttgtagtggaaacactgatagtcaggttggtcggaagatgggactgggagcaaaactatgaattccatgtagcttttgaacttcctcttacattatttacaagtatatgaatcagccttttcgtatttatggggaagacttccctggtttatgtcttccctagactttattcacactagttcaaccctttttatatgaatctaag

SEQ ID NO: 72223 - DNA, 954 bp, Zea Mays
gctcctccctctatccacttgcaacggtcgagaggaagcggaggtccatatcgctcattcccgcccgtcccgcaaccaccaccgcggccgcggtgccatggcatccgccgccggcgccgccttgtgcccatgctctttctccaccgtactctcctcctccccctcaactcccttccgtcccgcaaggacgacgcctcgcccttctctccgcccgctgccgcgccgcgccaggctaccgctgcggccgggccactcgcgagtcggatcgtgtctgcaggtactgaggtgcctcccgaaatgcgactcggggaagccggacggaggaggagatgctgggttatcgggtcggaaggcggcccggccagcgggtcagggaggacccaggcggcccgcacagttcggcgcgtcgtcgtgcggactcgcattcacgacggtggcgggggtgataatgctccaggcatcgcagcaggcgcttgccgccacgcagttcgctggcctgcagcctgcggacgtgctgggggatctcggggacgtcagtacaggttttgcttcagctttcctgttgatcttcttttctgagctaggggacagaacgttcttcattgcgtttcatgtgtttgataggcactgttagcagctagaagttctggagctgtcatttttctaggcacatttggagctcttgcggtaatgaccattatatctgtagttcttggtcgagcattccactatgttgatggcatcattccgttcagctttggtggtactgatttcccagttgatgacattgctgcggcatgtctcttggtttattatggggttactacattacttgatgcagcctcaggtgatgatgaaaagatcaatgaggagcaagaggagggagatcatggtcatgtgaaactagtgctgaacttaagctacgtgatggcacggttggttagaaaaaactcg

SEQ ID NO: 72224 - DNA, 818 bp, Zea Mays
gctcctccctctatccacttgcaacggtcgagaggaagcggaggtccatatcgctcattcccgcccgtcccgcaaccaccaccgcggccgcggtgccatggcatccgccgccggcgccgccttgtgcccatgctctttctccaccgtactctcctcctccccctcaactcccttccgtcccgcaaggacgacgcctcgcccttctctccgcccgctgccgcgccgcgccaggctaccgctgcggccgggccactcggtactgaggtgcctcccgaaatgcgactcggggaagccggacggaggaggagatgctgggttatcgggtcggaaggcggcccggccagcgggtcagggaggacccaggcggcccgcacagttcggcgcgtcgtcgtgcggactcgcattcacgacggtggcgggggtgataatgctccaggcatcgcagcaggcgcttgccgccacgcagttcgctggcctgcagcctgcggacgtgctgggggatctcggggacgtcagtacaggcactgttagcagctagaagttctggagctgtcatttttctaggcacatttggagctcttgcggtaatgaccattatatctgtagttcttggtcgagcattccactatgttgatggcatcattccgttcagctttggtggtactgatttcccagttgatgacattgctgcggcatgtctcttggtttattatggggttactacattacttgatgcagcctcaggtgatgatgaaaagatcaatgaggagcaagaggaggctgagttagcagtatcgaaattttctggaaatggtgcg

SEQ ID NO: 72225 - DNA, 1638 bp, Zea Mays
gctcctccctctatccacttgcaacggtcgagaggaagcggaggtccatatcgctcattcccgcccgtcccgcaaccaccaccgcggccgcggtgccatggcatccgccgccggcgccgccttgtgcccatgctctttctccaccgtactctcctcctccccctcaactcccttccgtcccgcaaggacgacgcctcgcccttctctccgcccgctgccgcgccgcgccaggctaccgctgcggccgggccactcgcgagtcggatcgtgtctgcaggtactgaggtgcctcccgaaatgcgactcggggaagccggacggaggaggagatgctgggttatcgggtcggaaggcggcccggccagcgggtcagggaggacccaggcggcccgcacagttcggcgcgtcgtcgtgcggactcgcattcacgacggtggcgggggtgataatgctccaggcatcgcagcaggcgcttgccgccacgcagttcgctggcctgcagcctgcggacgtgctgggggatctcggggacgtcagtacaggttttgcttcagctttcctgttgatcttcttttctgagctaggggacagaacgttcttcattgcgtttcatgtgtttgataggcactgttagcagctagaagttctggagctgtcatttttctaggcacatttggagctcttgcggtaatgaccattatatctgtagttcttggtcgagcattccactatgttgatggcatcattccgttcagctttggtggtactgatttcccagttgatgacattgctgcggcatgtctcttggtttattatggggttactacattacttgatgcagcctcaggtgatgatgaaaagatcaatgaggagcaagaggaggctgagttagcagtatcgaaattttctggaaatggtgcgggggtcatgtctgctgctggtactattgctagcacattcgtattggtttttgttgctgaatggggtgataaatcatttttctccacaattgcactagcagcagcttcatcccctctgggtgtcattgcgggatcactagctggtcatgccattgcaacattgattgcagttcttggtggctctttgctgggaacattcctgtctgaaaagattatagcatacattggagggagcctattcttggcctttgctgcgattaccatagttgagatagtgacttgaaaagggagttccagcttccacaattcataaaaagtactgatcttttgtcagggcaatgaaaaatcagcttgatcgtaatggtagtacattgatgtgttaccgaacatgattgtccacaggaacttcattgttcgtatgggacgtcctaggcttgcgtagagtgttttgtttctggtgatgagaatttctgcttctttatccaagaacaatgtttttgtcatcatcatgatttgtagtggaaacactgatagtcaggttggtcggaagatgggactgggagcaaaactatgaattccatgtagcttttgaacttcctcttacattatttacaagtatatgaatcagccttttcgtatttatggggaagacttccctggtttatgtcttccctagactttattcacactagttcaaccctttttatatgaatctaag

SEQ ID NO: 72226 - DNA, 3697 bp, Zea Mays
cccactgccgagggcccaggccgctcgtcgtcgtcgtcgacctcctccacttgggctgcatgaattgacgtcacagttccatggtcggcaaacgaaagctgcctgagggagagtgttcaatcaaaagtgacccacctgtaaaccataggggttaaaaaaaagaaagaaaagtagggagaggccttgacgacgctgacagtgagagactacaatgaatggtattgataaagaatagtgtagatgtggagtagatctgcatcgcggcgcaggaacgaccgaacgagtggctcccgtgcatcctgctcccagccaaacgcccaaacccatccgtcttcgggactagggtcccggcatccatcagtgcaagggcaaggcagttggccgccgcgcccccgccccgcgggtctcccctcctgctccggtccagggcgccccggccccccctcgtccgaatcccgtcggtggtgagccgccgccgggtgtggcccgcgagctgcgacgcgccgacgatgctgccaaacggagaagctccctccggatccatgccgccggtgcctgccgccgacgcgaacacctctaattcagatgacactagatttgatgcgtcacagtatgccttttttggcaacaatgtgctggaggagattgaactaggcggattcgaagatgataacagcagtaatgctgctttcgctggactcgatgatttagagcgcccactttcttctcaggggattgcactagaggctgaagatagttcattttcagatcttgatgatcttgcaaatacattctcaaaggttctgctgctgctgactgggcgccggaatttgaatccccactctggtccgatcagcatgtgctagttgctaaccaaggaccgaatggcaatggctggtggtctccacagcatcattcttctctccttgctgattccagattgcacagaacatcctcatcccctcagcaacaggaacaacacaatcatgatgcacctattcttggaccaaggccatctcctttgcaccggacatcttcatacccgcaaaaggagcctcagtacaacccagctgaagtcattccaaatgcaccatacatgtcaaactatctacctggtgggccacccaattcagtgcctcgacaaccacatcagatgaacatgccatctttcaatgaatttcagatgcatatgtctgcgcaaagtgagaccccattctcccagtttcctcgtggagggacacctccagagccattatttggtggaaaccggggtcatatgatttcaacaggcttctcaactaacagcagtggacaacgagaccatctgctgaataatgggcagtttcatggggaaactgccagcatcatgccaaatttgctgccaaaccatctacaacgtccgaatacattcatgccccctcaattgttgacagtacgccaacagcatggcatgctcccaattcagcaatcttcaaagcagtcatcaagaacacagacacacatgtttggcccccagcatccaccacaaatgatgaataggtttgataattttgggatgcctgagttcagtgatccaagagcaagatcatcaatgcaccatggcaggcaaggtcaacattttcctctccatggctctgagtttggtattatgaagatgggtaatgggaggtcaaggtttagatccaagtatatgtccactgaagaacttgaaaacattttaagaatacagcatgccgccactcatataaatgatccatacatcgatgattattaccatcaagcttgtctggccagcagatatgtggatgcaaggtcgaagcaccgcttctgcccaaccttgattcgtgatccatcatcctgtacacggagtaaggatgagccacatgcataccttaaggttgatgcccttgggagactgccattttcttctgtacggagaccgcgtccactccttgacgttgagccagcttctgcaactgatgatgacaccgttatttcaaagcctcttgatcaggaacctctgctagctgctaggatcacgattgaggatggactctccctattacttgacatagacgatattgaccgcttgcttcagtttagccagcagcaagatggtggtttcgaacttaaaaatagaaggcaatctctacttggtcagctggcagaatcgctgcagttggttgatccactaggtgcaaataaaaacacacatctgtccgcaaatgatgatttggtatttcttcgcattgtttctctacccaagggccggaaactactttcacgctatatcaacctcatggtacctggtagcgatcttgcaaggatagtttgcatggcagtattcaggcacctgaggtttgtgtttggaaatctgccctctgatgacggcgcagctgagacagtaactaaactggctagcgctgtagcatcatgcattcgcgggatggacttaagtggcctcagtgcttgtctcgcagcaattgtgtgctcgtctgagcacccaccccttcggccccttggccatgctgctggcgatggtgccactgtcgtcataaaggctgtcctggatagagcaacagagctcctcaccgagcagcctgccgcgccagactatggcgctccaaaccgagccttgtggcaagcgtcgttcaatgccttctttgggctgctcactaagtactgcatgagtaagtttgatagcatggttcacacgatgcacaagctcggtgctgctgctgcaacagcgatacgcaaggaacttccggttgagcttctgcgcgccagccttcctcacacggatgagcagcagcgcagactactgctcgagttcgcccagcggaccgtgcccgtctctggccatggctccgacgggtgacggacgggcgggtggcggctggtggaaccatggcatctgaaacaataccagcttaaggtggtcagcgaatattggtgcgctagatgcggtattttattctatcatacgcagacctgcccaatgaatcgagcgttccttgagctgcagttcagatgggcatgccggcgttaagtggatgtatgtcccagggctgtgtttcgttggctctgggtgggaacggaacccccctgcacgttccttgaaggcaattgcaagaaaatactgcgagctgttggtgtttcggtttgcagtgtttgtttgtagtggcgtcaaggcttccaaggttctcatctcatcactccggacgggtgccaggaagatgtggtttaacacatgtataaactagcaaatgcttggaaggttgatatttggttctgtagccagccattcgaagattgttgggtggggggttttgtttcctgttatattcgcaactgaatacattatcttgcgaagctgttcagtctgtaacgagttcattgggaattccactatatatccttgttatggatggtcaggagctttgtatttttgtgattctgggtattacccttgtgttccataaaggacgctttcttcctcgctcctgaatccattgcatcgtgtcctgtccgaatgggtgatctacacttttagctttgcctttgccctctaaagataatagtcaaattaaaggactggattcaagaatcatcattttctaaaagtcgatttggaaaacaactctagacctgtttttagtggctttcgaatggaactgtaaaaacatatatcgaaaaa

SEQ ID NO: 72227 - DNA, 4157 bp, Zea Mays
gtcacagttccatggtcggcaaacgaaagctgcctgagggagagtgttcaatcaaaagtgacccacctgtaaaccataggggttaaaaaaaagaaagaaaagtagggagaggccttgacgacgctgacagtgagagactacaatgaatggtattgataaagaatagtgtagatgtggagtagatctgcatcgcggcgcaggaacgaccgaacgagtggctcccgtgcatcctgctcccagccaaacgcccaaacccatccgtcttcgggactagggtcccggcatccatcagtgcaagggcaaggcagttggccgccgcgcccccgccccgcgggtctcccctcctgctccggtccagggcgccccggccccccctcgtccgaatcccgtcggtggtgagccgccgccgggtgtggcccgcgagctgcgacgcgccgacgatgctgccaaacggagaagctccctccggatccatgccgccggtgcctgccgccgacgcgaacacctctaattcagatgacactagatttgatgcgtcacagtatgccttttttggcaacaatgtgctggaggagattgaactaggcggattcgaagatgataacagcagtaatgctgctttcgctggactcgatgatttagagcgcccactttcttctcaggggattgcactagaggtaggactatgctggacaagagaaattcaatgccagttgttaatacagatttttttgttccatgctggagctggacaagtactgtattgagtatagctgttagcctgttcgatctttgtacagccatggcaaatggataatttctgatagcaccgtgaagatactgtttagtgaagtgtgtgtgtgcgcgttggggggggggggattttctcagaagattgcagatacattacacttgtatgacgtgattttttcgttcttttgttgcgctgctaagtttgatagttcagaacaggattcttgtaagtttagttttagtctaacagatgcacttaagttcttccatgtaaactgtaaagtcagactgctgcttggtggatttgtactgaacccttttctaaaataaaataaaaactaccttgtatagtttgtattcacttctcacccaggctacaacttgtttttttcaggctgaagatagttcattttcagatcttgatgatcttgcaaatacattctcaaagctaagaagagatgttaacctaccaaagcatattggggtaaataaccttgggacttctttttcaagagaaagttctgctgctgctgactgggcgccggaatttgaatccccactctggtccgatcagcatgtgctagttgctaaccaaggaccgaatggcaatggctggtggtctccacagcatcattcttctctccttgctgattccagattgcacagaacatcctcatcccctcagcaacaggaacaacacaatcatgatgcacctattcttggaccaaggccatctcctttgcaccggacatcttcatacccgcaaaaggagcctcagtacaacccagctgaagtcattccaaatgcaccatacatgtcaaactatctacctggtgggccacccaattcagtgcctcgacaaccacatcagatgaacatgccatctttcaatgaatttcagatgcatatgtctgcgcaaagtgagaccccattctcccagtttcctcgtggagggacacctccagagccattatttggtggaaaccggggtcatatgatttcaacaggcttctcaactaacagcagtggacaacgagaccatctgctgaataatgggcagtttcatggggaaactgccagcatcatgccaaatttgctgccaaaccatctacaacgtccgaatacattcatgccccctcaattgttgacagtacgccaacagcatggcatgctcccaattcagcaatcttcaaagcagtcatcaagaacacagacacacatgtttggcccccagcatccaccacaaatgatgaataggtttgataattttgggatgcctgagttcagtgatccaagagcaagatcatcaatgcaccatggcaggcaaggtcaacattttcctctccatggctctgagtttggtattatgaagatgggtaatgggaggtcaaggtttagatccaagtatatgtccactgaagaacttgaaaacattttaagaatacagcatgccgccactcatataaatgatccatacatcgatgattattaccatcaagcttgtctggccagcagatatgtggatgcaaggtcgaagcaccgcttctgcccaaccttgattcgtgatccatcatcctgtacacggagtaaggatgagccacatgcataccttaaggttgatgcccttgggagactgccattttcttctgtacggagaccgcgtccactccttgacgttgagccagcttctgcaactgatgatgacaccgttatttcaaagcctcttgatcaggaacctctgctagctgctaggatcacgattgaggatggactctccctattacttgacatagacgatattgaccgcttgcttcagtttagccagcagcaagatggtggtttcgaacttaaaaatagaaggcaatctctacttggtcagctggcagaatcgctgcagttggttgatccactaggtgcaaataaaaacacacatctgtccgcaaatgatgatttggtatttcttcgcattgtttctctacccaagggccggaaactactttcacgctatatcaacctcatggtacctggtagcgatcttgcaaggatagtttgcatggcagtattcaggcacctgaggtttgtgtttggaaatctgccctctgatgacggcgcagctgagacagtaactaaactggctagcgctgtagcatcatgcattcgcgggatggacttaagtggcctcagtgcttgtctcgcagcaattgtgtgctcgtctgagcacccaccccttcggccccttggccatgctgctggcgatggtgccactgtcgtcataaaggctgtcctggatagagcaacagagctcctcaccgagcagcctgccgcgccagactatggcgctccaaaccgagccttgtggcaagcgtcgttcaatgccttctttgggctgctcactaagtactgcatgagtaagtttgatagcatggttcacacgatgcacaagctcggtgctgctgctgcaacagcgatacgcaaggaacttccggttgagcttctgcgcgccagccttcctcacacggatgagcagcagcgcagactactgctcgagttcgcccagcggaccgtgcccgtctctggccatggctccgacgggtgacggacgggcgggtggcggctggtggaaccatggcatctgaaacaataccagcttaaggtggtcagcgaatattggtgcgctagatgcggtattttattctatcatacgcagacctgcccaatgaatcgagcgttccttgagctgcagttcagatgggcatgccggcgttaagtggatggctgtgtttcgttggctctgggtgggaacggaacccccctgcacgttccttgaaggcaattgcaagaaaatactgcgagctgttggtgtttcggtttgcagtgtttgtttgtagtggcgtcaaggcttccaaggttctcatctcatcactccggacgggtgccaggaagatgtggtttaacacatgtataaactagcaaatgcttggaaggttgatatttggttctgtagccagccattcgaagattgttgggtggggggttttgtttcctgttatattcgcaactgaatacattatcttgcgaagctgttcagtctgtaacgagttcattgggaattccactatatatccttgttatggatggtcaggagctttgtatttttgtgattctgggtattacccttgtgttccataaaggacgctttcttcctcgctcctgaatccattgcatcgtgtcctgtccgaatgggtgatctacacttttagctttgcctttgccctctaaagataatagtcaaattaaaggactggattcaagaatcatcattttctaaaagtcgatttggaaaacaactctagacctgtttttagtggctttcgaatggaactgtaaaaacatatatcgaaaaa

SEQ ID NO: 72228 - DNA, 3523 bp, Zea Mays
ggagtagatctgcatcgcggcgcaggaacgaccgaacgagtggctcccgtgcatcctgctcccagccaaacgcccaaacccatccgtcttcgggactagggtcccggcatccatcagtgcaagggcaaggcagttggccgccgcgcccccgccccgcgggtctcccctcctgctccggtccagggcgccccggccccccctcgtccgaatcccgtcggtggtgagccgccgccgggtgtggcccgcgagctgcgacgcgccgacgatgctgccaaacggagaagctccctccggatccatgccgccggtgcctgccgccgacgcgaacacctctaattcagatgacactagatttgatgcgtcacagtatgccttttttggcaacaatgtgctggaggagattgaactaggcggattcgaagatgataacagcagtaatgctgctttcgctggactcgatgatttagagcgcccactttcttctcaggggattgcactagaggctgaagatagttcattttcagatcttgatgatcttgcaaatacattctcaaagctaagaagagatgttaacctaccaaagcatattggggtaaataaccttgggacttctttttcaagagaaagttctgctgctgctgactgggcgccggaatttgaatccccactctggtccgatcagcatgtgctagttgctaaccaaggaccgaatggcaatggctggtggtctccacagcatcattcttctctccttgctgattccagattgcacagaacatcctcatcccctcagcaacaggaacaacacaatcatgatgcacctattcttggaccaaggccatctcctttgcaccggacatcttcatacccgcaaaaggagcctcagtacaacccagctgaagtcattccaaatgcaccatacatgtcaaactatctacctggtgggccacccaattcagtgcctcgacaaccacatcagatgaacatgccatctttcaatgaatttcagatgcatatgtctgcgcaaagtgagaccccattctcccagtttcctcgtggagggacacctccagagccattatttggtggaaaccggggtcatatgatttcaacaggcttctcaactaacagcagtggacaacgagaccatctgctgaataatgggcagtttcatggggaaactgccagcatcatgccaaatttgctgccaaaccatctacaacgtccgaatacattcatgccccctcaattgttgacagtacgccaacagcatggcatgctcccaattcagcaatcttcaaagcagtcatcaagaacacagacacacatgtttggcccccagcatccaccacaaatgatgaataggtttgataattttgggatgcctgagttcagtgatccaagagcaagatcatcaatgcaccatggcaggcaaggtcaacattttcctctccatggctctgagtttggtattatgaagatgggtaatgggaggtcaaggtttagatccaagtatatgtccactgaagaacttgaaaacattttaagaatacagcatgccgccactcatataaatgatccatacatcgatgattattaccatcaagcttgtctggccagcagatatgtggatgcaaggtcgaagcaccgcttctgcccaaccttgattcgtgatccatcatcctgtacacggagtaaggatgagccacatgcataccttaaggttgatgcccttgggagactgccattttcttctgtacggagaccgcgtccactccttgacgttgagccagcttctgcaactgatgatgacaccgttatttcaaagcctcttgatcaggaacctctgctagctgctaggatcacgattgaggatggactctccctattacttgacatagacgatattgaccgcttgcttcagtttagccagcagcaagatggtggtttcgaacttaaaaatagaaggcaatctctacttggtcagctggcagaatcgctgcagttggttgatccactaggtgcaaataaaaacacacatctgtccgcaaatgatgatttggtatttcttcgcattgtttctctacccaagggccggaaactactttcacgctatatcaacctcatggtacctggtagcgatcttgcaaggatagtttgcatggcagtattcaggcacctgaggtttgtgtttggaaatctgccctctgatgacggcgcagctgagacagtaactaaactggctagcgctgtagcatcatgcattcgcgggatggacttaagtggcctcagtgcttgtctcgcagcaattgtgtgctcgtctgagcacccaccccttcggccccttggccatgctgctggcgatggtgccactgtcgtcataaaggctgtcctggatagagcaacagagctcctcaccgagcagcctgccgcgccagactatggcgctccaaaccgagccttgtggcaagcgtcgttcaatgccttctttgggctgctcactaagtactgcatgagtaagtttgatagcatggttcacacgatgcacaagctcggtgctgctgctgcaacagcgatacgcaaggaacttccggttgagcttctgcgcgccagccttcctcacacggatgagcagcagcgcagactactgctcgagttcgcccagcggaccgtgcccgtctctggccatggctccgacgggtgacggacgggcgggtggcggctggtggaaccatggcatctgaaacaataccagcttaaggtggtcagcgaatattggtgcgctagatgcggtattttattctatcatacgcagacctgcccaatgaatcgagcgttccttgagctgcagttcagatgggcatgccggcgttaagtggatgtatgtcccagggctgtgtttcgttggctctgggtgggaacggaacccccctgcacgttccttgaaggcaattgcaagaaaatactgcgagctgttggtgtttcggtttgcagtgtttgtttgtagtggcgtcaaggcttccaaggttctcatctcatcactccggacgggtgccaggaagatgtggtttaacacatgtataaactagcaaatgcttggaaggttgatatttggttctgtagccagccattcgaagattgttgggtggggggttttgtttcctgttatattcgcaactgaatacattatcttgcgaagctgttcagtctgtaacgagttcattgggaattccactatatatccttgttatggatggtcaggagctttgtatttttgtgattctgggtattacccttgtgttccataaaggacgctttcttcctcgctcctgaatccattgcatcgtgtcctgtccgaatgggtgatctacacttttagctttgcctttgccctctaaagataatagtcaaattaaaggactggattcaagaatcatcattttctaaaagtcgatttggaaaacaactctagacctgtttttagtggctttcgaatggaactgtaaaaacatatatcgaaaaa

SEQ ID NO: 72229 - DNA, 3422 bp, Zea Mays
ggagtagatctgcatcgcggcgcaggaacgaccgaacgagtggctcccgtgcatcctgctcccagccaaacgcccaaacccatccgtcttcgggactagggtcccggcatccatcagtgcaagggcaaggcagttggccgccgcgcccccgccccgcgggtctcccctcctgctccggtccagggcgccccggccccccctcgtccgaatcccgtcggtggtgagccgccgccgggtgtggcccgcgagctgcgacgcgccgacgatgctgccaaacggagaagctccctccggatccatgccgccggtgcctgccgccgacgcgaacacctctaattcagatgacactagatttgatgcgtcacagtatgccttttttggcaacaatgtgctggaggagattgaactaggcggattcgaagatgataacagcagtaatgctgctttcgctggactcgatgatttagagcgcccactttcttctcaggggattgcactagaggctgaagatagttcattttcagatcttgatgatcttgcaaatacattctcaaagctaagaagagatgttaacctaccaaagcatattggggtaaataaccttgggacttctttttcaagagaaagttctgctgctgctgactgggcgccggaatttgaatccccactctggtccgatcagcatgtgctagttgctaaccaaggaccgaatggcaatggctggtggtctccacagcatcattcttctctccttgctgattccagattgcacagaacatcctcatcccctcagcaacaggaacaacacaatcatgatgcacctattcttggaccaaggccatctcctttgcaccggacatcttcatacccgcaaaaggagcctcagtacaacccagctgaagtcattccaaatgcaccatacatgtcaaactatctacctggtgggccacccaattcagtgcctcgacaaccacatcagatgaacatgccatctttcaatgaatttcagatgcatatgtctgcgcaaagtgagaccccattctcccagtttcctcgtggagggacacctccagagccattatttggtggaaaccggggtcatatgatttcaacaggcttctcaactaacagcagtggacaacgagaccatctgctgaataatgggcagtttcatggggaaactgccagcatcatgccaaatttgctgccaaaccatctacaacgtccgaatacattcatgccccctcaattgttgacagtacgccaacagcatggcatgctcccaattcagcaatcttcaaagcagtcatcaagaacacagacacacatgtttggcccccagcatccaccacaaatgatgaataggtttgataattttgggatgcctgagttcagtgatccaagagcaagatcatcaatgcaccatggcaggcaaggtcaacattttcctctccatggctctgagtttggtattatgaagatgggtaatgggaggtcaaggtttagatccaagtatatgtccactgaagaacttgaaaacattttaagaatacagcatgccgccactcatataaatgatccatacatcgatgattattaccatcaagcttgtctggccagcagatatgtggatgcaaggtcgaagcaccgcttctgcccaaccttgattcgtgatccatcatcctgtacacggagtaaggatgagccacatgcataccttaaggttgatgcccttgggagactgccattttcttctgtacggagaccgcgtccactccttgacgttgagccagcttctgcaactgatgatgacaccgttatttcaaagcctcttgatcaggaacctctgctagctgctaggatcacgattgaggatggactctccctattacttgacatagacgatattgaccgcttgcttcagtttagccagcagcaagatggtggtttcgaacttaaaaatagaaggcaatctctacttggtcagctggcagaatcgctgcagttggttgatccactaggtgcaaataaaaacacacatctgtccgcaaatgatgatttggtatttcttcgcattgtttctctacccaagggccggaaactactttcacgctatatcaacctcatggtacctggtagcgatcttgcaaggatagtttgcatggcagtattcaggcacctgaggtttgtgtttggaaatctgccctctgatgacggcgcagctgagacagtaactaaactggctagcgctgtagcatcatgcattcgcgggatggacttaagtggcctcagtgcttgtctcgcagcaattgtgtgctcgtctgagcacccaccccttcggccccttggccatgctgctggcgatggtgccactgtcgtcataaaggctgtcctggatagagcaacagagctcctcaccgagcagcctgccgcgccagactatggcgctccaaaccgagccttgtggcaagcgtcgttcaatgccttctttgggctgctcactaagtactgcatgagtaagtttgatagcatggttcacacgatgcacaagctcggtgctgctgctgcaacagcgatacgcaaggaacttccggttgagcttctgcgcgccagccttcctcacacggatgagcagcagcgcagactactgctcgagttcgcccagcggaccgtgcccgtctctggccatggctccgacgggtgacggacgggcgggtggcggctggtggaaccatggcatctgaaacaataccagcttaagttcagatgggcatgccggcgttaagtggatggctgtgtttcgttggctctgggtgggaacggaacccccctgcacgttccttgaaggcaattgcaagaaaatactgcgagctgttggtgtttcggtttgcagtgtttgtttgtagtggcgtcaaggcttccaaggttctcatctcatcactccggacgggtgccaggaagatgtggtttaacacatgtataaactagcaaatgcttggaaggttgatatttggttctgtagccagccattcgaagattgttgggtggggggttttgtttcctgttatattcgcaactgaatacattatcttgcgaagctgttcagtctgtaacgagttcattgggaattccactatatatccttgttatggatggtcaggagctttgtatttttgtgattctgggtattacccttgtgttccataaaggacgctttcttcctcgctcctgaatccattgcatcgtgtcctgtccgaatgggtgatctacacttttagctttgcctttgccctctaaagataatagtcaaattaaaggactggattcaagaatcatcattttctaaaagtcgatttggaaaacaactctagacctgtttttagtggctttcgaatggaactgtaaaaacatatatcgaaaaa

SEQ ID NO: 72230 - DNA, 4817 bp, Zea Mays
cggagcatggggactgcgacccggtgctacgtgtgtgcgcaggagtggctgagacgctacgtggcatccatgcagggcgcttcgtggacccaagtggcctgcccaaacaaaaatatccatcacaacgcgtccgtggaccccaatcacccgtcaatcttgcagagaagcccctcagattagcagcaatgtacactgtacgcgtaagcgtaacctgagaaggactggaggtagaaagagagagagagagagcaggccgacggcccacgacatcgtttgggccaggagccccgcacgagcacccagccccagccccagccccgttctcggcttctcgcgtcttcttccccctttccgttccaattccaactgcaactggccgcgcccgccgccgccgcggttcccgtagctggggttcagacgctccgtcctactcccgcgccacgtctcctctgggccacttaacaatctcggtaacgcacgacttccccgccagtttcagtcccgcccccgacatcttccaccaccgggtccggggggccatctgccgtgcttgccaccccgcggtcgcgatcgatgattcctcgagagcagccgccaggtatgttccggccgccgaatgcctttggggcgccgcccccctttcttcctcagcctccaccgttgcagtggcagtggcagcaaccgcccccgcccccgccctcgccctcgccctcgcctgcggttaccttctggcagcgagacaatgtgcgggatcatgtgaggaagctgcaacagaccatcgagttatcaactgcgctaataaaagagctcgaggaaattgcggcggccggaaatcctggtgatggtgccacagaaacacgaaaatctgcttcgtcctcggcggaattgccgtgggggtccggcgattcttcagaggacaagcgcctcggtttcgttgagctggctaggtccatggggattagtcaggacactcatgagtcgatggcaacagatgcagccaattacctttgccaccagcttcagcatcttcttgggcctatctcttctgcgacgagccaaagtggcccctgggaggagaggtcggcgatggttaggttgactcagaagctgcagaaatctaagagaaataagcggtggcggcagaggagaaggaagcatgttgcggagctttttcagaaggagcgtgcggattatgatagagttgaccgggaagctgatgaatggagggctaagcaaatagccaaggacattgcaaagcggagggtggaaagcatgcagcagattgctagaaagaaaacaaatgaggaaagaaagcgcctagaatctgagctggagcttgccctaatggtcgagaaacttcaggagcttcggtctataagagttcaaaaaatgaagaaacaaggccattttcttcctgaagaggatgataaatacctcgagcgtgttaaggctgcagttgaggaagaggagcgccaagctgcatctgctgctcggactgatgctgttaaggatgctattctgactgctgaggagtcaaggaagcctctacagtatacaaattctcaggaaggtggttctgaacagcctaaaagtggaccatctgaagacgaggaccagggagatggtgggatgagtgagagaaatgaccaggcaagccaaaaaacagaacatgaagatgaaggtcatagatttgaggggaaagggcatggacatcatgaccctgtcagcaatctgccttttgagttctaccattattatcatggaagtgactatgacatggggacactcattgaggtccgcagaatgtgggattctttcatcagacctggaggaagccgtatacctgggcactgggttccaccaccccctccagctgatgaggtttgggcatcttatttggtgcagcacaagtaaatcaccatgggtatgagaaatggtcttttctgcttcaaaaccaccggaatctttaatggttcctgcaaggtaatctagatacttaagttagaacttcgagttttgttagaatcctcggaattccgagatgtattggttattcctgccattaattgtcgttagttaacttcataaattatagaataggatgtattctacctcttggtacgtcatgtcaactaatgatatagagaagttgtataaagggtgcaagtgattgcagttacctgggttaaatttactacttcacccatttgtttgttgtataaacattttatcaattcttgattttcttccagactatgcatggattatctcgaagcttttagctgcaaaaaaaaccctataacatgtgtctgaaaaaaacttcacacgtctataccctttattacaggatgtgatattttacataatatatgtccatttgtggcatgtgtgatgtcaactcctgaatattaaaatttgaatttgaaagctccataatcctggcttataagttgtggagaggaaacactagcaaaggctccttttttttagttgtggaaacctttttctatgtgaagaactgaagattgccagcaaaaggttcattcctgatcaagttgagttgtccattgtcatctgctgcttttcagaatgtaactctgaattacttagccttaggccttaacatatactcatcgtcgaaatgtaatgccctacactaatgatatgacattatcccaacttgttgagccagaaaataaaagtagtaaatttaactcagataaaataacttatcatccaagctgcaacgttgtgtgtctcaaaaaactcggtgcagctcaagatacacattgaaaaaatcctgatcggtgtttccattggtataacatcacggagtgttatttttatgttaatatttttttgtaaggcttcacatggatctttctgttagctgcaaaatattttaatcactagccaaaaaaaccttccaaaataagtatactagattatgtctagctttattgtaaactgagatttcttgtatataccttctctaggatccaaggacaaaacaatggcatcttgttaaggcaaataaatagataccaagttaaattcagtgaatggtggtaccaagtacaaacaagaagaaacaacaaccgattggtctaggtatggtacggtacgtttgcttgcaagcgaaacacaggcgttgttgtagatctactcggccgcggccgggcgttcgacgatctagctcgtagtcgtcgtagctggatgcgtgcgtacgtgcatgcatgctgccgagtgccggctcaaccggccatctcctcgtctcatatcatatatatacgcggtggtcgggtggtataccttggatatctcttgcaaggacatgggatgactggggagcagcacggttggcggctgcatggaggagccgggccatcctcgtctgtaggtcgtgtagccttttttttactcgcatcatcagagatggccatgcctgtttttgttttgtatctggtctctggggagcatacgtactgacaatgatagcaatgaaggcacacggatacaggctgtctctggtggtgcgcacctatgtgttgagctgagctggttggttggcggtttgcatgaacaacgcacaggcagaggcaggaaacaagccaacgcccaacggcaacaagagaaaaaaccccaagacctttccaagccagcaggcaacagcgcaccaatcccgacgcgaatcgcccagaacgcgaggcggaatttcccatcctcttggacccccccccccccccctctgttcttcctccttcccccgctcctcgtccacacgctccgctccgattccgcccgcgtccgcggacccagatccggcgcccgcgcccatggcgacgcgcaggcgaatgctcctcaaggtcatcatcctcggcgacagcggggtcggcaagacctcgctgatgaaccagtacgtcaacaacaggttcagcaaccagtacaaggccaccatcggcgcggatttcctcaccaaggaggtccagatcgacgaccgcctcttcacactgcagatatgggatacggcaggacaggagcggtttcaaagtcttggtgtggcattttataggggagctgactgctgtgttcttgtatatgatgtcaacgtatccaagtcatttgaaaagctcaacaactggcgtgaggaattcctaattcaagccagcccatcagacccagagaatttcccatttgttgtgcttggtaacaagatcgatgttgatggtggtaacagccggactgtttctgagaagaaggctaaagcatggtgtgcttcaaagggaaacatcccctactttgagacgtcggctaaagagggcttcaatgtagaggctgcatttgagtgtatagcgaggaatgctgtaaaaaatgagccagaagaagatatgtatcttcctgatacgattgatgttgggggcgctggaaggcaacagcgttcgtcaggttgtgaatgctagaagatatggagcactgcgaattgctcggttggttggtctgattctctagggcttgttgtttgggtggcctgtgtcatcatttcatatatgtatttagtttgcaaaactgctatttgtggacactggatagtttggaagtctgcatgcgggtgcttattgtcgactcccgtgtagatgcagagaactcatttgtaactgccgtttcggtgttgtatcgtatctgcgctagatgctagtgttgtaacgcttttgattgttgatggattgcatatatgtactgtatttgtacatgaacagaacgtagtgcccattttcatagtgttcaattgttggttggtttggtattgttcttttagt

SEQ ID NO: 72231 - DNA, 4553 bp, Zea Mays
tcgtttgggccaggagccccgcacgagcacccagccccagccccagccccgttctcggcttctcgcgtcttcttccccctttccgttccaattccaactgcaactggccgcgcccgccgccgccgcggttcccgtagctggggttcagacgctccgtcctactcccgcgccacgtctcctctgggccacttaacaatctcggtaacgcacgacttccccgccagtttcagtcccgcccccgacatcttccaccaccgggtccggggggccatctgccgtgcttgccaccccgcggtcgcgatcgatgattcctcgagagcagccgccaggtatgttccggccgccgaatgcctttggggcgccgcccccctttcttcctcagcctccaccgttgcagtggcagtggcagcaaccgcccccgcccccgccctcgccctcgccctcgcctgcggttaccttctggcagcgagacaatgtgcgggatcatgtgaggaagctgcaacagaccatcgagttatcaactgcgctaataaaagagctcgaggaaattgcggcggccggaaatcctggtgatggtgccacagaaacacgaaaatctgcttcgtcctcggcggaattgccgtgggggtccggcgattcttcagaggacaagcgcctcggtttcgttgagctggctaggtccatggggattagtcaggacactcatgagtcgatggcaacagatgcagccaattacctttgccaccagcttcagcatcttcttgggcctatctcttctgcgacgagccaaagtggcccctgggaggagaggtcggcgatggttaggttgactcagaagctgcagaaatctaagagaaataagcggtggcggcagaggagaaggaagcatgttgcggagctttttcagaaggagcgtgcggattatgatagagttgaccgggaagctgatgaatggagggctaagcaaatagccaaggacattgcaaagcggagggtggaaagcatgcagcagattgctagaaagaaaacaaatgaggaaagaaagcgcctagaatctgagctggagcttgccctaatggtcgagaaacttcaggagcttcggtctataagagttcaaaaaatgaagaaacaaggccattttcttcctgaagaggatgataaatacctcgagcgtgttaaggctgcagttgaggaagaggagcgccaagctgcatctgctgctcggactgatgctgttaaggatgctattctgactgctgaggagtcaaggaagcctctacagtatacaaattctcaggaaggtggttctgaacagcctaaaagtggaccatctgaagacgaggaccagggagatggtgggatgagtgagagaaatgaccaggcaagccaaaaaacagaacatgaagatgaaggtcatagatttgaggggaaagggcatggacatcatgaccctgtcagcaatctgccttttgagttctaccattattatcatggaagtgactatgacatggggacactcattgaggtccgcagaatgtgggattctttcatcagacctggaggaagccgtatacctgggcactgggttccaccaccccctccagctgatgaggtttgggcatcttatttggtgcagcacaagtaaatcaccatgggtatgagaaatggtcttttctgcttcaaaaccaccggaatctttaatggttcctgcaaggtaatctagatacttaagttagaacttcgagttttgttagaatcctcggaattccgagatgtattggttattcctgccattaattgtcgttagttaacttcataaattatagaataggatgtattctacctcttggtacgtcatgtcaactaatgatatagagaagttgtataaagggtgcaagtgattgcagttacctgggttaaatttactacttcacccatttgtttgttgtataaacattttatcaattcttgattttcttccagactatgcatggattatctcgaagcttttagctgcaaaaaaaaccctataacatgtgtctgaaaaaaacttcacacgtctataccctttattacaggatgtgatattttacataatatatgtccatttgtggcatgtgtgatgtcaactcctgaatattaaaatttgaatttgaaagctccataatcctggcttataagttgtggagaggaaacactagcaaaggctccttttttttagttgtggaaacctttttctatgtgaagaactgaagattgccagcaaaaggttcattcctgatcaagttgagttgtccattgtcatctgctgcttttcagaatgtaactctgaattacttagccttaggccttaacatatactcatcgtcgaaatgtaatgccctacactaatgatatgacattatcccaacttgttgagccagaaaataaaagtagtaaatttaactcagataaaataacttatcatccaagctgcaacgttgtgtgtctcaaaaaactcggtgcagctcaagatacacattgaaaaaatcctgatcggtgtttccattggtataacatcacggagtgttatttttatgttaatatttttttgtaaggcttcacatggatctttctgttagctgcaaaatattttaatcactagccaaaaaaaccttccaaaataagtatactagattatgtctagctttattgtaaactgagatttcttgtatataccttctctaggatccaaggacaaaacaatggcatcttgttaaggcaaataaatagataccaagttaaattcagtgaatggtggtaccaagtacaaacaagaagaaacaacaaccgattggtctaggtatggtacggtacgtttgcttgcaagcgaaacacaggcgttgttgtagatctactcggccgcggccgggcgttcgacgatctagctcgtagtcgtcgtagctggatgcgtgcgtacgtgcatgcatgctgccgagtgccggctcaaccggccatctcctcgtctcatatcatatatatacgcggtggtcgggtggtataccttggatatctcttgcaaggacatgggatgactggggagcagcacggttggcggctgcatggaggagccgggccatcctcgtctgtaggtcgtgtagccttttttttactcgcatcatcagagatggccatgcctgtttttgttttgtatctggtctctggggagcatacgtactgacaatgatagcaatgaaggcacacggatacaggctgtctctggtggtgcgcacctatgtgttgagctgagctggttggttggcggtttgcatgaacaacgcacaggcagaggcaggaaacaagccaacgcccaacggcaacaagagaaaaaaccccaagacctttccaagccagcaggcaacagcgcaccaatcccgacgcgaatcgcccagaacgcgaggcggaatttcccatcctcttggacccccccccccccccctctgttcttcctccttcccccgctcctcgtccacacgctccgctccgattccgcccgcgtccgcggacccagatccggcgcccgcgcccatggcgacgcgcaggcgaatgctcctcaaggtcatcatcctcggcgacagcggggtcggcaagacctcgctgatgaaccagtacgtcaacaacaggttcagcaaccagtacaaggccaccatcggcgcggatttcctcaccaaggaggtccagatcgacgaccgcctcttcacactgcagcttagatatgggatacggcaggacaggagcggtttcaaagtcttggtgtggcattttataggggagctgactgctgtgttcttgtatatgatgtcaacgtatccaagtcatttgaaaagctcaacaactggcgtgaggaattcctaattcaagccagcccatcagacccagagaatttcccatttgttgtgcttggtaacaagatcgatgttgatggtggtaacagccggactgtttctgagaagaaggctaaagcatggtgtgcttcaaagggaaacatcccctactttgagacgtcggctaaagagggcttcaatgtagaggctgcatttgagtgtatagcgaggaatgctgtaaaaaatgagccagaagaagatatgtatcttcctgatacgattgatgttgggggcgctggaaggcaacagcgttcgtcaggttgtgaatgctagaagatatggagcactgcgaattgctcggttggttggtctgattctctagggcttgttgtttgggtggcctgtgtcatcatttcatatatgtatttagtttgcaaaactgctatttgtggacactggatagtttggaagtctgcatgcgggtgcttattgtcgactcccgtgtagatgcagagaactcatttgtaactgccgtttcggtgttgtatcgtatctgcgctagatgctagtgttgtaacgcttttgattgttgatggattgcatatatgtactgtatttgtacatgaacagaacgtagtgcccattttcatagtgttcaattgttggttggtttggtattgttcttttagt

SEQ ID NO: 72232 - DNA, 3002 bp, Zea Mays
tcgtttgggccaggagccccgcacgagcacccagccccagccccagccccgttctcggcttctcgcgtcttcttccccctttccgttccaattccaactgcaactggccgcgcccgccgccgccgcggttcccgtagctggggttcagacgctccgtcctactcccgcgccacgtctcctctgggccacttaacaatctcggtaacgcacgacttccccgccagtttcagtcccgcccccgacatcttccaccaccgggtccggggggccatctgccgtgcttgccaccccgcggtcgcgatcgatgattcctcgagagcagccgccaggtatgttccggccgccgaatgcctttggggcgccgcccccctttcttcctcagcctccaccgttgcagtggcagtggcagcaaccgcccccgcccccgccctcgccctcgccctcgcctgcggttaccttctggcagcgagacaatgtgcgggatcatgtgaggaagctgcaacagaccatcgagttatcaactgcgctaataaaagagctcgaggaaattgcggcggccggaaatcctggtgatggtgccacagaaacacgaaaatctgcttcgtcctcggcggaattgccgtgggggtccggcgattcttcagaggacaagcgcctcggtttcgttgagctggctaggtccatggggattagtcaggacactcatgagtcgatggcaacagatgcagccaattacctttgccaccagcttcagcatcttcttgggcctatctcttctgcgacgagccaaagtggcccctgggaggagaggtcggcgatggttaggttgactcagaagctgcagaaatctaagagaaataagcggtggcggcagaggagaaggaagcatgttgcggagctttttcagaaggagcgtgcggattatgatagagttgaccgggaagctgatgaatggagggctaagcaaatagccaaggacattgcaaagcggagggtggaaagcatgcagcagattgctagaaagaaaacaaatgaggaaagaaagcgcctagaatctgagctggagcttgccctaatggtcgagaaacttcaggagcttcggtctataagagttcaaaaaatgaagaaacaaggccattttcttcctgaagaggatgataaatacctcgagcgtgttaaggctgcagttgaggaagaggagcgccaagctgcatctgctgctcggactgatgctgttaaggatgctattctgactgctgaggagtcaaggaagcctctacagtatacaaattctcaggaaggtggttctgaacagcctaaaagtggaccatctgaagacgaggaccagggagatggtgggatgagtgagagaaatgaccaggcaagccaaaaaacagaacatgaagatgaaggtcatagatttgaggggaaagggcatggacatcatgaccctgtcagcaatctgccttttgagttctaccattattatcatggaagtgactatgacatggggacactcattgaggtccgcagaatgtgggattctttcatcagacctggaggaagccgtatacctgggcactgggttccaccaccccctccagctgatgaggtttgggcatcttatttggtgcagcacaagtaaatcaccatgggtatgagaaatggtcttttctgcttcaaaaccaccggaatctttaatggttcctgcaaggcacacggatacaggctgtctctggtggtgcgcacctatgtgttgagctgagctggttggttggcggtttgcatgaacaacgcacaggcagaggcaggaaacaagccaacgcccaacggcaacaagagaaaaaaccccaagacctttccaagccagcaggcaacagcgcaccaatcccgacgcgaatcgcccagaacgcgaggcggaatttcccatcctcttggacccccccccccccccctctgttcttcctccttcccccgctcctcgtccacacgctccgctccgattccgcccgcgtccgcggacccagatccggcgcccgcgcccatggcgacgcgcaggcgaatgctcctcaagggtcggcaagacctcgctgatgaaccagtacgtcaacaacaggttcagcaaccagtacaaggccaccatcggcgcggatttcctcaccaaggaggtccagatcgacgaccgcctcttcacactgcagatatgggatacggcaggacaggagcggtttcaaagtcttggtgtggcattttataggggagctgactgctgtgttcttgtatatgatgtcaacgtatccaagtcatttgaaaagctcaacaactggcgtgaggaattcctaattcaagccagcccatcagacccagagaatttcccatttgttgtgcttggtaacaagatcgatgttgatggtggtaacagccggactgtttctgagaagaaggctaaagcatggtgtgcttcaaagggaaacatcccctactttgagacgtcggctaaagagggcttcaatgtagaggctgcatttgagtgtatagcgaggaatgctgtaaaaaatgagccagaagaagatatgtatcttcctgatacgattgatgttgggggcgctggaaggcaacagcgttcgtcaggttgtgaatgctagaagatatggagcactgcgaattgctcggttggttggtctgattctctagggcttgttgtttgggtggcctgtgtcatcatttcatatatgtatttagtttgcaaaactgctatttgtggacactggatagtttggaagtctgcatgcgggtgcttattgtcgactcccgtgtagatgcagagaactcatttgtaactgccgtttcggtgttgtatcgtatctgcgctagatgctagtgttgtaacgcttttgattgttgatggattgcatatatgtactgtatttgtacatgaacagaacgtagtgcccattttcatagtgttcaattgttggttggtttggtattgttcttttagt

SEQ ID NO: 72233 - DNA, 2627 bp, Zea Mays
tcgtttgggccaggagccccgcacgagcacccagccccagccccagccccgttctcggcttctcgcgtcttcttccccctttccgttccaattccaactgcaactggccgcgcccgccgccgccgcggttcccgtagctggggttcagacgctccgtcctactcccgcgccacgtctcctctgggccacttaacaatctcggtaacgcacgacttccccgccagtttcagtcccgcccccgacatcttccaccaccgggtccggggggccatctgccgtgcttgccaccccgcggtcgcgatcgatgattcctcgagagcagccgccaggtatgttccggccgccgaatgcctttggggcgccgcccccctttcttcctcagcctccaccgttgcagtggcagtggcagcaaccgcccccgcccccgccctcgccctcgccctcgcctgcggttaccttctggcagcgagacaatgtgcgggatcatgtgaggaagctgcaacagaccatcgagttatcaactgcgctaataaaagagctcgaggaaattgcggcggccggaaatcctggtgatggtgccacagaaacacgaaaatctgcttcgtcctcggcggaattgccgtgggggtccggcgattcttcagaggacaagcgcctcggtttcgttgagctggctaggtccatggggattagtcaggacactcatgagtcgatggcaacagatgcagccaattacctttgccaccagcttcagcatcttcttgggcctatctcttctgcgacgagccaaagtggcccctgggaggagaggtcggcgatggttaggttgactcagaagctgcagaaatctaagagaaataagcggtggcggcagaggagaaggaagcatgttgcggagctttttcagaaggagcgtgcggattatgatagagttgaccgggaagctgatgaatggagggctaagcaaatagccaaggacattgcaaagcggagggtggaaagcatgcagcagattgctagaaagaaaacaaatgaggaaagaaagcgcctagaatctgagctggagcttgccctaatggtcgagaaacttcaggagcttcggtctataagagttcaaaaaatgaagaaacaaggccattttcttcctgaagaggatgataaatacctcgagcgtgttaaggctgcagttgaggaagaggagcgccaagctgcatctgctgctcggactgatgctgttaaggatgctattctgactgctgaggagtcaaggaagcctctacagtatacaaattctcaggaaggtggttctgaacagcctaaaagtggaccatctgaagacgaggaccagggagatggtgggatgagtgagagaaatgaccaggcaagccaaaaaacagaacatgaagatgaaggtcatagatttgaggggaaagggcatggacatcatgaccctgtcagcaatctgccttttgagttctaccattattatcatggaagtgactatgacatggggacactcattgaggtccgcagaatgtgggattctttcatcagacctggaggaagccgtatacctgggcactgggttccaccaccccctccagctgatgaggtttgggcatcttatttggtgcagcacaagtaaatcaccatgggtatgagaaatggtcttttctgcttcaaaaccaccggaatctttaatggttcctgcaagggtcggcaagacctcgctgatgaaccagttcagcaaccagtacaaggccaccatcggcgcggatttcctcaccaaggaggtccagatcgacgaccgcctcttcacactgcagatatgggatacggcaggacaggagcggtttcaaagtcttggtgtggcattttataggggagctgactgctgtgttcttgtatatgatgtcaacgtatccaagtcatttgaaaagctcaacaactggcgtgaggaattcctaattcaagccagcccatcagacccagagaatttcccatttgttgtgcttggtaacaagatcgatgttgatggtggtaacagccggactgtttctgagaagaaggctaaagcatggtgtgcttcaaagggaaacatcccctactttgagacgtcggctaaagagggcttcaatgtagaggctgcatttgagtgtatagcgaggaatgctgtaaaaaatgagccagaagaagatatgtatcttcctgatacgattgatgttgggggcgctggaaggcaacagcgttcgtcaggttgtgaatgctagaagatatggagcactgcgaattgctcggttggttggtctgattctctagggcttgttgtttgggtggcctgtgtcatcatttcatatatgtatttagtttgcaaaactgctatttgtggacactggatagtttggaagtctgcatgcgggtgcttattgtcgactcccgtgtagatgcagagaactcatttgtaactgccgtttcggtgttgtatcgtatctgcgctagatgctagtgttgtaacgcttttgattgttgatggattgcatatatgtactgtatttgtacatgaacagaacgtagtgcccattttcatagtgttcaattgttggttggtttggtattgttcttttagt

SEQ ID NO: 72234 - DNA, 2938 bp, Zea Mays
tcgtttgggccaggagccccgcacgagcacccagccccagccccagccccgttctcggcttctcgcgtcttcttccccctttccgttccaattccaactgcaactggccgcgcccgccgccgccgcggttcccgtagctggggttcagacgctccgtcctactcccgcgccacgtctcctctgggccacttaacaatctcggtaacgcacgacttccccgccagtttcagtcccgcccccgacatcttccaccaccgggtccggggggccatctgccgtgcttgccaccccgcggtcgcgatcgatgattcctcgagagcagccgccaggtatgttccggccgccgaatgcctttggggcgccgcccccctttcttcctcagcctccaccgttgcagtggcagtggcagcaaccgcccccgcccccgccctcgccctcgccctcgcctgcggttaccttctggcagcgagacaatgtgcgggatcatgtgaggaagctgcaacagaccatcgagttatcaactgcgctaataaaagagctcgaggaaattgcggcggccggaaatcctggtgatggtgccacagaaacacgaaaatctgcttcgtcctcggcggaattgccgtgggggtccggcgattcttcagaggacaagcgcctcggtttcgttgagctggctaggtccatggggattagtcaggacactcatgagtcgatggcaacagatgcagccaattacctttgccaccagcttcagcatcttcttgggcctatctcttctgcgacgagccaaagtggcccctgggaggagaggtcggcgatggttaggttgactcagaagctgcagaaatctaagagaaataagcggtggcggcagaggagaaggaagcatgttgcggagctttttcagaaggagcgtgcggattatgatagagttgaccgggaagctgatgaatggagggctaagcaaatagccaaggacattgcaaagcggagggtggaaagcatgcagcagattgctagaaagaaaacaaatgaggaaagaaagcgcctagaatctgagctggagcttgccctaatggtcgagaaacttcaggagcttcggtctataagagttcaaaaaatgaagaaacaaggccattttcttcctgaagaggatgataaatacctcgagcgtgttaaggctgcagttgaggaagaggagcgccaagctgcatctgctgctcggactgatgctgttaaggatgctattctgactgctgaggagtcaaggaagcctctacagtatacaaattctcaggaaggtggttctgaacagcctaaaagtggaccatctgaagacgaggaccagggagatggtgggatgagtgagagaaatgaccaggcaagccaaaaaacagaacatgaagatgaaggtcatagatttgaggggaaagggcatggacatcatgaccctgtcagcaatctgccttttgagttctaccattattatcatggaagtgactatgacatggggacactcattgaggtccgcagaatgtgggattctttcatcagacctggaggaagccgtatacctgggcactgggttccaccaccccctccagctgatgaggtttgggcatcttatttggtgcagcacaagtaaatcaccatgggtatgagaaatggtcttttctgcttcaaaaccaccggaatctttaatggttcctgcaaggcagaggcaggaaacaagccaacgcccaacggcaacaagagaaaaaaccccaagacctttccaagccagcaggcaacagcgcaccaatcccgacgcgaatcgcccagaacgcgaggcggaatttcccatcctcttggacccccccccccccccctctgttcttcctccttcccccgctcctcgtccacacgctccgctccgattccgcccgcgtccgcggacccagatccggcgcccgcgcccatggcgacgcgcaggcgaatgctcctcaaggtcatcatcctcggcgacagcggggtcggcaagacctcgctgatgaaccagtacgtcaacaacaggttcagcaaccagtacaaggccaccatcggcgcggatttcctcaccaaggaggtccagatcgacgaccgcctcttcacactgcagatatgggatacggcaggacaggagcggtttcaaagtcttggtgtggcattttataggggagctgactgctgtgttcttgtatatgatgtcaacgtatccaagtcatttgaaaagctcaacaactggcgtgaggaattcctaattcaagccagcccatcagacccagagaatttcccatttgttgtgcttggtaacaagatcgatgttgatggtggtaacagccggactgtttctgagaagaaggctaaagcatggtgtgcttcaaagggaaacatcccctactttgagacgtcggctaaagagggcttcaatgtagaggctgcatttgagtgtatagcgaggaatgctgtaaaaaatgagccagaagaagatatgtatcttcctgatacgattgatgttgggggcgctggaaggcaacagcgttcgtcaggttgtgaatgctagaagatatggagcactgcgaattgctcggttggttggtctgattctctagggcttgttgtttgggtggcctgtgtcatcatttcatatatgtatttagtttgcaaaactgctatttgtggacactggatagtttggaagtctgcatgcgggtgcttattgtcgactcccgtgtagatgcagagaactcatttgtaactgccgtttcggtgttgtatcgtatctgcgctagatgctagtgttgtaacgcttttgattgttgatggattgcatatatgtactgtatttgtacatgaacagaacgtagtgcccattttcatagtgttcaattgttggttggtttggtattgttcttttagt

SEQ ID NO: 72235 - DNA, 1283 bp, Zea Mays
aattcagtgaatggtggtaccaagtacaaacaagaagaaacaacaaccgattggtctaggcagaggcaggaaacaagccaacgcccaacggcaacaagagaaaaaaccccaagacctttccaagccagcaggcaacagcgcaccaatcccgacgcgaatcgcccagaacgcgaggcggaatttcccatcctcttggacccccccccccccccctctgttcttcctccttcccccgctcctcgtccacacgctccgctccgattccgcccgcgtccgcggacccagatccggcgcccgcgcccatggcgacgcgcaggcgaatgctcctcaaggtcatcatcctcggcgacagcggggtcggcaagacctcgctgatgaaccagtacgtcaacaacaggttcagcaaccagtacaaggccaccatcggcgcggatttcctcaccaaggaggtccagatcgacgaccgcctcttcacactgcagatatgggatacggcaggacaggagcggtttcaaagtcttggtgtggcattttataggggagctgactgctgtgttcttgtatatgatgtcaacgtatccaagtcatttgaaaagctcaacaactggcgtgaggaattcctaattcaagccagcccatcagacccagagaatttcccatttgttgtgcttggtaacaagatcgatgttgatggtggtaacagccggactgtttctgagaagaaggctaaagcatggtgtgcttcaaagggaaacatcccctactttgagacgtcggctaaagagggcttcaatgtagaggctgcatttgagtgtatagcgaggaatgctgtaaaaaatgagccagaagaagatatgtatcttcctgatacgattgatgttgggggcgctggaaggcaacagcgttcgtcaggttgtgaatgctagaagatatggagcactgcgaattgctcggttggttggtctgattctctagggcttgttgtttgggtggcctgtgtcatcatttcatatatgtatttagtttgcaaaactgctatttgtggacactggatagtttggaagtctgcatgcgggtgcttattgtcgactcccgtgtagatgcagagaactcatttgtaactgccgtttcggtgttgtatcgtatctgcgctagatgctagtgttgtaacgcttttgattgttgatggattgcatatatgtactgtatttgtacatgaacagaacgtagtgcccattttcatagtgttcaattgttggttggtttggtattgttcttttagt

SEQ ID NO: 72236 - DNA, 912 bp, Zea Mays
cctgaatcgacaaccatcgccttctatcgtgtgggttgcttattggagatgccgagtggttccagtccacaccgtgccacgctgggttcagttcacactgtaactcctctgatatgggatacggcaggacaggagcggtttcaaagtcttggtgtggcattttataggggagctgactgctgtgttcttgtatatgatgtcaacgtatccaagtcatttgaaaagctcaacaactggcgtgaggaattcctaattcaagccagcccatcagacccagagaatttcccatttgttgtgcttggtaacaagatcgatgttgatggtggtaacagccggactgtttctgagaagaaggctaaagcatggtgtgcttcaaagggaaacatcccctactttgagacgtcggctaaagagggcttcaatgtagaggctgcatttgagtgtatagcgaggaatgctgtaaaaaatgagccagaagaagatatgtatcttcctgatacgattgatgttgggggcgctggaaggcaacagcgttcgtcaggttgtgaatgctagaagatatggagcactgcgaattgctcggttggttggtctgattctctagggcttgttgtttgggtggcctgtgtcatcatttcatatatgtatttagtttgcaaaactgctatttgtggacactggatagtttggaagtctgcatgcgggtgcttattgtcgactcccgtgtagatgcagagaactcatttgtaactgccgtttcggtgttgtatcgtatctgcgctagatgctagtgttgtaacgcttttgattgttgatggattgcatatatgtactgtatttgtacatgaacagaacgtagtgcccattttcatagtgttcaattgttggttggtttggtattgttcttttagt

SEQ ID NO: 72237 - DNA, 902 bp, Zea Mays
tatgtccataattttgctttgatatgggatacggcaggacaggagcggtttcaaagtcttggtgtggcattttataggggagctgactgctgtgttcttgtatatgatgtcaacgtatccaagtcatttgaaaagctcaacaactggcgtgaggaattcctaattcaagtaattaacctgcttattcgcgatctatatctgtatgtccattgtgtttgaaaaaaaaggactcactgttcattatgcaggccagcccatcagacccagagaatttcccatttgttgtgcttggtaacaagatcgatgttgatggtggtaacagccggactgtttctgagaagaaggctaaagcatggtgtgcttcaaagggaaacatcccctactttgagacgtcggctaaagagggcttcaatgtagaggctgcatttgagtgtatagcgaggaatgctgtaaaaaatgagccagaagaagatatgtatcttcctgatacgattgatgttgggggcgctggaaggcaacagcgttcgtcaggttgtgaatgctagaagatatggagcactgcgaattgctcggttggttggtctgattctctagggcttgttgtttgggtggcctgtgtcatcatttcatatatgtatttagtttgcaaaactgctatttgtggacactggatagtttggaagtctgcatgcgggtgcttattgtcgactcccgtgtagatgcagagaactcatttgtaactgccgtttcggtgttgtatcgtatctgcgctagatgctagtgttgtaacgcttttgattgttgatggattgcatatatgtactgtatttgtacatgaacagaacgtagtgcccattttcatagtgttcaattgttggttggtttggtattgttcttttagt

SEQ ID NO: 72238 - DNA, 1973 bp, Zea Mays
caaacgttagccttttccaatcagggagagagctcaaacatggcactcgaacccgtcgccctcctgctcacggtcctcgtcgccgcgccgctcacggtcctcctcctcctcttcctcgtcgccggcaacaagaggcccgctcgtgctgcttctcccacgccgcgccaccgcttgaggctgccgctgccgccgtcgccgcggggcctcccgctgctgggccacctgcacctgctgggctcgctgccgcaccgcgcgctggcgtctctggcgcgcgcgcacggccccgtgctgctgctccgcctgggccgcgtgcccaccgtggtcgtgtcctccgcggccgccgccgaggaggtgatgcgggcgcgggatctggcgttcgcgaaccggcccgcgagcgccatggccgagcgcctcctctacggccgcgacgtcgcgttcgcgccctacggcgagtactggcgcatggtgcgccgcgtctgcgtcgtccacctcctcagcgcgcgtcgcgtcggatccttccgccgcgtccgagagcaggaggccgccgcgctggtcgcacgcgtcgcccgggacagcgccggtggcgcggccgtcggcctcagcgatctcctcaccgagtacgccaacgccgtcgtgtcgcgcgccgcgttcggcgacgagagcgcgcgcgggctgttggacgaattcgactccggccgtcggcacaggaaagtgctcaccgacttccagaagctcctggggacgacgcccgttggggaggtgctgccgtggctgggctgggtggacgccgtcacggggctggaggggaagatcaggcggacgttcgaggggctcgacgggttgctcgagaaggtgatcgatgaccaccggcggcggcctcgcagcggggaggacggcggtgaccgggacttcgtggacgtgttgctggacgtccacaacaaggaccaagagcacggcatccaactagagaccaacgaaatcaaggccatcatcttggcacggacacgacaacctcggtgatggaatgggccatggcggagctcgtcacccacccgcgcgccatgcggagagcccaggacgaggtccgcgcggcggcggccggctcaaccggcgtcaacgaggaccacgtcgcgcagctggactacctcaaggccgtgctgaaggagacgcttcggctgcacgcgccggtgccactgctggtgccccgggagccgccggcggacaccgagatcctggggtaccacatcccggcgcgcacgcgcgtgctggtcaacgcctgggcaattggccgggacccagcgacgtgggagcgcgccgaggaattcgtgccggagaggttcttgggcggcggcgccgcagccaacgtcggcttcaaggggcagcacttcgagctcctgccgttcggcgccggcaggaggatgtgccctgggatcgcgttcgcggagggaagcgccgagatggcgctggcgagcttgctgtatcattttgactgggaggtgagccggggccagaaccgggaagggacgtcgtcgctggacatgaccgagatgagcgggataaccgtgcatatcaagtcaggtctgccgcttgtagccaagccgtggagtggatccccttgaactagtaggagaaaaatattgtcagggcgcatgcttttttgcacgtaaattcgcgtctatatatatatatatatatatatatatatatatatatatatgatggtttatatttgaacttctatatatttgtgttattgcatttttattgttcatttatcaattattattattattattattattattattattattattattattgttattgtcgtcatttttcccttatttttctttggctcttcttctcatgattagccttgtgagctaagtatttcttattgtttgatgaggagccatcttgagtgagcattgatcttacccaatttttttgtttgtgtggtagtggaaaga

SEQ ID NO: 72239 - DNA, 3642 bp, Zea Mays
ctccccctcgcccacagatcgccgtggctgcgcctaccaacccacaccgctcctcccctccccgtccctttcaccaccaaggtcgcatcgagtccaccgttggtgtcggttccttcctcgcaattccatcagcaaaagcagactgtactaccaactagagaagaggcttagatccactgcacactgaaccctatgccaggggaagctctcacgtcgcgcccgcccatggaccgcctcgtcgacgaccttgccgcggcaaccctctccgatctagcggaccagggcaccgccaccatcggtttgcttaacactgattcctcctcagcatcatgtgcaccgtagcgtagagggtaccaacgccatcatccacaaccaggtaacgtgttcaatcccccgtttcccatcgcttcgcttctaacccagaccagtttcggttcgtttattgtcccaccagccaaatggtaatgattttttggtgtaatataatataataaaaaacataaatactagcttagtttgatttttcgagtggtttgcttccatttcggttggaagagaagatggtaagtctgtttctattctatactgtcacacccggatttcgggggcaccaagacccaggtgcgaacataatcaccaagtgtgataggagcaagtcttacacatatgatgactcatggtacagaaacgaatgtcacatctttactatataataggagttatatacaaaataaataaataaatacatcatatgaagacaacgatccagcaacccaaagttgactgggaaacgacgtcctagacctctcacgaacacatcatagcatccttcatgcgcctcatcctgtggtacctgttcttgacctgtgtggggggtggacaacaagggtgagctcacatatgttcatcgctcaacaagttgtggggaataatgtgcacgaattcaccaaaggtgggagttcatgtgaagtgtaaggcttaccaaagaggatggttgaagctgagcattgcttttaaagttggtcaaaattttattagcaattactaagtacaagtagataccaaaccagagtaataatagatcaaaattataacaacacccgcgatgcaatgtatatgacaaatttaatttagttccataaattaatcatgagtgagtcctaagctgctcatgaccgcgagcacggctagtataccagttttacactctggagaggttgtaccttgtacccacaagtcgtgtatcccatctcgccagggtttgcaaggcccttagacacttccgaggtgaatggctagggatccactattaggcctttacaaagttccactagcttccgaaaacccgctacagttctaggaagagtaatgtaggaatccctcgtctgaccgccatcgcagccaaatcaacccgagaacctccctacacgcctactcccctactacccttgcccctttcgggtaaggtagtcttccactagcttttttaattagtcagccaagggcgtcccattccacccttatggtggcacgtgtttctcaagttaagctccatgttccaattaatataatgatcttgtcatggacaataaataaaacaacagtataattgaaacatgatcataatgtaatattaatcccaaaaccataaagagcaatagcaaaaactacccaaatagtttaggggtaaacaaggtataaagataaccaaactagggtgacctattgggtcccatcataattaatcctatgcatgccaaagtgattatagagaacattattgggtaaataaaagtgatcaagggcacaacttgctagggacttgagattccaggtatcaacttcctcttcaagtgactcgtaacctcgcactagtcgtagcaatacaaataaatagggtataggcaaaattaacatcacaccaaaatataataacaaactatgtaataataatctacacgacgctacaaggtcgtgggttcgagaaccgctaaattcggagctatggatataaagttatggttttccgaagtcttaattaattaattaatagaattatattatatgttgattaatataaatcaggtgagaaaatattcctaagaaatcattagtttaattttaatccaacttataacttgattaaagcatattttagtcaaatcataactagggactgaaaaccttatcttatttttaattagaaaagttaattcgatgaacatagggtaaacacattaattattcaaaaaccaggttacatgataaattagggttactaatttgtagataattttattgcgaagctaatgcaatttgaatgggtcaaatcaaagttaaaatgatcaaaatacggattttagaagttctaggtcaattttgataataatcttatactctaaattccaaccaggggcctaattgcaaataccaagggaggttttgtaaaaattgaggatccaactgttatttttatgcaccaggtgaatggcgggttggttattgaaaaagtaagggtctcttttgcaaagtggtggttgaaggggtatggataactcctagccgttggatcacgatctgcggtcaggattaaatcgaatcctagataaacggatacgccctagccgtcggatccgaaaatctatggcctagattagattagccttaggcgaactggttcgtgatgtgaaccgccagatgccaatccaagggtcaggatcaaaagtatcccgcgcacacgactacccgttcatcttcaaatctacggtcgtgaggaactctagccgattcagtactcagatctaattgtagcccttcacagctaacccaacgacatggattgtcccagccgaagcggtatgctccaaccaatctaggccgcccatcactagatccacaaccccacgttcttcttcccctccatcaccctgccatccggagcacggttaggcgtgcccctgaactcgcagccatgcccccggagccccatacggaaggatacacgtagcggaggtaaaaagtaacctattgagtgagttctcaccgcaaatcaccaagcgactagctcagtccacggtagaccgtggcgtcgcggtggtaaatgtactccggtgagcaattcacatctcgtccgccaatccgccatactccgtgatcgccaccgccacacacatgctcgatttgatcccgcgatgctccaaagccatctgtcggtgctgacagcgctccatgatttcgcccgcgacggacctatcctcccacccatgggtgctctcggttagcttagctctctggttgtgctcgccctattagttcctagggagggtgatgcacgagtcacatatataagcacaaattaaagattccgagatgaactcgtttggcagttccgccatacgtggcgagctccccccattcggttgagatttgagaaacagacagaaggaagaggatatgtctgacggatcggacccacctgccagcgagttaacccgatgagcgcgggcgcgacagagtggctgactcgacaacccacatgtcaggtaccagggtcccgaccgagtgcgtgggcgacgcatccgagtcatgcccagagcgacccacatgtaagtgtcaccagaaaaaggaaaaagggggaaagag

SEQ ID NO: 72240 - DNA, 1697 bp, Zea Mays
cgccgtcgaggcgtcctccctcccgagtcccacgagcacggagcaccggcctccggttcagattcggtgacacgcacggcacggacgaacccaacggggcactgctcacgggaaagagagaggattcctccgccgcgtccgcgttggactggacagctcacgccgctgcgaaagcaaccagccagagccagatccgtcggttccaacgaaacatccattcacgcccgccaccggcatccccatctccgatccgccgcagccgcagtcgcaggcacgtcctcctctccggccacccggagcgcggcagccagcgagcgagccactgtggtcgccgtgcaggcaatcaaaagatgtcgtcaaggcactaaagaaacggattggccacaagaatccaaaagttcaacttcttgcactaactctgttggaaactgttataaaaaattgtggggatatacttcacatgcatgttgcagagagagatatattgcatgatatggtgaagatagtgaagaaaaagtctgatcctcgtgttaaagagaaggtattggtgctgatagatacatggcaagacgtgtttgggggatcacatgcaagatatccacaatactatgcagcataccatgagttggtgcgtgctggagctgaattcccgaagagacccgagaaacctgcacctttgtttaatggccagtctcaggcagcaaggaatatgcgtagtcctgaccaacaggaagcggaatcttctgctgccaatgattttcctgctttgagcatgtcggagattcataacgcttgtggtattatggatgtacttgctgagatgctgaatgctttagacccaggaaacagagaggggctaaggcaggaggtaattgtggaacttgtggatcaatgccgcacttacaagcagagagtagtgcagctagttaattctaccacggacgaggaacttatgtcgcaggggctcacactgaatgatgatttgcagcgtgttctagcaaaacatgatgcaatagcagcaggcattgcagtccgagtggagaaaaaatcgaagtctttgcaagcacttgtagagaccaaggattcgacaaaccaggattccaaaaaggagcaaggactcatagatattgaggatcccacaagtcaagatgctgcaaaagatccaaatcaaagtacaagtgaccaatctccttttgagcaattagctcttccagcaccaccagtgtcaaatggcgcagcaacttcagcaccacaatctgatcttggcattgatcttctgagctgggatgatacccctgctacaacacaaaatccacttgctcttgttcctgtcacagatcctcttgctgactctacttcatcaaatcaaaatgcgctagcaattgttgacacattttcagaaaacagcaccacgaaccacaacgctcaaccagctgacccctttggtctcaatccgagttctgctattccaggatctcagctatacaacacgccaactcagcagcctttccagtcacaacagcctccgcagcaggcggcgctctatgcgaatgggggtgctgtggaccctggaacgtcttacgatcaggcatcccagtttaaaaatgttagttctgggtggaatggtcaagctgccaaccctgttgtgcccctgccagagcaagcactgaattacgtgtgcacttttctgtctttca

SEQ ID NO: 72241 - DNA, 1706 bp, Zea Mays
cgccgtcgaggcgtcctccctcccgagtcccacgagcacggagcaccggcctccggttcagattcggtgacacgcacggcacggacgaacccaacggggcactgctcacgggaaagagagaggattcctccgccgcgtccgcgttggactggacagctcacgccgctgcgaaagcaaccagccagagccagatccgtcggttccaacgaaacatccattcacgcccgccaccggcatccccatctccgatccgccgcagccgcagtcgcaggcacgtcctcctctccggccacccggagcgcggcagccagcgagcgagccactgtggtcgccgtgcaggcaatcaaaagatgtcgtcaaggcactaaagaaacggattggccacaagaatccaaaagttcaacttcttgcactaactctgttggaaactgttataaaaaattgtggggatatacttcacatgcatgttgcagagagagatatattgcatgatatggtgaagatagtgaagaaaaagtctgatcctcgtgttaaagagaaggtattggtgctgatagatacatggcaagacgtgtttgggggatcacatgcaagatatccacaatactatgcagcataccatgagttggtgcgtgctggagctgaattcccgaagagacccgagaaacctgcacctttgtttaatggccagtctcaggcagcaaggaatatgcgtagtcctgaccaacaggaagcggaatcttctgctgccaatgattttcctgctttgagcatgtcggagattcataacgcttgtggtattatggatgtacttgctgagatgctgaatgctttagacccaggaaacagagaggggctaaggcaggaggtaattgtggaacttgtggatcaatgccgcacttacaagcagagagtagtgcagctagttaattctaccacggacgaggaacttatgtcgcaggggctcacactgaatgatgatttgcagcgtgttctagcaaaacatgatgcaatagcagcaggcattgcagtccgagtggagaaaaaatcgaagtctttgcaagcacttgtagagaccaaggattcgacaaaccaggattccaaaaaggagcaaggactcatagatattgaggatcccacaagtcaagatgctgcaaaagatccaaatcaaagtacaagtgaccaatctccttttgagcaattagctcttccagcaccaccagtgtcaaatggcgcagcaacttcagcaccacaatctgatcttggcattgatcttctgagctgggatgatacccctgctacaacacaaaatccacttgctcttgttcctgtcacagatcctcttgctgactctacttcatcaaatcaaaatgcgctagcaattgttgacacattttcagaaaacagcaccacgaaccacaacgctcaaccagctgacccctttggtctcaatccgagttctgctattccaggatctcagctatacaacacgccaactcagcagcctttccagtcacaacagcctccgcagcaggcggcgctctatgcgaatgggggtgctgtggaccctggaacgtcttacgatcaggcatcccagtttaaaaatgttagttctgggtggaatggtcaagctgccaaccctgttgtgcccctgccagagcaagcactgaattacgaactctctgtattcatatgaatcttctttt

SEQ ID NO: 72242 - DNA, 2575 bp, Zea Mays
cgccgtcgaggcgtcctccctcccgagtcccacgagcacggagcaccggcctccggttcagattcggtgacacgcacggcacggacgaacccaacggggcactgctcacgggaaagagagaggattcctccgccgcgtccgcgttggactggacagctcacgccgctgcgaaagcaaccagccagagccagatccgtcggttccaacgaaacatccattcacgcccgccaccggcatccccatctccgatccgccgcagccgcagtcgcaggcacgtcctcctctccggccacccggagcgcggcagccagcgagcgagccactgtggtcgccgtgcaggcaatcaaaagatgtcgtcaaggcactaaagaaacggattggccacaagaatccaaaagttcaacttcttgcactaactctgttggaaactgttataaaaaattgtggggatatacttcacatgcatgttgcagagagagatatattgcatgatatggtgaagatagtgaagaaaaagtctgatcctcgtgttaaagagaaggtattggtgctgatagatacatggcaagacgtgtttgggggatcacatgcaagatatccacaatactatgcagcataccatgagttggtgcgtgctggagctgaattcccgaagagacccgagaaacctgcacctttgtttaatggccagtctcaggcagcaaggaatatgcgtagtcctgaccaacaggaagcggaatcttctgctgccaatgattttcctgctttgagcatgtcggagattcataacgcttgtggtattatggatgtacttgctgagatgctgaatgctttagacccaggaaacagagagggacgaggaacttatgtcgcaggggctcacactgaatgatgatttgcagcgtgttctagcaaaacatgatgcaatagcagcaggcattgcagtccgagtggagaaaaaatcgaagtctttgcaagcacttgtagagaccaaggattcgacaaaccaggattccaaaaaggagcaaggactcatagatattgaggatcccacaagtcaagatgctgcaaaagatccaaatcaaagtacaagtgaccaatctccttttgagcaattagctcttccagcaccaccagtgtcaaatggcgcagcaacttcagcaccacaatctgatcttggcattgatcttctgagctgggatgatacccctgctacaacacaaaatccacttgctcttgttcctgtcacagatcctcttgctgactctacttcatcaaatcaaaatgcgctagcaattgttgacacattttcagaaaacagcaccacgaaccacaacgctcaaccagctgacccctttggtctcaatccgagttctgctattccaggatctcagctatacaacacgccaactcagcagcctttccagtcacaacagcctccgcagcaggcggcgctctatgcgaatgggggtgctgtggaccctggaacgtcttacgatcaggcatcccagtttaaaaatgttagttctgggtggaatggtcaagctgccaaccctgttgtgcccctgccagagcaagcactgaattacgatgatcaaagtggaaaccttccaccgcctccttgggaggctcagccagcgtcaaacaatgaattgccaaatggccaattgggaagcttgcaacctctcccaggttcagctggccagatcggtggcatgcagcagccactgcaaccacaagttaaccacatgggagttccacaaagccagccaatgtatagtaaccaaccaatgcaacccggtcaggttgccgccacaacacagatgcagcctggcttcggaaaccagcagttcggttcgctaccaccaacatccatgctgggcatgcaattcggtggcatgcagcctccgcagatgtatggcggatcgcagccagtcatgatgtacccgcaacaaatggcagtggcccagtatggagcaatgccgcggcagcagccgacgtatggtggtcgattggcgggttacatgcagcatcctgctgtggctgccgcacactactacaacaaccaggggatgtatggctaccccggtgcgaacgggctgtcacagagcatgtatggcctctcggtgcaggacaactcgtccatggggatgaggtcgtcttaccagactacgacggcgccaccctccacggggcaacctatgaagccgacgaagcccgaagacaagcttttcggtgacctcctgagcattgccaagacgaagaaagcttcatgagacgagctggagcgggagcggccttctgatatatcgtctccccttttttttgtggtttttcgtgctgtttgatcttacacttgtaacattatctgaatgtgtaaacttttttggggtccttttcttttattcccacgtcgtgtgtgatcctattgatcccattggattcgttataccgtgtgcgtgtactgatcacgagcgatgggaaactttggccgtaaatgatgattcaataaagggtgtgcagtacgtgattatgatattgttcttttatgggatgtgtcatttttttctttttg

SEQ ID NO: 72243 - DNA, 2562 bp, Zea Mays
cgccgtcgaggcgtcctccctcccgagtcccacgagcacggagcaccggcctccggttcagattcggtgacacgcacggcacggacgaacccaacggggcactgctcacgggaaagagagaggattcctccgccgcgtccgcgttggactggacagctcacgccgctgcgaaagcaaccagccagagccagatccgtcggttccaacgaaacatccattcacgcccgccaccggcatccccatctccgatccgccgcagccgcagtcgcaggcacgtcctcctctccggccacccggagcgcggcagccagcgagcgagccactgtggtcgccgtgcaggcaatcaaaagatgtcgtcaaggcactaaagaaacggattggccacaagaatccaaaagttcaacttcttgcactaacttctgatcctcgtgttaaagagaaggtattggtgctgatagatacatggcaagacgtgtttgggggatcacatgcaagatatccacaatactatgcagcataccatgagttggtgcgtgctggagctgaattcccgaagagacccgagaaacctgcacctttgtttaatggccagtctcaggcagcaaggaatatgcgtagtcctgaccaacaggaagcggaatcttctgctgccaatgattttcctgctttgagcatgtcggagattcataacgcttgtggtattatggatgtacttgctgagatgctgaatgctttagacccaggaaacagagaggggctaaggcaggaggtaattgtggaacttgtggatcaatgccgcacttacaagcagagagtagtgcagctagttaattctaccacggacgaggaacttatgtcgcaggggctcacactgaatgatgatttgcagcgtgttctagcaaaacatgatgcaatagcagcaggcattgcagtccgagtggagaaaaaatcgaagtctttgcaagcacttgtagagaccaaggattcgacaaaccaggattccaaaaaggagcaaggactcatagatattgaggatcccacaagtcaagatgctgcaaaagatccaaatcaaagtacaagtgaccaatctccttttgagcaattagctcttccagcaccaccagtgtcaaatggcgcagcaacttcagcaccacaatctgatcttggcattgatcttctgagctgggatgatacccctgctacaacacaaaatccacttgctcttgttcctgtcacagatcctcttgctgactctacttcatcaaatcaaaatgcgctagcaattgttgacacattttcagaaaacagcaccacgaaccacaacgctcaaccagctgacccctttggtctcaatccgagttctgctattccaggatctcagctatacaacacgccaactcagcagcctttccagtcacaacagcctccgcagcaggcggcgctctatgcgaatgggggtgctgtggaccctggaacgtcttacgatcaggcatcccagtttaaaaatgttagttctgggtggaatggtcaagctgccaaccctgttgtgcccctgccagagcaagcactgaattacgatgatcaaagtggaaaccttccaccgcctccttgggaggctcagccagcgtcaaacaatgaattgccaaatggccaattgggaagcttgcaacctctcccaggttcagctggccagatcggtggcatgcagcagccactgcaaccacaagttaaccacatgggagttccacaaagccagccaatgtatagtaaccaaccaatgcaacccggtcaggttgccgccacaacacagatgcagcctggcttcggaaaccagcagttcggttcgctaccaccaacatccatgctgggcatgcaattcggtggcatgcagcctccgcagatgtatggcggatcgcagccagtcatgatgtacccgcaacaaatggcagtggcccagtatggagcaatgccgcggcagcagccgacgtatggtggtcgattggcgggttacatgcagcatcctgctgtggctgccgcacactactacaacaaccaggggatgtatggctaccccggtgcgaacgggctgtcacagagcatgtatggcctctcggtgcaggacaactcgtccatggggatgaggtcgtcttaccagactacgacggcgccaccctccacggggcaacctatgaagccgacgaagcccgaagacaagcttttcggtgacctcctgagcattgccaagacgaagaaagcttcatgagacgagctggagcgggagcggccttctgatatatcgtctccccttttttttgtggtttttcgtgctgtttgatcttacacttgtaacattatctgaatgtgtaaacttttttggggtccttttcttttattcccacgtcgtgtgtgatcctattgatcccattggattcgttataccgtgtgcgtgtactgatcacgagcgatgggaaactttggccgtaaatgatgattcaataaagggtgtgcagtacgtgattatgatattgttcttttatgggatgtgtcatttttttctttttg

SEQ ID NO: 72244 - DNA, 873 bp, Zea Mays
gaaaacacgaaaacatgggatggtgcagattctttcgtaggtcgtatctctctcaaccccgccccttctaccttgcttgttgggcccagaagcacctcaccggcccaactccgtgtctcgctgcacgcgcaaccgcacctcagcctcctgctcgcgcgcaccgcagcgccgtctggggcaggtcccgccgttcagccgcacacatcaccaaccgcgtgatgctcatgtgccttcaatcaccgccgcgtgggacccacaccgtcaccatcatcccctttcctcactcctcaggttgttacgaggctacgtgcagatctcgcccttcaccccttgtcggatttcgccccatctggagatctccctgggaataaaacctgatgcatcatctcctcccgtctccctccatccatatggctcaagcacgagcgccacaccatcatagactgccacgcaaaccgagagggcagagtctgttgccatggccacatgaacaaagagagagagagaaaggaacatagagagagcagagagtacatcagggcatggagaacatgtatacggtgtcgagggtgccagggtcgaccgggacgccagtgaattcctcgtcggatttcaacagtcgtcaccaagccgcctcgcacgtggtcacgagtcttcgtgtagtaatctccggtaagaatactcctagttaatctttgacgccatcctcgttgtgtagaaccctctcggtgggtggtcggggcacctgtacgctcggtcgcttggcgccgatgtgcctcaccgtcatatgggggcgccgccgtcgtctgggacaacggatgatgatggaagcacactcgccattgatccctaaatggacgacttagattagac

SEQ ID NO: 72245 - DNA, 4690 bp, Zea Mays
gaaaacacgaaaacatgggatggtgcagattctttcgtaggtcgtatctctctcaaccccgccccttctaccttgcttgttgggcccagaagcacctcaccggcccaactccgtgtctcgctgcacgcgcaaccgcacctcagcctcctgctcgcgcgcaccgcagcgccgtctggggcaggtcccgccgttcagccgcacacatcaccaaccgcgtgatgctcatgtgccttcaatcaccgccgcgtgggacccacaccgtcaccatcatcccctttcctcactcctcaggttgttacgaggctacgtgcagatctcgcccttcaccccttgtcggatttcgccccatctggagatctccctgggaataaaacctgatgcatcatctcctcccgtctccctccatccatatggctcaagcacgagcgccacaccatcatagactgccacgcaaaccgagagggcagagtctgttgccatggccacatgaacaaagagagagagagaaaggaacatagagagagcagagagtacatcagggcatggagaacatgtatacggtgtcgagggtgccagggtcgaccgggacgccagtgaattcctcgtcggatttcaacagtcgtcaccaagccgcctcgcacgtggtcacgagtcttcgtgtagtaatctccggtcaaggacatgtactacaagatgaggagcatgaaggatgtcatggctacttaaatcgggtgtgacaatttattatttgtgatctcttatttatttgggttgatatctacttatacttagtaactgctaataaaactttgaccaactttaaaagcaatgttcagctttaaccatcttctttggtaaaccttacacttcacatgagcccccattgtaagtaagctcacacacattatttctcacaacttgttgaacaatgaaccaaggtctatttaggttgtattcattcgttcctttaatttatctggatatatatggctcgctatgttgtgttatattctatgaaccaagatgctacaggctgtgtgttatgttccttcgatttctacctccttcctttcagcgtactagctacctctctttctgcagtctcgacaaccaagatcgatgtctatatgatgataagtcatgcaatgctcgctgttgtttcagcgactgcttagtcctttttatttcagattataatctctctagattatataatcaagcgtaaataatctagtaggtaaataaacacctagattataagttcagattatataatctaaactccatattatgataatctcataatctcttcaagagtagcttatttgagattattttggtaaaagacccactacccatggtttacccatggttatgtaaatagaaattacaatatatgccatacttttttctcagctaaaataaacaaataagggtattgttgtctttatgcataatctacatttgtataatctaaactaccaaacaactacatgtagattataatataatttagattataatctggattatataatttagattataatctagattatataatctataagctgaaacaaacggacctttggttgtggcaaatggaaacagctgctcttgctcgtagaactagagcctctatctacagttgttgaacctaatgatggaccaacagagcttgagtacgtgcgaccatttctcctaaggtaatcttttttcacatttggcagatgccggcatttcctcgttgcattgccatgcagtactgatgcgtctctatctagcctttctaatgggtgagagcaaataccatggtttatatatcatcactctcccttcatacacagtccatagtcctgcctttatatatcaactacgttggacagttgagctaacgctagtttccttagccaggtttcacatatagtgttagttctgatgtttgtttttcgttctgcagcattgctcatacttttcgtaccttttttcgttgatgtgtaatggatgttttccattaataaatggaaaaaggggtcaacctggttaaaaaatattatttatattatataaacgatcatttgttgtctacaagcacaaagcaaatgtacgggtatttttgtgatgttggttccagtattactaacatctctctctcacacacacgagctggaggatgaagaagaggagaacatagcacacacaaggagatgagctactaacttgttcggctgtagcatgcccactacttggaagcttgctgcctattacatgtactattctacatacctactacatagtactacaccatgcttctactactactgtcctattgacagcaaaagggagggaacggtcacaatacacatgtttctaagatgtaacgatgcgagggagatggagcagcagattatctaacaatccttcctccattactgctgctactccttattctcggtcatgccgattctagcctgaagctccgggaactgaacgcatccgagtggcttagtgaagaagcccgtgagcagtcggggtagaccatgtgcgagaggcgcacaacaacgtagttgacgatgatgtaggggcaacgacgaggatgaagacaggcgaaggcggcgctgctgcccgaggaggcgacacaacggcaacccttgtacttggagaggcgtgcactagacgacatatatcaggggaggatggttgcacacgatcaattaatcaggtcgaaagcgtgcgaggtagagacgacgatggcaaaagcaatgtcgaaggcggagcctcctgatcgacggtggcgaggatgagctggcttaggtcgacatgcaggcgaacaggcgtgacacacacgtgcgttttaggtacgccataggccacatgatgtgatgcgttcgaagaagataaagaggccagtgttgtcgacgtcgaagacacatgcgatcaacaggtggtgggcgcaaacccgatccaccaaccgagaagaataaaaggactcacagatttgggcacatcaccgggtactcgtagctagttcattttcccaactcagttcatcctcctcatcctcgatcaaaaagttagagaaagagatagcccgcgagtagaaaggctcgacctggttgacagggtgggggcgcacggctcggcccagccgccaccttggcatgcagagggggtgcccgccatgtgtagcctggtggcggcatagcaggctgccactagcactcgaatgtgatggaattgtgccctcccgacaagactaggcggcatagatctaggggttggggtgacatagcctatgggtctgagcggcctctccatagtgtgaggaacccaggtctagggtttcgcccacccttggatctgtgcccaggtatggtttcccctctccctagggttcatccgacgtgaggtttcttggccgaatcaaacaagaaccctaaatcacacaggtatgtggtggtgctggatttctgttttatttcattcatagcttctccattacaactgctcagatttatagcagcccaagtggctctaactgctaatcagttattacagctggattacagctagatgacagatctaatctgttattacagctaaatgccagcagcttacagctgtattattctatcccctctgtactccttgcctgcatctatgcattcctggtagggtcatgacaatccgcccccccttgagagcttgcttgaccccaagcaagggcctttggaaatctggtcttggccacagtaaaatcctcccaagtagcacatgatgatggtaacccagaccacctgaggagcacttggaccacagccgcattacctttcttgaccattctgcgatccagaatctctaccggagccagagatcccctgtccaaatccattggttgaggaagagtatcaaagaccggagtataatttggaacaaatggtttgagttgggaaacatggaagacaggatggatctgagcttctggtggaagagccaaacgataagcagctggcccaattttctcagtcactgtgtaaggcccaaaatacttgaaggcaaatttgggacaaggtctattgaccacagaattttgagcataaggctggagcttgagcaaaacctgttcccccacctgaaactccctgggaacccgcttcttatctgcaaaatgtttatacctctgttgagctctagccaaattggccttcaacatctcactatgctcagctctgtgctgaacaaactggacagctccctcatcctcctgccctgtgaccgaaggaattccaagaacagatgcttcatagccataaagggcctggaaaggtgaacagcccaatgatgagtggaaagtggtattataccataattcggctaaaggtagccaagacttccatttctgagggttggagtggacagcacatctgagatacatctccaaacactgattaactctctcactctgcccatctgtctgagggtgataggctgtgcttaaagcaagcttaatatccaagagcttgaacaaatgtttccaaaaagcacttgtaaaaatcttgtccctatcagataccactgttttgggcaccccatgcagcttgattactgaatctaccatgatttgggccactccctgagcagtgaaagggtgctttaagggaaagaagtgagcatacttagtgaatcgatc

SEQ ID NO: 72246 - DNA, 5843 bp, Zea Mays
gaaaacacgaaaacatgggatggtgcagattctttcgtaggtcgtatctctctcaaccccgccccttctaccttgcttgttgggcccagaagcacctcaccggcccaactccgtgtctcgctgcacgcgcaaccgcacctcagcctcctgctcgcgcgcaccgcagcgccgtctggggcaggtcccgccgttcagccgcacacatcaccaaccgcgtgatgctcatgtgccttcaatcaccgccgcgtgggacccacaccgtcaccatcatcccctttcctcactcctcaggttgttacgaggctacgtgcagatctcgcccttcaccccttgtcggatttcgccccatctggagatctccctgggaataaaacctgatgcatcatctcctcccgtctccctccatccatatggctcaagcacgagcgccacaccatcatagactgccacgcaaaccgagagggcagagtctgttgccatggccacatgaacaaagagagagagagaaaggaacatagagagagcagagagtacatcagggcatggagaacatgtatacggtgtcgagggtgccagggtcgaccgggacgccagtgaattcctcgtcggatttcaacagtcgtcaccaagccgcctcgcacgtggtcacgagtcttcgtgtagtaatctccggtcaaggacatgtactacaagatgaggagcatgaaggatgtcatggctacttaaatcgggtgtgacaatttattatttgtgatctcttatttatttgggttgatatctacttatacttagtaactgctaataaaactttgaccaactttaaaagcaatgttcagctttaaccatcttctttggtaaaccttacacttcacatgagcccccattgtaagtaagctcacacacattatttctcacaacttgttgaacaatgaaccaaggtctatttaggttgtattcattcgttcctttaatttatctggatatatatggctcgctatgttgtgttatattctatgaaccaagatgctacaggctgtgtgttatgttccttcgatttctacctccttcctttcagcgtactagctacctctctttctgcagtctcgacaaccaagatcgatgtctatatgatgataagtcatgcaatgctcgctgttgtttcagcgactgcttagtcctttttatttcagattataatctctctagattatataatcaagcgtaaataatctagtaggtaaataaacacctagattataagttcagattatataatctaaactccatattatgataatctcataatctcttcaagagtagcttatttgagattattttggtaaaagacccactacccatggtttacccatggttatgtaaatagaaattacaatatatgccatacttttttctcagctaaaataaacaaataagggtattgttgtctttatgcataatctacatttgtataatctaaactaccaaacaactacatgtagattataatataatttagattataatctggattatataatttagattataatctagattatataatctataagctgaaacaaacggacctttggttgtggcaaatggaaacagctgctcttgctcgtagaactagagcctctatctacagttgttgaacctaatgatggaccaacagagcttgagtacgtgcgaccatttctcctaaggtaatcttttttcacatttggcagatgccggcatttcctcgttgcattgccatgcagtactgatgcgtctctatctagcctttctaatgggtgagagcaaataccatggtttatatatcatcactctcccttcatacacagtccatagtcctgcctttatatatcaactacgttggacagttgagctaacgctagtttccttagccaggtttcacatatagtgttagttctgatgtttgtttttcgttctgcagcattgctcatacttttcgtaccttttttcgttgatgtgtaatggatgttttccattaataaatggaaaaaggggtcaacctggttaaaaaatattatttatattatataaacgatcatttgttgtctacaagcacaaagcaaatgtacgggtatttttgtgatgttggttccagtattactaacatctctctctcacacacacgagctggaggatgaagaagaggagaacatagcacacacaaggagatgagctactaacttgttcggctgtagcatgcccactacttggaagcttgctgcctattacatggtcatgacacatagccgtcaccacgacggcgtaccgagggtaggcatggatgttgtagctccccgcagctgtcaccatgatggcatgcagaagggacggcatgttccaaccagcatgagagcccaaacaaccactaggatgagtggagaaatcggtgagtccctgatctgttgaagcttgacgacgcgacgatgacgatgtgatgtaaccagcaacaatgtgatgaacactaccataactcatttgcagtttcagtgacaaagcatcgtcgatggaattgtgtaaaatgtctaaatagagtgaaaagtccaggccccacaactacatctgaaactgtttcaatacaacaggatggaactaatgatggttgctctatttcaatagttcggactttgcctaataattctgattccagaagactgttttcttggacacaacaatcatctcaagggaatgatcaatcaaccctttcaaagagtgcccaagaatgcaattcaaaatgcagctctccttatggcagtagagcagttactacagtgaatgttccagacacattaactgaagcaaatgttccagacacattcaccgaaggcagtgttccagcaacagaaggtttatggagctctttcaataatattgatgtatcagcaaatatcctgaatgatgtctccatggatatcagtgatttacctgatgatgtttctcgaatgatatcaagcatagaagaaaatggcacacagaatctacacggtccaaaaccttgtgtggtgtcaattgaagatgataatagaacagctcaagatgttcctagtgatgactgcaatgagcctaatgctcgtaaaccgaaatctgggcacaatgtctctaaacaaatatctgcgcacaaaaccaaccaagtccgcaaccagaaagtgggtgaaacgcaatcaagagctcccaagaacattgtgaatcacacagtagggatggttggtgttggatcttctctaatgaactggatgaaaaacactcataataagaaaatcagagcacagaaaaaggacacaggacacaagaatcttgattcttgtgctgtttcaaactctaatccagacacagtcgcttctagtgttggcgatatggggcaggagaagatgctatctactagcaacggcaagcatgggaatgaaaacacacagaataacaacctggagcaaaatatgcagaatgtggatgacctgtgccaaaatgaatcagggaacttgaaacgggggttctcaaatggaaaaaatcaaagattttgctaaagagaaaggtactgtcaactgcgatttcccgtgatgagaacactgagaataataatactataaataaaagtatgctcaggtctcatgatttgcatcaaatggaatctgaaggcacgatgcagagatgtgtggcaaagggttgtacgcagcttggcacacaaattcaagtgtcatacacacaaatagctagtttgggatagcaggtgagcgaaacagcgagtcccaaatgacatacaccttattgagaaactatcgaagagctaacatgcgccggatggaacttggaacgcaagctctcggttcacagcatggtcaatacaatgtttcacccagcacatcacacggaagctacacagacctctgcgccctcactctcgagtaggtgtgctcggttcgttgctgcagcaggacattgcaagctggtctggtctgagaaccgtgggacgcagcacagcctaggcgtgtctagacggacaacaccgcctgctgaatgctgatatggacctgcagttgggttctgctagctcttctgttcccgacccaaagcagcatcgattgccaaggcatggtggtaccaggcaacctcagtggcagctgatttcactgtaattagcgacaagaacaagtatatgagaaggatttgaggtagagaggagtgttgtagttggagaacaggtacatttgactctgtcaagcaagtatcatctgtagaggtatagagatgtgtggttgtgccctgccatgaaacagctagacagctatctgtgccagcaatgggttcgaagtcatagcagagtcagtgtagccgcccacgcggtggcaatccgagtggtcggtggcggatgccttttaaaaggaagggggcgtgcgtgttgcgccgggcgaggcagaccgcagacggtcaaacaaacaagtcaggtagccagcgtggtcgttcgcgacacagcattcggcagcatgggcgcggttgagccgccggcgtggatgtccgccgcggcgcgcaggtggctggagaacgccggcgccacggcggaggacaccccgggccgggccttcaacgcgctgccgctctccggcgtgcgcgtgtccctcgcggagcgcggccgcgcgctctgctcgctccgcgtgccgccccacctcacggacgcggaggggaactggcacgcgggcgccatcgcggcggcggcggacgacgtgtgcgccgcggccatcatgtccgtggagggcatcatcaaggtctccgtccactacgacatctcctacttcacaccggccaagctccatgatgaagtggagatggatgggcgggtggtggagcacaaagggaggatgacggcggtggtggtggagatccggaagaagaaatccggcgagctggtggctatcgggaggcagtggatgacggcctccaggcccaaaggcgctgctgctcacagcaagatctgaactgaagcttcttccttccttccttccttgggtttcctttcctacctcgaaaactactgctctcgagtgaattgaactggctgtaattactaattactggggaaaaacacggtttaggttgctgtgatttgttactggcgtcccctttaaatcaatcagcaagatgcaatcgcagcgaagctctgttgtgcgttgctagcctgcctaggatcctcttgctgccgggctatatcgagctcgcgcgctagctcatgcacccgagcaattcgctgacgcccgagacttactttttctagtgctgctatcaaagcctagtcagctggaataactctagcttatgttatacccaaataaggccttgttcggttattcccaatacacatggattggatgggattggaaaaaattcttaagaagtttgacttgtttgggattcaaactcatccaatcccacttaatccacatggattgagagctaaccgaacaagccctaattgagtttgtacaatgtacatgaattgggaaatataaaaggtttatttgactacttgttttgtttttctcatttttgcatattcaaatcatgggtcaacttggctattaacaactacattaaataaaagaaatagtgcatcatgttggagtttatttgtttgtgcatttaaggataataataatagtaataataatgtattaaacctaatttgaaatctagaatttggaaatgaaatataaaagaaaagagaagaaaaggaaaggaaaacaatatacaatgtaaagaaaaatatataaataaagatatcttttcatgctagtagttgattgtatatttaatctaac

SEQ ID NO: 72247 - DNA, 4607 bp, Zea Mays
gaaaacacgaaaacatgggatggtgcagattctttcgtaggtcgtatctctctcaaccccgccccttctaccttgcttgttgggcccagaagcacctcaccggcccaactccgtgtctcgctgcacgcgcaaccgcacctcagcctcctgctcgcgcgcaccgcagcgccgtctggggcaggtcccgccgttcagccgcacacatcaccaaccgcgtgatgctcatgtgccttcaatcaccgccgcgtgggacccacaccgtcaccatcatcccctttcctcactcctcaggttgttacgaggctacgtgcagatctcgcccttcaccccttgtcggatttcgccccatctggagatctccctgggaataaaacctgatgcatcatctcctcccgtctccctccatccatatggctcaagcacgagcgccacaccatcatagactgccacgcaaaccgagagggcagagtctgttgccatggccacatgaacaaagagagagagagaaaggaacatagagagagcagagagtacatcagggcatggagaacatgtatacggtgtcgagggtgccagggtcgaccgggacgccagtgaattcctcgtcggatttcaacagtcgtcaccaagccgcctcgcacgtggtcacgagtcttcgtgtagtaatctccggtcaaggacatgtactacaagatgaggagcatgaaggatgtcatggctacttaaatcgggtgtgacaatttattatttgtgatctcttatttatttgggttgatatctacttatacttagtaactgctaataaaactttgaccaactttaaaagcaatgttcagctttaaccatcttctttggtaaaccttacacttcacatgagcccccattgtaagtaagctcacacacattatttctcacaacttgttgaacaatgaaccaaggtctatttaggttgtattcattcgttcctttaatttatctggatatatatggctcgctatgttgtgttatattctatgaaccaagatgctacaggctgtgtgttatgttccttcgatttctacctccttcctttcagcgtactagctacctctctttctgcagtctcgacaaccaagatcgatgtctatatgatgataagtcatgcaatgctcgctgttgtttcagcgactgcttagtcctttttatttcagattataatctctctagattatataatcaagcgtaaataatctagtaggtaaataaacacctagattataagttcagattatataatctaaactccatattatgataatctcataatctcttcaagagtagcttatttgagattattttggtaaaagacccactacccatggtttacccatggttatgtaaatagaaattacaatatatgccatacttttttctcagctaaaataaacaaataagggtattgttgtctttatgcataatctacatttgtataatctaaactaccaaacaactacatgtagattataatataatttagattataatctggattatataatttagattataatctagattatataatctataagctgaaacaaacggacctttggttgtggcaaatggaaacagctgctcttgctcgtagaactagagcctctatctacagttgttgaacctaatgatggaccaacagagcttgagtacgtgcgaccatttctcctaaggatggaactaatgatggttgctctatttcaatagttcggactttgcctaataattctgattccagaagactgttttcttggacacaacaatcatctcaagggaatgatcaatcaaccctttcaaagagtgcccaagaatgcaattcaaaatgcagctctccttatggcagtagagcagttactacagtgaatgttccagacacattaactgaagcaaatgttccagacacattcaccgaaggcagtgttccagcaacagaaggtatggagcttggtgaattcctaatttgtacttttgtttgtatacagtaaactaaataatatgacagtatatcctcaggtttatggagctctttcaataatattgatgtatcagcaaatatcctgaatgatgtctccatggatatcagtgatttacctgatgatgtttctcgaatgatatcaagcatagaagaaaatggcacacagaatctacacggtccaaaaccttgtgtggtgtcaattgaagatgataatagaacagctcaagatgttcctagtgatgactgcaatgagcctaatgctcgtaaaccgaaatctgggcacaatgtctctaaacaaatatctgcgcacaaaaccaaccaagtccgcaaccaggttccacttcaagcatctttaaaaaggaatgttggatctgttgataagaagaaaagggaccaatctgccaacttagctgatatttcagatctcaaattttgtcagaggaagccaaaaagatgaggcggttatcagagctcataggcactgaccaggtaggaaataccatttgaggtaggaaataataatagcactcctgttagcaatcagaaagtgggtgaaacgcaatcaagagctcccaagaacattgtgaatcacacagtagggatggttggtgttggatcttctctaatgaactggatgaaaaacactcataataagaaaatcagagcacagaaaaaggacacaggacacaagaatcttgattcttgtgctgtttcaaactctaatccagacacagtcgcttctagtgttggcgatatggggcaggagaagatgctatctactagcaacggcaagcatgggaatgaaaacacacagaataacaacctggagcaaaatatgcagaatgtggatgacctgtgccaaaatgaatcagggaacttgaaacgggggttctcaaatggaaaaaatcaaagattttgctaaagagaaaggtactgtcaactgcgatttcccgtgatgagaacactgagaataataatactataaataaaagtatgctcaggtctcatgatttgcatcaaatggaatctgaaggcacgatgcagagatgtgtggcaaagggttgtacgcagcttggcacacaaattcaagtgtcatacacacaaatagctagtttgggatagcaggtgagcgaaacagcgagtcccaaatgacatacaccttattgagaaactatcgaagagctaacatgcgccggatggaacttggaacgcaagctctcggttcacagcatggtcaatacaatgtttcacccagcacatcacacggaagctacacagacctctgcgccctcactctcgagtaggtgtgctcggttcgttgctgcagcaggacattgcaagctggtctggtctgagaaccgtgggacgcagcacagcctaggcgtgtctagacggacaacaccgcctgctgaatgctgatatggacctgcagttgggttctgctagctcttctgttcccgacccaaagcagcatcgattgccaaggcatggtggtaccaggcaacctcagtggcagctgatttcactgtaattagcgacaagaacaagtatatgagaaggatttgaggtagagaggagtgttgtagttggagaacaggatgaagtggagatggatgggcgggtggtggagcacaaagggaggatgacggcggtggtggtggagatccggaagaagaaatccggcgagctggtggctatcgggaggcagtggatgacggcctccaggcccaaaggcgctgctgctcacagcaagatctgaactgaagcttcttccttccttccttccttgggtttcctttcctacctcgaaaactactgctctcgagtgaattgaactggctgtaattactaattactggggaaaaacacggtttaggttgctgtgatttgttactggcgtcccctttaaatcaatcagcaagatgcaatcgcagcgaagctctgttgtgcgttgctagcctgcctaggatcctcttgctgccgggctatatcgagctcgcgcgctagctcatgcacccgagcaattcgctgacgcccgagacttactttttctagtgctgctatcaaagcctagtcagctggaataactctagcttatgttatacccaaataaggccttgttcggttattcccaatacacatggattggatgggattggaaaaaattcttaagaagtttgacttgtttgggattcaaactcatccaatcccacttaatccacatggattgagagctaaccgaacaagccctaattgagtttgtacaatgtacatgaattgggaaatataaaaggtttatttgactacttgttttgtttttctcatttttgcatattcaaatcatgggtcaacttggctattaacaactacattaaataaaagaaatagtgcatcatgttggagtttatttgtttgtgcatttaaggataataataatagtaataataatgtattaaacctaatttgaaatctagaatttggaaatgaaatataaaagaaaagagaagaaaaggaaaggaaaacaatatacaatgtaaagaaaaatatataaataaagatatcttttcatgctagtagttgattgtatatttaatctaac

SEQ ID NO: 72248 - DNA, 4555 bp, Zea Mays
gaaaacacgaaaacatgggatggtgcagattctttcgtaggtcgtatctctctcaaccccgccccttctaccttgcttgttgggcccagaagcacctcaccggcccaactccgtgtctcgctgcacgcgcaaccgcacctcagcctcctgctcgcgcgcaccgcagcgccgtctggggcaggtcccgccgttcagccgcacacatcaccaaccgcgtgatgctcatgtgccttcaatcaccgccgcgtgggacccacaccgtcaccatcatcccctttcctcactcctcaggttgttacgaggctacgtgcagatctcgcccttcaccccttgtcggatttcgccccatctggagatctccctgggaataaaacctgatgcatcatctcctcccgtctccctccatccatatggctcaagcacgagcgccacaccatcatagactgccacgcaaaccgagagggcagagtctgttgccatggccacatgaacaaagagagagagagaaaggaacatagagagagcagagagtacatcagggcatggagaacatgtatacggtgtcgagggtgccagggtcgaccgggacgccagtgaattcctcgtcggatttcaacagtcgtcaccaagccgcctcgcacgtggtcacgagtcttcgtgtagtaatctccggtcaaggacatgtactacaagatgaggagcatgaaggatgtcatggctacttaaatcgggtgtgacaatttattatttgtgatctcttatttatttgggttgatatctacttatacttagtaactgctaataaaactttgaccaactttaaaagcaatgttcagctttaaccatcttctttggtaaaccttacacttcacatgagcccccattgtaagtaagctcacacacattatttctcacaacttgttgaacaatgaaccaaggtctatttaggttgtattcattcgttcctttaatttatctggatatatatggctcgctatgttgtgttatattctatgaaccaagatgctacaggctgtgtgttatgttccttcgatttctacctccttcctttcagcgtactagctacctctctttctgcagtctcgacaaccaagatcgatgtctatatgatgataagtcatgcaatgctcgctgttgtttcagcgactgcttagtcctttttatttcagattataatctctctagattatataatcaagcgtaaataatctagtaggtaaataaacacctagattataagttcagattatataatctaaactccatattatgataatctcataatctcttcaagagtagcttatttgagattattttggtaaaagacccactacccatggtttacccatggttatgtaaatagaaattacaatatatgccatacttttttctcagctaaaataaacaaataagggtattgttgtctttatgcataatctacatttgtataatctaaactaccaaacaactacatgtagattataatataatttagattataatctggattatataatttagattataatctagattatataatctataagctgaaacaaacggacctttggttgtggcaaatggaaacagctgctcttgctcgtagaactagagcctctatctacagttgttgaacctaatgatggaccaacagagcttgagtacgtgcgaccatttctcctaaggtaatcttttttcacatttggcagatgccggcatttcctcgttgcattgccatgcagtactgatgcgtctctatctagcctttctaatgggtgagagcaaataccatggtttatatatcatcactctcccttcatacacagtccatagtcctgcctttatatatcaactacgttggacagttgagctaacgctagtttccttagccaggtttcacatatagtgttagttctgatgtttgtttttcgttctgcagcattgctcatacttttcgtaccttttttcgttgatgtgtaatggatgttttccattaataaatggaaaaaggggtcaacctggttaaaaaatattatttatattatataaacgatcatttgttgtctacaagcacaaagcaaatgtacgggtatttttgtgatgttggttccagtattactaacatctctctctcacacacacgagctggaggatgaagaagaggagaacatagcacacacaaggagatgagctactaacttgttcggctgtagcatgcccactacttggaagcttgctgcctattacatgatggaactaatgatggttgctctatttcaatagttcggactttgcctaataattctgattccagaagactgttttcttggacacaacaatcatctcaagggaatgatcaatcaaccctttcaaagagtgcccaagaatgcaattcaaaatgcagctctccttatggcagtagagcagttactacagtgaatgttccagacacattaactgaagcaaatgttccagacacattcaccgaaggcagtgttccagcaacagaaggtttatggagctctttcaataatattgatgtatcagcaaatatcctgaatgatgtctccatggatatcagtgatttacctgatgatgtttctcgaatgatatcaagcatagaagaaaatggcacacagaatctacacggtccaaaaccttgtgtggtgtcaattgaagatgataatagaacagctcaagatgttcctagtgatgactgcaatgagcctaatgctcgtaaaccgaaatctgggcacaatgtctctaaacaaatatctgcgcacaaaaccaaccaagtccgcaaccaggttccacttcaagcatctttaaaaaggaatgttggatctgttgataagaagaaaagggaccaatctgccaacttagctgatatttcagatctcaaattttgtcagaggaagccaaaaagatgaggcggttatcagagctcataggcactgaccaggtaggaaataccatttgaggtaggaaataataatagcactcctgttagcaatcagaaagtgggtgaaacgcaatcaagagctcccaagaacattgtgaatcacacagtagggatggttggtgttggatcttctctaatgaactggatgaaaaacactcataataagaaaatcagagcacagaaaaaggacacaggacacaagaatcttgattcttgtgctgtttcaaactctaatccagacacagtcgcttctagtgttggcgatatggggcaggagaagatgctatctactagcaacggcaagcatgggaatgaaaacacacagaataacaacctggagcaaaatatgcagaatgtggatgacctgtgccaaaatgaatcagggaacttgaaacgggggttctcaaatggaaaaaatcaaagattttgctaaagagaaaggtactgtcaactgcgatttcccgtgatgagaacactgagaataataatactataaataaaagtatgctcaggtctcatgatttgcatcaaatggaatctgaaggcacgatgcagagatgtgtggcaaaggatgaagtggagatggatgggcgggtggtggagcacaaagggaggatgacggcggtggtggtggagatccggaagaagaaatccggcgagctggtggctatcgggaggcagtggatgacggcctccaggcccaaaggcgctgctgctcacagcaagatctgaactgaagcttcttccttccttccttccttgggtttcctttcctacctcgaaaactactgctctcgagtgaattgaactggctgtaattactaattactggggaaaaacacggtttaggttgctgtgatttgttactggcgtcccctttaaatcaatcagcaagatgcaatcgcagcgaagctctgttgtgcgttgctagcctgcctaggatcctcttgctgccgggctatatcgagctcgcgcgctagctcatgcacccgagcaattcgctgacgcccgagacttactttttctagtgctgctatcaaagcctagtcagctggaataactctagcttatgttatacccaaataaggccttgttcggttattcccaatacacatggattggatgggattggaaaaaattcttaagaagtttgacttgtttgggattcaaactcatccaatcccacttaatccacatggattgagagctaaccgaacaagccctaattgagtttgtacaatgtacatgaattgggaaatataaaaggtttatttgactacttgttttgtttttctcatttttgcatattcaaatcatgggtcaacttggctattaacaactacattaaataaaagaaatagtgcatcatgttggagtttatttgtttgtgcatttaaggataataataatagtaataataatgtattaaacctaatttgaaatctagaatttggaaatgaaatataaaagaaaagagaagaaaaggaaaggaaaacaatatacaatgtaaagaaaaatatataaataaagatatcttttcatgctagtagttgattgtatatttaatctaac

SEQ ID NO: 72249 - DNA, 2798 bp, Zea Mays
gaaaacacgaaaacatgggatggtgcagattctttcgtaggtcgtatctctctcaaccccgccccttctaccttgcttgttgggcccagaagcacctcaccggcccaactccgtgtctcgctgcacgcgcaaccgcacctcagcctcctgctcgcgcgcaccgcagcgccgtctggggcaggtcccgccgttcagccgcacacatcaccaaccgcgtgatgctcatgtgccttcaatcaccgccgcgtgggacccacaccgtcaccatcatcccctttcctcactcctcaggttgttacgaggctacgtgcagatctcgcccttcaccccttgtcggatttcgccccatctggagatctccctgggaataaaacctgatgcatcatctcctcccgtctccctccatccatatggctcaagcacgagcgccacaccatcatagactgccacgcaaaccgagagggcagagtctgttgccatggccacatgaacaaagagagagagagaaaggaacatagagagagcagagagtacatcagggcatggagaacatgtatacggtgtcgagggtgccagggtcgaccgggacgccagtgaattcctcgtcggatttcaacagtcgtcaccaagccgcctcgcacgtggtcacgagtcttcgtgtagtaatctccggtcaaggacatgtactacaagatgaggagcatgaaggatgtcatggctacttaaatcgggtgtgacaatttattatttgtgatctcttatttatttgggttgatatctacttatacttagtaactgctaataaaactttgaccaactttaaaagcaatgttcagctttaaccatcttctttggtaaaccttacacttcacatgagcccccattgtaagtaagctcacacacattatttctcacaacttgttgaacaatgaaccaaggtctatttaggttgtattcattcgttcctttaatttatctggatatatatggctcgctatgttgtgttatattctatgaaccaagatgctacaggctgtgtgttatgttccttcgatttctacctccttcctttcagcgtactagctacctctctttctgcagtctcgacaaccaagatcgatgtctatatgatgataagtcatgcaatgctcgctgttgtttcagcgactgcttagtcctttttatttcagattataatctctctagattatataatcaagcgtaaataatctagtaggtaaataaacacctagattataagttcagattatataatctaaactccatattatgataatctcataatctcttcaagagtagcttatttgagattattttggtaaaagacccactacccatggtttacccatggttatgtaaatagaaattacaatatatgccatacttttttctcagctaaaataaacaaataagggtattgttgtctttatgcataatctacatttgtataatctaaactaccaaacaactacatgtagattataatataatttagattataatctggattatataatttagattataatctagattatataatctataagctgaaacaaacggacctttggttgtggcaaatggaaacagctgctcttgctcgtagaactagagcctctatctacagttgttgaacctaatgatggaccaacagagcttgagtacgtgcgaccatttctcctaaggtaatcttttttcacatttggcagatgccggcatttcctcgttgcattgccatgcagtactgatgcgtctctatctagcctttctaatgggatgaagtggagatggatgggcgggtggtggagcacaaagggaggatgacggcggtggtggtggagatccggaagaagaaatccggcgagctggtggctatcgggaggcagtggatgacggcctccaggcccaaaggcgctgctgctcacagcaagatctgaactgaagcttcttccttccttccttccttgggtttcctttcctacctcgaaaactactgctctcgagtgaattgaactggctgtaattactaattactggggaaaaacacggtttaggttgctgtgatttgttactggcgtcccctttaaatcaatcagcaagatgcaatcgcagcgaagctctgttgtgcgttgctagcctgcctaggatcctcttgctgccgggctatatcgagctcgcgcgctagctcatgcacccgagcaattcgctgacgcccgagacttactttttctagtgctgctatcaaagcctagtcagctggaataactctagcttatgttatacccaaataaggccttgttcggttattcccaatacacatggattggatgggattggaaaaaattcttaagaagtttgacttgtttgggattcaaactcatccaatcccacttaatccacatggattgagagctaaccgaacaagccctaattgagtttgtacaatgtacatgaattgggaaatataaaaggtttatttgactacttgttttgtttttctcatttttgcatattcaaatcatgggtcaacttggctattaacaactacattaaataaaagaaatagtgcatcatgttggagtttatttgtttgtgcatttaaggataataataatagtaataataatgtattaaacctaatttgaaatctagaatttggaaatgaaatataaaagaaaagagaagaaaaggaaaggaaaacaatatacaatgtaaagaaaaatatataaataaagatatcttttcatgctagtagttgattgtatatttaatctaac

SEQ ID NO: 72250 - DNA, 4233 bp, Zea Mays
cacttatttaattggttggtatctacttatacttagtaactgctaataaaattttgaccaactttaaaagcaatgctcaactttaaccatctcctttggtaagccttacacttcgtatgagcccaactgtaagtgagctcatgcacattattctacacaatttgttgagcgatgaacgtatgaaagctcaccctttttgtactcatatcccccaggtcaaggacatgtactacaagatgaggagcatgaaggatgtcatggctacttaaatcgggtgtgacaatttattatttgtgatctcttatttatttgggttgatatctacttatacttagtaactgctaataaaactttgaccaactttaaaagcaatgttcagctttaaccatcttctttggtaaaccttacacttcacatgagcccccattgtaagtaagctcacacacattatttctcacaacttgttgaacaatgaaccaaggtctatttaggttgtattcattcgttcctttaatttatctggatatatatggctcgctatgttgtgttatattctatgaaccaagatgctacaggctgtgtgttatgttccttcgatttctacctccttcctttcagcgtactagctacctctctttctgcagtctcgacaaccaagatcgatgtctatatgatgataagtcatgcaatgctcgctgttgtttcagcgactgcttagtcctttttatttcagattataatctctctagattatataatcaagcgtaaataatctagtaggtaaataaacacctagattataagttcagattatataatctaaactccatattatgataatctcataatctcttcaagagtagcttatttgagattattttggtaaaagacccactacccatggtttacccatggttatgtaaatagaaattacaatatatgccatacttttttctcagctaaaataaacaaataagggtattgttgtctttatgcataatctacatttgtataatctaaactaccaaacaactacatgtagattataatataatttagattataatctggattatataatttagattataatctagattatataatctataagctgaaacaaacggacctttggttgtggcaaatggaaacagctgctcttgctcgtagaactagagcctctatctacagttgttgaacctaatgatggaccaacagagcttgagtacgtgcgaccatttctcctaaggtaatcttttttcacatttggcagatgccggcatttcctcgttgcattgccatgcagtactgatgcgtctctatctagcctttctaatgggtgagagcaaataccatggtttatatatcatcactctcccttcatacacagtccatagtcctgcctttatatatcaactacgttggacagttgagctaacgctagtttccttagccaggtttcacatatagtgttagttctgatgtttgtttttcgttctgcagcattgctcatacttttcgtaccttttttcgttgatgtgtaatggatgttttccattaataaatggaaaaaggggtcaacctggttaaaaaatattatttatattatataaacgatcatttgttgtctacaagcacaaagcaaatgtacgggtatttttgtgatgttggttccagtattactaacatctctctctcacacacacgagctggaggatgaagaagaggagaacatagcacacacaaggagatgagctactaacttgttcggctgtagcatgcccactacttggaagcttgctgcctattacatgtactattctacatacctactacatagtactacaccatgcttctactactactgtcctattgacagcaaaagggagggaacggtcacaatacacatgtttctaagatgtaacgatgcgagggagatggagcagcagattatctaacaatccttcctccattactgctgctactccttattctcggtcatgccgattctagcctgaagctccgggaactgaacgcatccgagtggcttagtgaagaagcccgtgagcagtcggggtagaccatgtgcgagaggcgcacaacaacgtagttgacgatgatgtaggggcaacgacgaggatgaagacaggcgaaggcggcgctgctgcccgaggaggcgacacaacggcaacccttgtacttggagaggcgtgcactagacgacatatatcaggggaggatggttgcacacgatcaattaatcaggtcgaaagcgtgcgaggtagagacgacgatggcaaaagcaatgtcgaaggcggagcctcctgatcgacggtggcgaggatgagctggcttaggtcgacatgcaggcgaacaggcgtgacacacacgtgcgttttaggtacgccataggccacatgatgtgatgcgttcgaagaagataaagaggccagtgttgtcgacgtcgaagacacatgcgatcaacaggtggtgggcgcaaacccgatccaccaaccgagaagaataaaaggactcacagatttgggcacatcaccgggtactcgtagctagttcattttcccaactcagttcatcctcctcatcctcgatcaaaaagttagagaaagagatagcccgcgagtagaaaggctcgacctggttgacagggtgggggcgcacggctcggcccagccgccaccttggcatgcagagggggtgcccgccatgtgtagcctggtggcggcatagcaggctgccactagcactcgaatgtgatggaattgtgccctcccgacaagactaggcggcatagatctaggggttggggtgacatagcctatgggtctgagcggcctctccatagtgtgaggaacccaggtctagggtttcgcccacccttggatctgtgcccaggtatggtttcccctctccctagggttcatccgacgtgaggtttcttggccgaatcaaacaagaaccctaaatcacacaggtatgtggtggtgctggatttctgttttatttcattcatagcttctccattacaactgctcagatttatagcagcccaagtggctctaactgctaatcagttattacagctggattacagctagatgacagatctaatctgttattacagctaaatgccagcagcttacagctgtattattctatcccctctgtactccttgcctgcatctatgcattcctggtagggtcatgacaatccgcccccccttgagagcttgcttgaccccaagcaagggcctttggaaatctggtcttggccacagtaaaatcctcccaagtagcacatgatgatggtaacccagaccacctgaggagcacttggaccacagccgcattacctttcttgaccattctgcgatccagaatctctaccggagccagagatcccctgtccaaatccattggttgaggaagagtatcaaagaccggagtataatttggaacaaatggtttgagttgggaaacatggaagacaggatggatctgagcttctggtggaagagccaaacgataagcagctggcccaattttctcagtcactgtgtaaggcccaaaatacttgaaggcaaatttgggacaaggtctattgaccacagaattttgagcataaggctggagcttgagcaaaacctgttcccccacctgaaactccctgggaacccgcttcttatctgcaaaatgtttatacctctgttgagctctagccaaattggccttcaacatctcactatgctcagctctgtgctgaacaaactggacagctccctcatcctcctgccctgtgaccgaaggaattccaagaacagatgcttcatagccataaagggcctggaaaggtgaacagcccaatgatgagtggaaagtggtattataccataattcggctaaaggtagccaagacttccatttctgagggttggagtggacagcacatctgagatacatctccaaacactgattaactctctcactctgcccatctgtctgagggtgataggctgtgcttaaagcaagcttaatatccaagagcttgaacaaatgtttccaaaaagcacttgtaaaaatcttgtccctatcagataccactgttttgggcaccccatgcagcttgattactgaatctaccatgatttgggccactccctgagcagtgaaagggtgctttaagggaaagaagtgagcatacttagtgaatcgatc

SEQ ID NO: 72251 - DNA, 4288 bp, Zea Mays
caacctttcctgtcagcttctcgatggccaacatcatcttctcccagcgtgcttcagcctgcttcgcttccatggtgacagcctcgatcaccaaccgggactgggccgacggcttaattgaaggtgccgtgatgaacaaaattttctgagcacctcccttctttcaaacttgtgtcaaactgtcttcccgccaatctctcctccaaggattcgacagctttgataccaattgtgaggaacccaggtctagggtttcgcccacccttggatctgtgcccaggtatggtttcccctctccctagggttcatccgacgtgaggtttcccccttggccgaatcaaacaagaaccctaaatcacacaggtatgtggtggtgctggatttctgttttatttcattcatagcttctccattacaactgctcagatttatagcagcccaagtggctctaactgctaatcagttattacagctggattacagctagatgacagatctaatctgttattacagctaaatgccagcagcttacagctgtattattctatcccctctgtactccttgcctgcatctatgcattcctggtagggtcatgacacatagccgtcaccacgacggcgtaccgagggtaggcatggatgttgtagctccccgcagctgtcaccatgatggcatgcagaagggacggcatgttccaaccagcatgagagcccaaacaaccactaggatgagtggagaaatcgtttcagtgacaaagcatcgtcgatggaattgtgtaaaatgtctaaatagagtgaaaagtccaggccccacaactacatctgaaactgtttcaatacaacaggatggaactaatgatggttgctctatttcaatagttcggactttgcctaataattctgattccagaagactgttttcttggacacaacaatcatctcaagggaatgatcaatcaaccctttcaaagagtgcccaagaatgcaattcaaaatgcagctctccttatggcagtagagcagttactacagtgaatgttccagacacattaactgaagcaaatgttccagacacattcaccgaaggcagtgttccagcaacagaagtatatcctcaggtttatggagctctttcaataatattgatgtatcagcaaatatcctgaatgatgtctccatggatatcagtgatttacctgatgatgtttctcgaatgatatcaagcatagaagaaaatggcacacagaatctacacggtccaaaaccttgtgtggtgtcaattgaagatgataatagaacagctcaagatgttcctagtgatgactgcaatgagcctaatgctcgtaaaccgaaatctgggcacaatgtctctaaacaaatatctgcgcacaaaaccaaccaagtccgcaaccaggttccacttcaagcatctttaaaaaggaatgttggatctgttgataagaagaaaagggaccaatctgccaacttagctgatatttcagatctcaaattttgtcagaggaagccaaaaagatgaggcggttatcagagctcataggcactgaccaggtaggaaataccatttgaggtaggaaataataatagcactcctgttagcaatcagaaagtgggtgaaacgcaatcaagagctcccaagaacattgtgaatcacacagtagggatggttggtgttggatcttctctaatgaactggatgaaaaacactcataataagaaaatcagagcacagaaaaaggacacaggacacaagaatcttgattcttgtgctgtttcaaactctaatccagacacagtcgcttctagtgttggcgatatggggcaggagaagatgctatctactagcaacggcaagcatgggaatgaaaacacacagaataacaacctggagcaaaatatgcagaatgtggatgacctgtgccaaaatgaatcagggaacttgaaacgggggttctcaaatggaaaaaatcaaagattttgctaaagagaaaggtactgtcaactgcgatttcccgtgatgagaacactgagaataataatactataaataaaagtatgctcaggtctcatgatttgcatcaaatggaatctgaaggcacgatgcagagatgtgtggcaaagggttgtacgcagcttggcacacaaattcaagtgtcatacacacaaatagctagtttgggatagcaggtgagcgaaacagcgagtcccaaatgacatacaccttattgagaaactatcgaagagctaacatgcgccggatggaacttggaacgcaagctctcggttcacagcatggtcaatacaatgtttcacccagcacatcacacggaagctacacagacctctgcgccctcactctcgagtaggtgtgctcggttcgttgctgcagcaggacattgcaagctggtctggtctgagaaccgtgggacgcagcacagcctaggcgtgtctagacggacaacaccgcctgctgaatgctgatatggacctgcagttgggttctgctagctcttctgttcccgacccaaagcagcatcgattgccaaggcatggtggtaccaggcaacctcagtggcagctgatttcactgtaattagcgacaagaacaagtatatgagaaggatttgaggtagagaggagtgttgtagttggagaacaggtacatttgactctgtcaagcaagtatcatctgtagaggtatagagatgtgtggttgtgccctgccatgaaacagctagacagctatctgtgccagcaatgggttcgaagtcatagcagagtcagtgtagccgcccacgcggtggcaatccgagtggtcggtggcggatgccttttaaaaggaagggggcgtgcgtgttgcgccgggcgaggcagaccgcagacggtcaaacaaacaagtcaggtagccagcgtggtcgttcgcgacacagcattcggcagcatgggcgcggttgagccgccggcgtggatgtccgccgcggcgcgcaggtggctggagaacgccggcgccacggcggaggacaccccgggccgggccttcaacgcgctgccgctctccggcgtgcgcgtgtccctcgcggagcgcggccgcgcgctctgctcgctccgcgtgccgccccacctcacggacgcggaggggaactggcacgcgggcgccatcgcggcggcggcggacgacgtgtgcgccgcggccatcatgtccgtggagggcatcatcaaggtctccgtccactacgacatctcctacttcacaccggccaagctccatgatgaagtggagatggatgggcgggtggtggagcacaaagggaggatgacggcggtggtggtggagatccggaagaagaaatccggcgagctggtggctatcgggaggcagtggatgacggcctccaggcccaaaggcgctgctgctcacagcaagatctgaactgaagcttcttccttccttccttccttgggtttcctttcctacctcgaaaactactgctctcgagtgaattgaactggctgtaattactaattactggggaaaaacacggtttaggttgctgtgatttgttactggcgtcccctttaaatcaatcagcaagatgcaatcgcagcgaagctctgttgtgcgttgctagcctgcctaggatcctcttgctgccgggctatatcgagctcgcgcgctagctcatgcacccgagcaattcgctgacgcccgagacttactttttctagtgctgctatcaaagcctagtcagctggaataactctagcttatgttatacccaaataaggccttgttcggttattcccaatacacatggattggatgggattggaaaaaattcttaagaagtttgacttgtttgggattcaaactcatccaatcccacttaatccacatggattgagagctaaccgaacaagccctaattgagtttgtacaatgtacatgaattgggaaatataaaaggtttatttgactacttgttttgtttttctcatttttgcatattcaaatcatgggtcaacttggctattaacaactacattaaataaaagaaatagtgcatcatgttggagtttatttgtttgtgcatttaaggataataataatagtaataataatgtattaaacctaatttgaaatctagaatttggaaatgaaatataaaagaaaagagaagaaaaggaaaggaaaacaatatacaatgtaaagaaaaatatataaataaagatatcttttcatgctagtagttgattgtatatttaatctaac

SEQ ID NO: 72252 - DNA, 4067 bp, Zea Mays
caacctttcctgtcagcttctcgatggccaacatcatcttctcccagcgtgcttcagcctgcttcgcttccatggtgacagcctcgatcaccaaccgggactgggccgacggcttaattgaaggtgccgtgatgaacaaaattttctgagcacctcccttctttcaaacttgtgtcaaactgtcttcccgccaatctctcctccaaggattcgacagctttgataccaattgtgaggaacccaggtctagggtttcgcccacccttggatctgtgcccaggtatggtttcccctctccctagggttcatccgacgtgaggtttcccccttggccgaatcaaacaagaaccctaaatcacacaggtatgtggtggtgctggatttctgttttatttcattcatagcttctccattacaactgctcagatttatagcagcccaagtggctctaactgctaatcagttattacagctggattacagctagatgacagatctaatctgttattacagctaaatgccagcagcttacagctgtattattctatcccctctgtactccttgcctgcatctatgcattcctggtagggtcatgacacatagccgtcaccacgacggcgtaccgagggtaggcatggatgttgtagctccccgcagctgtcaccatgatggcatgcagaagggacggcatgttccaaccagcatgagagcccaaacaaccactaggatgagtggagaaatcgtttcagtgacaaagcatcgtcgatggaattgtgtaaaatgtctaaatagagtgaaaagtccaggccccacaactacatctgaaactgtttcaatacaacaggatggaactaatgatggttgctctatttcaatagttcggactttgcctaataattctgattccagaagactgttttcttggacacaacaatcatctcaagggaatgatcaatcaaccctttcaaagagtgcccaagaatgcaattcaaaatgcagctctccttatggcagtagagcagttactacagtgaatgttccagacacattaactgaagcaaatgttccagacacattcaccgaaggcagtgttccagcaacagaaggtttatggagctctttcaataatattgatgtatcagcaaatatcctgaatgatgtctccatggatatcagtgatttacctgatgatgtttctcgaatgatatcaagcatagaagaaaatggcacacagaatctacacggtccaaaaccttgtgtggtgtcaattgaagatgataatagaacagctcaagatgttcctagtgatgactgcaatgagcctaatgctcgtaaaccgaaatctgggcacaatgtctctaaacaaatatctgcgcacaaaaccaaccaagtccgcaaccagaaagtgggtgaaacgcaatcaagagctcccaagaacattgtgaatcacacagtagggatggttggtgttggatcttctctaatgaactggatgaaaaacactcataataagaaaatcagagcacagaaaaaggacacaggacacaagaatcttgattcttgtgctgtttcaaactctaatccagacacagtcgcttctagtgttggcgatatggggcaggagaagatgctatctactagcaacggcaagcatgggaatgaaaacacacagaataacaacctggagcaaaatatgcagaatgtggatgacctgtgccaaaatgaatcagggaacttgaaacgggggttctcaaatggaaaaaatcaaagattttgctaaagagaaaggtactgtcaactgcgatttcccgtgatgagaacactgagaataataatactataaataaaagtatgctcaggtctcatgatttgcatcaaatggaatctgaaggcacgatgcagagatgtgtggcaaagggttgtacgcagcttggcacacaaattcaagtgtcatacacacaaatagctagtttgggatagcaggtgagcgaaacagcgagtcccaaatgacatacaccttattgagaaactatcgaagagctaacatgcgccggatggaacttggaacgcaagctctcggttcacagcatggtcaatacaatgtttcacccagcacatcacacggaagctacacagacctctgcgccctcactctcgagtaggtgtgctcggttcgttgctgcagcaggacattgcaagctggtctggtctgagaaccgtgggacgcagcacagcctaggcgtgtctagacggacaacaccgcctgctgaatgctgatatggacctgcagttgggttctgctagctcttctgttcccgacccaaagcagcatcgattgccaaggcatggtggtaccaggcaacctcagtggcagctgatttcactgtaattagcgacaagaacaagtatatgagaaggatttgaggtagagaggagtgttgtagttggagaacaggtacatttgactctgtcaagcaagtatcatctgtagaggtatagagatgtgtggttgtgccctgccatgaaacagctagacagctatctgtgccagcaatgggttcgaagtcatagcagagtcagtgtagccgcccacgcggtggcaatccgagtggtcggtggcggatgccttttaaaaggaagggggcgtgcgtgttgcgccgggcgaggcagaccgcagacggtcaaacaaacaagtcaggtagccagcgtggtcgttcgcgacacagcattcggcagcatgggcgcggttgagccgccggcgtggatgtccgccgcggcgcgcaggtggctggagaacgccggcgccacggcggaggacaccccgggccgggccttcaacgcgctgccgctctccggcgtgcgcgtgtccctcgcggagcgcggccgcgcgctctgctcgctccgcgtgccgccccacctcacggacgcggaggggaactggcacgcgggcgccatcgcggcggcggcggacgacgtgtgcgccgcggccatcatgtccgtggagggcatcatcaaggtctccgtccactacgacatctcctacttcacaccggccaagctccatgatgaagtggagatggatgggcgggtggtggagcacaaagggaggatgacggcggtggtggtggagatccggaagaagaaatccggcgagctggtggctatcgggaggcagtggatgacggcctccaggcccaaaggcgctgctgctcacagcaagatctgaactgaagcttcttccttccttccttccttgggtttcctttcctacctcgaaaactactgctctcgagtgaattgaactggctgtaattactaattactggggaaaaacacggtttaggttgctgtgatttgttactggcgtcccctttaaatcaatcagcaagatgcaatcgcagcgaagctctgttgtgcgttgctagcctgcctaggatcctcttgctgccgggctatatcgagctcgcgcgctagctcatgcacccgagcaattcgctgacgcccgagacttactttttctagtgctgctatcaaagcctagtcagctggaataactctagcttatgttatacccaaataaggccttgttcggttattcccaatacacatggattggatgggattggaaaaaattcttaagaagtttgacttgtttgggattcaaactcatccaatcccacttaatccacatggattgagagctaaccgaacaagccctaattgagtttgtacaatgtacatgaattgggaaatataaaaggtttatttgactacttgttttgtttttctcatttttgcatattcaaatcatgggtcaacttggctattaacaactacattaaataaaagaaatagtgcatcatgttggagtttatttgtttgtgcatttaaggataataataatagtaataataatgtattaaacctaatttgaaatctagaatttggaaatgaaatataaaagaaaagagaagaaaaggaaaggaaaacaatatacaatgtaaagaaaaatatataaataaagatatcttttcatgctagtagttgattgtatatttaatctaac

SEQ ID NO: 72253 - DNA, 3154 bp, Zea Mays
caacctttcctgtcagcttctcgatggccaacatcatcttctcccagcgtgcttcagcctgcttcgcttccatggtgacagcctcgatcaccaaccgggactgggccgacggcttaattgaaggtgccgtgatgaacaaaattttctgagcacctcccttctttcaaacttgtgtcaaactgtcttcccgccaatctctcctccaaggattcgacagctttgataccaattgtgaggaacccaggtctagggtttcgcccacccttggatctgtgcccaggtatggtttcccctctccctagggttcatccgacgtgaggtttcccccttggccgaatcaaacaagaaccctaaatcacacaggtatgtggtggtgctggatttctgttttatttcattcatagcttctccattacaactgctcagatttatagcagcccaagtggctctaactgctaatcagttattacagctggattacagctagatgacagatctaatctgttattacagctaaatgccagcagcttacagctgtattattctatcccctctgtactccttgcctgcatctatgcattcctggtagggtcatgacacatagccgtcaccacgacggcgtaccgagggtaggcatggatgttgtagctccccgcagctgtcaccatgatggcatgcagaagggacggcatgttccaaccagcatgagagcccaaacaaccactaggatgagtggagaaatcggtgagtccctgatctgttgaagcttgacgacgcgacgatgacgatgtgatgtaaccagcaacaatgtgatgaacactaccataactcatttgcagtttcagtgacaaagcatcgtcgatggaattgtgtaaaatgtctaaatagagtgaaaagtccaggccccacaactacatctgaaactgtttcaatacaacaggatggaactaatgatggttgctctatttcaatagttcggactttgcctaataattctgattccagaagactgttttcttggacacaacaatcatctcaagggaatgatcaatcaaccctttcaaagagtgcccaagaatgcaattcaaaatgcagctctccttatggcagtagagcagttactacagtgaatgttccagacacattaactgaagcaaatgttccagacacattcaccgaaggcagtgttccagcaacagaaggtttatggagctctttcaataatattgatgtatcagcaaatatcctgaatgatgtctccatggatatcagtgatttacctgatgatgtttctcgaatgatatcaagcatagaagaaaatggcacacagaatctacacggtccaaaaccttgtgtggtgtcaattgaagatgataatagaacagctcaagatgttcctagtgatgactgcaatgagcctaatgctcgtaaaccgaaatctgggcacaatgtctctaaacaaatatctgcgcacaaaaccaaccaagtccgcaaccaggttccacttcaagcatctttaaaaaggaatgttggatctgttgataagaagaaaagggaccaatctgccaacttagctgatatttcagatctcaaattttgtcagaggaagccaaaaagatgaggcggttatcagagctcataggcactgaccaggtaggaaataccatttgaggtaggaaataataatagcactcctgttagcaatcagaaagtgggtgaaacgcaatcaagagctcccaagaacattgtgaatcacacagtagggatggttggtgttggatcttctctaatgaactggatgaaaaacactcataataagaaaatcagagcacagaaaaaggacacaggacacaagaatcttgattcttgtgctgtttcaaactctaatccagacacagtcgcttctagtgttggcgatatggggcaggagaagatgctatctactagcaacggcaagcatgggaatgaaaacacacagaataacaacctggagcaaaatatgcagaatgtggatgacctgtgccaaaatgaatcagggaacttgaaacgggggttctcaaatggaaaaaatcaaagattttgctaaagagaaaggtctcatgatttgcatcaaatggaatctgaaggcacgatgcagagatgtgtggcaaaggatgaagtggagatggatgggcgggtggtggagcacaaagggaggatgacggcggtggtggtggagatccggaagaagaaatccggcgagctggtggctatcgggaggcagtggatgacggcctccaggcccaaaggcgctgctgctcacagcaagatctgaactgaagcttcttccttccttccttccttgggtttcctttcctacctcgaaaactactgctctcgagtgaattgaactggctgtaattactaattactggggaaaaacacggtttaggttgctgtgatttgttactggcgtcccctttaaatcaatcagcaagatgcaatcgcagcgaagctctgttgtgcgttgctagcctgcctaggatcctcttgctgccgggctatatcgagctcgcgcgctagctcatgcacccgagcaattcgctgacgcccgagacttactttttctagtgctgctatcaaagcctagtcagctggaataactctagcttatgttatacccaaataaggccttgttcggttattcccaatacacatggattggatgggattggaaaaaattcttaagaagtttgacttgtttgggattcaaactcatccaatcccacttaatccacatggattgagagctaaccgaacaagccctaattgagtttgtacaatgtacatgaattgggaaatataaaaggtttatttgactacttgttttgtttttctcatttttgcatattcaaatcatgggtcaacttggctattaacaactacattaaataaaagaaatagtgcatcatgttggagtttatttgtttgtgcatttaaggataataataatagtaataataatgtattaaacctaatttgaaatctagaatttggaaatgaaatataaaagaaaagagaagaaaaggaaaggaaaacaatatacaatgtaaagaaaaatatataaataaagatatcttttcatgctagtagttgattgtatatttaatctaac

SEQ ID NO: 72254 - DNA, 4183 bp, Zea Mays
ctttcctgtcagcttctcgatggccaacatcatcttctcccagcgtgcttcagcctgcttcgcttccatggtgacagcctcgatcaccaaccgggactgggccgacggcttaattgaaggtgccgtgatgaacaaaattttctgagcacctcccttctttcaaacttgtgtcaaactgtcttcccgccaatctctcctccaaggattcgacagctttgataccaattgtgaggaacccaggtctagggtttcgcccacccttggatctgtgcccaggtatggtttcccctctccctagggttcatccgacgtgaggtttcccccttggccgaatcaaacaagaaccctaaatcacacaggtatgtggtggtgctggatttctgttttatttcattcatagcttctccattacaactgctcagatttatagcagcccaagtggctctaactgctaatcagttattacagctggattacagctagatgacagatctaatctgttattacagctaaatgccagcagcttacagctgtattattctatcccctctgtactccttgcctgcatctatgcattcctggtagggtcatgacacatagccgtcaccacgacggcgtaccgagggtaggcatggatgttgtagctccccgcagctgtcaccatgatggcatgcagaagggacggcatgttccaaccagcatgagagcccaaacaaccactaggatgagtggagaaatcgtttcagtgacaaagcatcgtcgatggaattgtgtaaaatgtctaaatagagtgaaaagtccaggccccacaactacatctgaaactgtttcaatacaacaggatggaactaatgatggttgctctatttcaatagttcggactttgcctaataattctgattccagaagactgttttcttggacacaacaatcatctcaagggaatgatcaatcaaccctttcaaagagtgcccaagaatgcaattcaaaatgcagctctccttatggcagtagagcagttactacagtgaatgttccagacacattaactgaagcaaatgttccagacacattcaccgaaggcagtgttccagcaacagaaggtttatggagctctttcaataatattgatgtatcagcaaatatcctgaatgatgtctccatggatatcagtgatttacctgatgatgtttctcgaatgatatcaagcatagaagaaaatggcacacagaatctacacggtccaaaaccttgtgtggtgtcaattgaagatgataatagaacagctcaagatgttcctagtgatgactgcaatgagcctaatgctcgtaaaccgaaatctgggcacaatgtctctaaacaaatatctgcgcacaaaaccaaccaagtccgcaaccaggttccacttcaagcatctttaaaaaggaatgttggatctgttgataagaagaaaagggaccaatctgccaacttagctgatatttcagatctcaaattttgtcagaggaagccaaaaagatgaggcggttatcagagctcataggcactgaccaggtaggaaataccatttgaggtaggaaataataatagcactcctgttagcaatcagaaagtgggtgaaacgcaatcaagagctcccaagaacattgtgaatcacacagtagggatggttggtgttggatcttctctaatgaactggatgaaaaacactcataataagaaaatcagagcacagaaaaaggacacaggacacaagaatcttgattcttgtgctgtttcaaactctaatccagacacagtcgcttctagtgttggcgatatggggcaggagaagatgctatctactagcaacggcaagcatgggaatgaaaacacacagaataacaacctggagcaaaatatgcagaatgtggatgacctgtgccaaaatgaatcagggaacttgaaacgggggttctcaaatggaaaaaatcaaagattttgctaaagagaaaggtactgtcaactgcgatttcccgtgatgagaacactgagaataataatactataaataaaagtatgctcaggtctcatgatttgcatcaaatggaatctgaaggcacgatgcagagatgtgtggcaaagggttgtacgcagcttggcacacaaattcaagtgtcatacacacaaatagctagtttgggatagcagctctcggttcacagcatggtcaatacaatgtttcacccagcacatcacacggaagctacacagacctctgcgccctcactctcgagtaggtgtgctcggttcgttgctgcagcaggacattgcaagctggtctggtctgagaaccgtgggacgcagcacagcctaggcgtgtctagacggacaacaccgcctgctgaatgctgatatggacctgcagttgggttctgctagctcttctgttcccgacccaaagcagcatcgattgccaaggcatggtggtaccaggcaacctcagtggcagctgatttcactgtaattagcgacaagaacaagtatatgagaaggatttgaggtagagaggagtgttgtagttggagaacaggtacatttgactctgtcaagcaagtatcatctgtagaggtatagagatgtgtggttgtgccctgccatgaaacagctagacagctatctgtgccagcaatgggttcgaagtcatagcagagtcagtgtagccgcccacgcggtggcaatccgagtggtcggtggcggatgccttttaaaaggaagggggcgtgcgtgttgcgccgggcgaggcagaccgcagacggtcaaacaaacaagtcaggtagccagcgtggtcgttcgcgacacagcattcggcagcatgggcgcggttgagccgccggcgtggatgtccgccgcggcgcgcaggtggctggagaacgccggcgccacggcggaggacaccccgggccgggccttcaacgcgctgccgctctccggcgtgcgcgtgtccctcgcggagcgcggccgcgcgctctgctcgctccgcgtgccgccccacctcacggacgcggaggggaactggcacgcgggcgccatcgcggcggcggcggacgacgtgtgcgccgcggccatcatgtccgtggagggcatcatcaaggtctccgtccactacgacatctcctacttcacaccggccaagctccatgatgaagtggagatggatgggcgggtggtggagcacaaagggaggatgacggcggtggtggtggagatccggaagaagaaatccggcgagctggtggctatcgggaggcagtggatgacggcctccaggcccaaaggcgctgctgctcacagcaagatctgaactgaagcttcttccttccttccttccttgggtttcctttcctacctcgaaaactactgctctcgagtgaattgaactggctgtaattactaattactggggaaaaacacggtttaggttgctgtgatttgttactggcgtcccctttaaatcaatcagcaagatgcaatcgcagcgaagctctgttgtgcgttgctagcctgcctaggatcctcttgctgccgggctatatcgagctcgcgcgctagctcatgcacccgagcaattcgctgacgcccgagacttactttttctagtgctgctatcaaagcctagtcagctggaataactctagcttatgttatacccaaataaggccttgttcggttattcccaatacacatggattggatgggattggaaaaaattcttaagaagtttgacttgtttgggattcaaactcatccaatcccacttaatccacatggattgagagctaaccgaacaagccctaattgagtttgtacaatgtacatgaattgggaaatataaaaggtttatttgactacttgttttgtttttctcatttttgcatattcaaatcatgggtcaacttggctattaacaactacattaaataaaagaaatagtgcatcatgttggagtttatttgtttgtgcatttaaggataataataatagtaataataatgtattaaacctaatttgaaatctagaatttggaaatgaaatataaaagaaaagagaagaaaaggaaaggaaaacaatatacaatgtaaagaaaaatatataaataaagatatcttttcatgctagtagttgattgtatatttaatctaac

SEQ ID NO: 72255 - DNA, 3297 bp, Zea Mays
cgagttaacgacgtacgagtttttcgtcgagcctagccgtggtgccctctcgcgcgggtcgcggccccccaaaccccgcccgccgccgccgaaataaaaccggcacacctctgtagcacgcgcgagccatgccgcaggtggccgcccctctccgcctcctcctccccctctcccaaaccctagcagcccccgcgcctctcctccaccactcgcgccgcctcctctcctcctgccctgcttcattaagccgcgccgctggcctccgcgccctcgcctaccgccgccgccggcacaccgaacctcgccgcgggaccagcacgctcgggaaggctcccgccaaggaggagatggacaaggaggtggctttcaacaggaagcgggccgaggggaaggacggagggaagcgcggcagcatggagctcaagacccgcaggctcaaccccgtcaacaccacatgctacgtgcagatacttggtacaggaatggacacacaggacacttcaccttctattctactattctttgacaaacaaaggtttatttttaatgcgggcgagaaagcattttgaaaaccatggtcttatgctgagctgcagccaatataagattcaacttaaagatctggagaaagttcatcttgcttttgccattttgtgccgattaaactcaaatcttgccatctgacagggtcttcaacgtttctgtactgaacacaagataaaactatcaaagatcgaccatatcttcttgacccgcgtctgctcagaaactgcaggggggctcccaggcctggtgctaactctagcaggaattggagatgagggcatgtcggtgaacatatgggggccttctgatcttgactttttagctggggcaatgagatcttttatcccaaatagagcaatgcttcacacacatagctttggtgctgatcgaaatgcatcttcaccacaatctacagactccgttattgttcttgatgatgaagtagttcgggtatctgcaatgtttgtcaaaccaaaatacaataatggaactggtagttcaaacgatagtgacatgaagcctggtgatactgctatagtatatgcctgtgagttgccagaaattaagggaaagtttgacccatctaaggctgctgcccttggccttaggcctggtcccaagtaccgtgaacttcaacttgggaattctgtgcagtctgatcaatttgatgaaatggttcatccaagtgacgttcttggtccatcaattcctggaccaactgttcttctggtggattgccccacacagtatcatatgccagaacttttttcactgcacccccttagctgcttttatgaagattctccagaacaaagtggcaagaaagtaaattgcataatccacttaggtccatcacctgtgactagatctgttgactaccagaactggatgaaaaaatttggtgcaacgcaacatatcatggcaggacatgaaattaaaaacatggaaattcctatcttgaaaggtagtgcaaggatatcatcacacctcaattttgtatgccctcagcttttcccatcctctgggttttggtcggaacaaccttcaaatgatgtcatggaaaatgataagagtgtttcatcggaagcctgtggaagtgtgtctgcgcaaaacctcctaaagtttcatctgcgtccttatgctcaattgggtttggatagaacttctattccaaacttgttcacctacaaggattttgtagaagagcttgtatctgagatcccagcgattagagaagttcctgaacaggtttgcaaattctggcaaaataatgtgaatgataataatatactaacaccaactggcaatcatatgggtgaagaacaatggatcaataaaaaatcagataaggtagatgatggcactctttttcaagaaattgtcttgagaaagcatccaagggacaatcaggaaatcccttgttgtgtggaggatgcaacaagggaagatatggagatcacttttttgggcacaggttcatctcagccttcaaaataccggaacgtaagttccatatatattaacttatttgaacgaggaggtatacttctggattgcggcgaaggaactttaggacaactgaaaaggagatttggtgtaaatgatgctgatgaagctgtaaaaggtttgaggtgtatttggatttcccatattcatgctgatcaccacactgggttggccagaattcttgctctaaggtcgaaattgttaaagggggtgcctcataaacccttgcttgtgattggaccaagaccacttgagagattcctaaatgcatattctacactcgaacatcttgacatgcagttcttagactgcaggcatactttgaagtctagtgttgaggcctttctcagtgaaaatgatactgacccagccacacctcaactggagaccaccatgtttgcccctggaactagaatggagaactacaacaggaagcctgcaagtccaagggataccacagctcttgctaatttcaaagaagtcctacaggaatcaggtttagagattttgtacagcgtccctgtactacactgtccacaagcatttggagttgttttgaaggccatggaaaaagcgaacagcactggaaaggtaattccaggctggaaggttgtatattctggcgacacacgaccctgtccaggtcttatagacgcttccagagatgctacagtgctaatacatgaggcaacattcgaggacagtatgaaggacgaagcgattgcgaggaaccatagtacaaccaaggaagccatagaagtcggcacatcagctggagcgtaccggataattctgacccacttcagccagcgatacccaaaaatcccagttatcgatgaggttgatatggagaagacctgcatcgcctttgacctgatgagcgtaaacctcgcggatctgccggttgtgcccaaggttctaccgcacctgaaggtcctgttcaaggacgagctggtagttgatgaagccgaagaggtccaagaggctgctgtgtactgacatattgcatggataaaaatgatgtaaattaacttggatcgccttgtagcttagcgacattgtttttgacctgaactccagtccaattgaaggtctggatcatctgtctctgtgtctccctttaatggttgcatcgatttttacagttggttttgttgggtgagtgttgtgagttgagttgtgaaaataacaaagataattgtaattgttttgattgtgttggcgccgatctggacgctggtcact

SEQ ID NO: 72256 - DNA, 3055 bp, Zea Mays
aaaaccggcacacctctgtagcacgcgcgagccatgccgcaggtggccgcccctctccgcctcctcctccccctctcccaaaccctagcagcccccgcgcctctcctccaccactcgcgccgcctcctctcctcctgccctgcttcattaagccgcgccgctggcctccgcgccctcgcctaccgccgccgccggcacaccgaacctcgccgcgggaccagcacgctcgggaaggctcccgccaaggaggagatggacaaggaggtggctttcaacaggaagcgggccgaggggaaggacggagggaagcgcggcagcatggagctcaagacccgcaggctcaaccccgtcaacaccacatgctacgtgcagatacttggtacaggaatggacacacaggacacttcaccttctattctactattctttgacaaacaaaggtttatttttaatgcgggcgagggtcttcaacgtttctgtactgaacacaagataaaactatcaaagatcgaccatatcttcttgacccgcgtctgctcagaaactgcaggggggctcccaggcctggtgctaactctagcaggaattggagatgagggcatgtcggtgaacatatgggggccttctgatcttgactttttagctggggcaatgagatcttttatcccaaatagagcaatgcttcacacacatagctttggtgctgatcgaaatgcatcttcaccacaatctacagactccgttattgttcttgatgatgaagtagttcgggtatctgcaatgtttgtcaaaccaaaatacaataatggaactggtagttcaaacgatagtgacatgaagcctggtgatactgctatagtatatgcctgtgagttgccagaaattaagggaaagtttgacccatctaaggctgctgcccttggccttaggcctggtcccaagtaccgtgaacttcaacttgggaattctgtgcagtctgatcaatttgatgaaatggttcatccaagtgacgttcttggtccatcaattcctggaccaactgttcttctggtggattgccccacacagtatcatatgccagaacttttttcactgcacccccttagctgcttttatgaagattctccagaacaaagtggcaagaaagtaaattgcataatccacttaggtccatcacctgtgactagatctgttgactaccagaactggatgaaaaaatttggtgcaacgcaacatatcatggcaggacatgaaattaaaaacatggaaattcctatcttgaaaggtagtgcaaggatatcatcacacctcaattttgtatgccctcagcttttcccatcctctgggttttggtcggaacaaccttcaaatgatgtcatggaaaatgataagatttttttgttttcctttcagagtgtttcatcggaagcctgtggaagtgtgtctgcgcaaaacctcctaaagaacttctattccaaacttgttcacctacaaggattttgtagaagagcttgtatctgagatcccagcgattagagaagttcctgaacaggtttgcaaattctggcaaaataatgtgaatgataataatatactaacaccaactggcaatcatatgggtgaagaacaatggatcaataaaaaatcagataaggtagatgatggcactctttttcaagaaattgtcttgagaaagcatccaagggacaatcaggaaatcccttgttgtgtggaggatgcaacaagggaagatatggagatcacttttttgggcacaggttcatctcagccttcaaaataccggaacgtaagttccatatatattaacttatttgaacgaggaggtatacttctggattgcggcgaaggaactttaggacaactgaaaaggagatttggtgtaaatgatgctgatgaagctgtaaaaggtttgaggtgtatttggatttcccatattcatgctgatcaccacactgggttggccagaattcttgctctaaggtcgaaattgttaaagggggtgcctcataaacccttgcttgtgattggaccaagaccacttgagagattcctaaatgcatattctacactcgaacatcttgacatgcagttcttagactgcaggcatactttgaagtctagtgttgaggcctttctcagtgaaaatgatactgacccagccacacctcaactggagaccaccatgtttgcccctggaactagaatggagaactacaacaggaagcctgcaagtccaagggataccacagctcttgctaatttcaaagaagtcctacaggaatcaggtttagagattttgtacagcgtccctgtactacactgtccacaagcatttggagttgttttgaaggccatggaaaaagcgaacagcactggaaaggtaattccaggctggaaggttgtatattctggcgacacacgaccctgtccaggtcttatagacgcttccagagatgctacagtgctaatacatgaggcaacattcgaggacagtatgaaggacgaagcgattgcgaggaaccatagtacaaccaaggaagccatagaagtcggcacatcagctggagcgtaccggataattctgacccacttcagccagcgatacccaaaaatcccagttatcgatgaggttgatatggagaagacctgcatcgcctttgacctgatgagcgtaaacctcgcggatctgccggttgtgcccaaggttctaccgcacctgaaggtcctgttcaaggacgagctggtagttgatgaagccgaagaggtccaagaggctgctgtgtactgacatattgcatggataaaaatgatgtaaattaacttggatcgccttgtagcttagcgacattgtttttgacctgaactccagtccaattgaaggtctggatcatctgtctctgtgtctccctttaatggttgcatcgatttttacagttggttttgttgggtgagtgttgtgagttgagttgtgaaaataacaaagataattgtaattgttttgattgtgttggcgccgatctggacgctggtcact

SEQ ID NO: 72257 - DNA, 3083 bp, Zea Mays
cacctctgtagcacgcgcgagccatgccgcaggtggccgcccctctccgcctcctcctccccctctcccaaaccctagcagcccccgcgcctctcctccaccactcgcgccgcctcctctcctcctgccctgcttcattaagccgcgccgctggcctccgcgccctcgcctaccgccgccgccggcacaccgaacctcgccgcgggaccagcacgctcgggaaggctcccgccaaggaggagatggacaaggaggtggctttcaacaggaagcgggccgaggggaaggacggagggaagcgcggcagcatggagctcaagacccgcaggctcaaccccgtcaacaccacatgctacgtgcagatacttggtacaggaatggacacacaggacacttcaccttctattctactattctttgacaaacaaaggtttatttttaatgcgggcgagggtcttcaacgtttctgtactgaacacaagataaaactatcaaagatcgaccatatcttcttgacccgcgtctgctcagaaactgcaggggggctcccaggcctggtgctaactctagcaggaattggagatgagggcatgtcggtgaacatatgggggccttctgatcttgactttttagctggggcaatgagatcttttatcccaaatagagcaatgcttcacacacatagctttggtgctgatcgaaatgcatcttcaccacaatctacagactccgttattgttcttgatgatgaagtagttcgggtatctgcaatgtttgtcaaaccaaaatacaataatggaactggtagttcaaacgatagtgacatgaagcctggtgatactgctatagtatatgcctgtgagttgccagaaattaagggaaagtttgacccatctaaggctgctgcccttggccttaggcctggtcccaagtaccgtgaacttcaacttgggaattctgtgcagtctgatcaatttgatgaaatggttcatccaagtgacgttcttggtccatcaattcctggaccaactgttcttctggtggattgccccacacagtatcatatgccagaacttttttcactgcacccccttagctgcttttatgaagattctccagaacaaagtggcaagaaagtaaattgcataatccacttaggtccatcacctgtgactagatctgttgactaccagaactggatgaaaaaatttggtgcaacgcaacatatcatggcaggacatgaaattaaaaacatggaaattcctatcttgaaaggtagtgcaaggatatcatcacacctcaattttgtatgccctcagcttttcccatcctctgggttttggtcggaacaaccttcaaatgatgtcatggaaaatgataagatttttttgttttcctttcagagtgtttcatcggaagcctgtggaagtgtgtctgcgcaaaacctcctaaagtttcatctgcgtccttatgctcaattgggtttggatagaacttctattccaaacttgttcacctacaaggattttgtagaagagcttgtatctgagatcccagcgattagagaagttcctgaacaggtttgcaaattctggcaaaataatgtgaatgataataatatactaacaccaactggcaatcatatgggtgaagaacaatggatcaataaaaaatcagataaggtagatgatggcactctttttcaagaaattgtcttgagaaagcatccaagggacaatcaggaaatcccttgttgtgtggaggatgcaacaagggaagatatggagatcacttttttgggcacaggttcatctcagccttcaaaataccggaacgtaagttccatatatattaacttatttgaacgaggaggtatacttctggattgcggcgaaggaactttaggacaactgaaaaggagatttggtgtaaatgatgctgatgaagctgtaaaaggtttgaggtgtatttggatttcccatattcatgctgatcaccacactgggttggccagaattcttgctctaaggtcgaaattgttaaagggggtgcctcataaacccttgcttgtgattggaccaagaccacttgagagattcctaaatgcatattctacactcgaacatcttgacatgcagttcttagactgcaggcatactttgaagtctagtgttgaggcctttctcagtgaaaatgatactgacccagccacacctcaactggagaccaccatgtttgcccctggaactagaatggagaactacaacaggaagcctgcaagtccaagggataccacagctcttgctaatttcaaagaagtcctacaggaatcaggtttagagattttgtacagcgtccctgtactacactgtccacaagcatttggagttgttttgaaggccatggaaaaagcgaacagcactggaaaggtaattccaggctggaaggttgtatattctggcgacacacgaccctgtccaggtcttatagacgcttccagagatgctacagtgctaatacatgaggcaacattcgaggacagtatgaaggacgaagcgattgcgaggaaccatagtacaaccaaggaagccatagaagtcggcacatcagctggagcgtaccggataattctgacccacttcagccagcgatacccaaaaatcccagttatcgatgaggttgatatggagaagacctgcatcgcctttgacctgatgagcgtaaacctcgcggatctgccggttgtgcccaaggttctaccgcacctgaaggtcctgttcaaggacgagctggtagttgatgaagccgaagaggtccaagaggctgctgtgtactgacatattgcatggataaaaatgatgtaaattaacttggatcgccttgtagcttagcgacattgtttttgacctgaactccagtccaattgaaggtctggatcatctgtctctgtgtctccctttaatggttgcatcgatttttacagttggttttgttgggtgagtgttgtgagttgagttgtgaaaataacaaagataattgtaattgttttgattgtgttggcgccgatctggacgctggtcact

SEQ ID NO: 72258 - DNA, 2921 bp, Zea Mays
cacgcgcgagccatgccgcaggtggccgcccctctccgcctcctcctccccctctcccaaaccctagcagcccccgcgcctctcctccaccactcgcgccgcctcctctcctcctgccctgcttcattaagccgcgccgctggcctccgcgccctcgcctaccgccgccgccggcacaccgaacctcgccgcgggaccagcacgctcgggaaggctcccgccaaggaggagatggacaaggaggtggctttcaacaggaagcgggccgaggggaaggacggagggaagcgcggcagcatggagctcaagacccgcaggctcaaccccgtcaacaccacatgctacgtgcagatacttggtacaggaatggacacacaggacacttcaccttctattctactattctttgacaaacaaaggtttatttttaatgcgggcgagaaagcattttgaaaaccatggtcttatgctgagctgcagccaatataagattcaacttaaagatctggagaaagttcatcttgcttttgccattttgtgccgattaaactcaaatcttgccatctgacagggtcttcaacgtttctgtactgaacacaagataaaactatcaaagatcgaccatatcttcttgacccgcgtctgctcagaaactgcaggggggctcccaggcctggtgctaactctagcaggaattggagatgagggcatgtcggtgaacatatgggggccttctgatcttgactttttagctggggcaatgagatcttttatcccaaatagagcaatgcttcacacacatagctttggtgctgatcgaaatgcatcttcaccacaatctacagactccgttattgttcttgatgatgaagtagttcgggtatctgcaatgtttgtcaaaccaaaatacaataatggaactggtagttcaaacgatagtgacatgaagcctggtgatactgctatagtatatgcctgtgagttgccagaaattaagggaaagtttgacccatctaaggctgctgcccttggccttaggcctggtcccaagtaccgtgaacttcaacttgggaattctgtgcagtctgatcaatttgatgaaatgtaaaaacatggaaattcctatcttgaaaggtagtgcaaggatatcatcacacctcaattttgtatgccctcagcttttcccatcctctgggttttggtcggaacaaccttcaaatgatgtcatggaaaatgataagagtgtttcatcggaagcctgtggaagtgtgtctgcgcaaaacctcctaaagtttcatctgcgtccttatgctcaattgggtttggatagaacttctattccaaacttgttcacctacaaggattttgtagaagagcttgtatctgagatcccagcgattagagaagttcctgaacaggtttgcaaattctggcaaaataatgtgaatgataataatatactaacaccaactggcaatcatatgggtgaagaacaatggatcaataaaaaatcagataaggtagatgatggcactctttttcaagaaattgtcttgagaaagcatccaagggacaatcaggaaatcccttgttgtgtggaggatgcaacaagggaagatatggagatcacttttttgggcacaggttcatctcagccttcaaaataccggaacgtaagttccatatatattaacttatttgaacgaggaggtatacttctggattgcggcgaaggaactttaggacaactgaaaaggagatttggtgtaaatgatgctgatgaagctgtaaaaggtttgaggtgtatttggatttcccatattcatgctgatcaccacactgggttggccagaattcttgctctaaggtcgaaattgttaaagggggtgcctcataaacccttgcttgtgattggaccaagaccacttgagagattcctaaatgcatattctacactcgaacatcttgacatgcagttcttagactgcaggcatactttgaagtctagtgttgaggcctttctcagtgaaaatgatactgacccagccacacctcaactggagaccaccatgtttgcccctggaactagaatggagaactacaacaggaagcctgcaagtccaagggataccacagctcttgctaatttcaaagaagtcctacaggaatcaggtttagagattttgtacagcgtccctgtactacactgtccacaagcatttggagttgttttgaaggccatggaaaaagcgaacagcactggaaaggtaattccaggctggaaggttgtatattctggcgacacacgaccctgtccaggtcttatagacgcttccagagatgctacagtgctaatacatgaggcaacattcgaggacagtatgaaggacgaagcgattgcgaggaaccatagtacaaccaaggaagccatagaagtcggcacatcagctggagcgtaccggataattctgacccacttcagccagcgatacccaaaaatcccagttatcgatgaggttgatatggagaagacctgcatcgcctttgacctgatgagcgtaaacctcgcggatctgccggttgtgcccaaggttctaccgcacctgaaggtcctgttcaaggacgagctggtagttgatgaagccgaagaggtccaagaggctgctgtgtactgacatattgcatggataaaaatgatgtaaattaacttggatcgccttgtagcttagcgacattgtttttgacctgaactccagtccaattgaaggtctggatcatctgtctctgtgtctccctttaatggttgcatcgatttttacagttggttttgttgggtgagtgttgtgagttgagttgtgaaaataacaaagataattgtaattgttttgattgtgttggcgccgatctggacgctggtcact

SEQ ID NO: 72259 - DNA, 2955 bp, Zea Mays
cacgcgcgagccatgccgcaggtggccgcccctctccgcctcctcctccccctctcccaaaccctagcagcccccgcgcctctcctccaccactcgcgccgcctcctctcctcctgccctgcttcattaagccgcgccgctggcctccgcgccctcgcctaccgccgccgccggcacaccgaacctcgccgcgggaccagcacgctcgggaaggctcccgccaaggaggagatggacaaggaggtggctttcaacaggaagcgggccgaggggaaggacggagggaagcgcggcagcatggagctcaagacccgcaggctcaaccccgtcaacaccacatgctacgtgcagatacttggtacaggaatggacacacaggacacttcaccttctattctactattctttgacaaacaaaggtttatttttaatgcgggcgagggtcttcaacgtttctgtactgaacacaagataaaactatcaaagatcgaccatatcttcttgacccgcgtctgctcagaaactgcaggggggctcccaggcctggtgctaactctagcaggaattggagatgagggcatgtcggtgaacatatgggggccttctgatcttgactttttagctggggcaatgagatcttttatcccaaatagagcaatgcttcacacacatagctttggtgctgatcgaaatgcatcttcaccacaatctacagactccgttattgttcttgatgatgaagtagttcgggtatctgcaatgtttgtcaaaccaaaatacaataatggaactggtagttcaaacgatagtgacatgaagcctggtgatactgctatagtatatgcctgtgagttgccagaaattaagggaaagtttgacccatctaaggctgctgcccttggccttaggcctggtcccaagtaccgtgaacttcaacttgggaattctgtgcagtctgatcaatttgatgaaatggttcatccaagtgacgttcttggtccatcaattcctggaccaactgttcttctggtggattgccccacacagtatcatatgccagaacttttttcactgcacccccttagctgcttttatgaagattctccagaacaaagtggcaagaaagtaaattgcataatccacttaggtccatcacctgtgactagatctgttgactaccagaactggatgaaaaaatttggtgcaacgcaacatatcatggcaggacatgaaattaaaaacatggaaattcctatcttgaaaggtagtgcaaggatatcatcacacctcaattttgtatgccctcagcttttcccatcctctgggttttggtcggaacaaccttcaaatgatgtcatggaaaatgataagagtgtttcatcggaagcctgtggaagtgtgtctgcgcaaaacctcctaaagtttcatctgcgtccttatgctcaattgggtttggatagaacttctattccaaacttgttcacctacaaggattttgtagaagagcttgtatctgagatcccagcgattagagaagttcctgaacaggtttgcaaattctggcaaaataatgtgaatgataataatatactaacaccaactggcaatcatatgggtgaagaacaatggatcaataaaaaatcagataaggtagatgatggcactctttttcaagaaattgtcttgagaaagcatccaagggacaatcaggaaatcccttgttgtgtggaggatgcaacaagggaagatatggagatcacttttttgggcacaggttcatctcagccttcaaaataccggaacgtaagttccatatatattaacttatttgaacgaggaggtatacttctggattgcggcgaaggaactttaggacaactgaaaaggagatttggtgtaaatgatgctgatgaagctgtaaaaggtttgaggtgtatttggatttcccatattcatgctgatcaccacactgggttggccagaattcttgctctaaggtcgaaattgttaaagggggtgcctcataaacccttgcttgtgattggaccaagaccacttgagagattcctaaatgcatattctacactcgaacatcttgacatgcagttcttagactgcaggcatactttgaagtctagtgttgaggcctttctcagtgaaaatgatactgacccagccacacctcaactggagaccaccatgtttgcccctggaactagaatggagaactacaacaggaagcctgcaagtccaagggataccacagctcttgctaatttcaaagaagtcctacaggaatcaggtttagagattttgtacagcgtccctgtactacactgtccacaagcatttggagttgttttgaaggccatggaaaaagcgaacagcactggaaaggcaacattcgaggacagtatgaaggacgaagcgattgcgaggaaccatagtacaaccaaggaagccatagaagtcggcacatcagctggagcgtaccggataattctgacccacttcagccagcgatacccaaaaatcccagttatcgatgaggttgatatggagaagacctgcatcgcctttgacctgatgagcgtaaacctcgcggatctgccggttgtgcccaaggttctaccgcacctgaaggtcctgttcaaggacgagctggtagttgatgaagccgaagaggtccaagaggctgctgtgtactgacatattgcatggataaaaatgatgtaaattaacttggatcgccttgtagcttagcgacattgtttttgacctgaactccagtccaattgaaggtctggatcatctgtctctgtgtctccctttaatggttgcatcgatttttacagttggttttgttgggtgagtgttgtgagttgagttgtgaaaataacaaagataattgtaattgttttgattgtgttggcgccgatctggacgctggtcact

SEQ ID NO: 72260 - DNA, 2791 bp, Zea Mays
cacgcgcgagccatgccgcaggtggccgcccctctccgcctcctcctccccctctcccaaaccctagcagcccccgcgcctctcctccaccactcgcgccgcctcctctcctcctgccctgcttcattaagccgcgccgctggcctccgcgccctcgcctaccgccgccgccggcacaccgaacctcgccgcgggaccagcacgctcgggaaggctcccgccaaggaggagatggacaaggaggtggctttcaacaggaagcgggccgaggggaaggacggagggaagcgcggcagcatggagctcaagacccgcaggctcaaccccgtcaacaccacatgctacgtgcagatacttggtacaggaatggacacacaggacacttcaccttctattctactattctttgacaaacaaaggtttatttttaatgcgggcgagggtcttcaacgtttctgtactgaacacaagataaaactatcaaagatcgaccatatcttcttgacccgcgtctgctcagaaactgcaggggggctcccaggcctggtgctaactctagcaggaattggagatgagggcatgtcggtgaacatatgggggccttctgatcttgactttttagctggggcaatgagatcttttatcccaaatagagcaatgcttcacacacatagctttggtgctgatcgaaatgcatcttcaccacaatctacagactccgttattgttcttgatgatgaagtagttcgggtatctgcaatgtttgtcaaaccaaaatacaataatggaactggtagttcaaacgatagtgacatgaagcctggtgatactgctatagtatatgcctgtgagttgccagaaattaagggaaagtttgacccatctaaggctgctgcccttggccttaggcctggtcccaagtaccgtgaacttcaacttgggaattctgtgcagtctgatcaatttgatgaaatgtaaaaacatggaaattcctatcttgaaaggtagtgcaaggatatcatcacacctcaattttgtatgccctcagcttttcccatcctctgggttttggtcggaacaaccttcaaatgatgtcatggaaaatgataagagtgtttcatcggaagcctgtggaagtgtgtctgcgcaaaacctcctaaagtttcatctgcgtccttatgctcaattgggtttggatagaacttctattccaaacttgttcacctacaaggattttgtagaagagcttgtatctgagatcccagcgattagagaagttcctgaacaggtttgcaaattctggcaaaataatgtgaatgataataatatactaacaccaactggcaatcatatgggtgaagaacaatggatcaataaaaaatcagataaggtagatgatggcactctttttcaagaaattgtcttgagaaagcatccaagggacaatcaggaaatcccttgttgtgtggaggatgcaacaagggaagatatggagatcacttttttgggcacaggttcatctcagccttcaaaataccggaacgtaagttccatatatattaacttatttgaacgaggaggtatacttctggattgcggcgaaggaactttaggacaactgaaaaggagatttggtgtaaatgatgctgatgaagctgtaaaaggtttgaggtgtatttggatttcccatattcatgctgatcaccacactgggttggccagaattcttgctctaaggtcgaaattgttaaagggggtgcctcataaacccttgcttgtgattggaccaagaccacttgagagattcctaaatgcatattctacactcgaacatcttgacatgcagttcttagactgcaggcatactttgaagtctagtgttgaggcctttctcagtgaaaatgatactgacccagccacacctcaactggagaccaccatgtttgcccctggaactagaatggagaactacaacaggaagcctgcaagtccaagggataccacagctcttgctaatttcaaagaagtcctacaggaatcaggtttagagattttgtacagcgtccctgtactacactgtccacaagcatttggagttgttttgaaggccatggaaaaagcgaacagcactggaaaggtaattccaggctggaaggttgtatattctggcgacacacgaccctgtccaggtcttatagacgcttccagagatgctacagtgctaatacatgaggcaacattcgaggacagtatgaaggacgaagcgattgcgaggaaccatagtacaaccaaggaagccatagaagtcggcacatcagctggagcgtaccggataattctgacccacttcagccagcgatacccaaaaatcccagttatcgatgaggttgatatggagaagacctgcatcgcctttgacctgatgagcgtaaacctcgcggatctgccggttgtgcccaaggttctaccgcacctgaaggtcctgttcaaggacgagctggtagttgatgaagccgaagaggtccaagaggctgctgtgtactgacatattgcatggataaaaatgatgtaaattaacttggatcgccttgtagcttagcgacattgtttttgacctgaactccagtccaattgaaggtctggatcatctgtctctgtgtctccctttaatggttgcatcgatttttacagttggttttgttgggtgagtgttgtgagttgagttgtgaaaataacaaagataattgtaattgttttgattgtgttggcgccgatctggacgctggtcact

SEQ ID NO: 72261 - DNA, 2982 bp, Zea Mays
cacgcgcgagccatgccgcaggtggccgcccctctccgcctcctcctccccctctcccaaaccctagcagcccccgcgcctctcctccaccactcgcgccgcctcctctcctcctgccctgcttcattaagccgcgccgctggcctccgcgccctcgcctaccgccgccgccggcacaccgaacctcgccgcgggaccagcacgctcgggaaggctcccgccaaggaggagatggacaaggaggtggctttcaacaggaagcgggccgaggggaaggacggagggaagcgcggcagcatggagctcaagacccgcaggctcaaccccgtcaacaccacatgctacgtgcagatacttggtacaggaatggacacacaggacacttcaccttctattctactattctttgacaaacaaaggtttatttttaatgcgggcgagggtcttcaacgtttctgtactgaacacaagataaaactatcaaagatcgaccatatcttcttgacccgcgtctgctcagaaactgcaggggggctcccaggcctggtgctaactctagcaggaattggagatgagggcatgtcggtgaacatatgggggccttctgatcttgactttttagctggggcaatgagatcttttatcccaaatagagcaatgcttcacacacatagctttggtgctgatcgaaatgcatcttcaccacaatctacagactccgttattgttcttgatgatgaagtagttcgggtatctgcaatgtttgtcaaaccaaaatacaataatggaactggtagttcaaacgatagtgacatgaagcctggtgatactgctatagtatatgcctgtgagttgccagaaattaagggaaagtttgacccatctaaggctgctgcccttggccttaggcctggtcccaagtaccgtgaacttcaacttgggaattctgtgcagtctgatcaatttgatgaaatggttcatccaagtgacgttcttggtccatcaattcctggaccaactgttcttctggtggattgccccacacagtatcatatgccagaacttttttcactgcacccccttagctgcttttatgaagattctccagaacaaagtggcaagaaagtaaattgcataatccacttaggtccatcacctgtgactagatctgttgactaccagaactggatgaaaaaatttggtgcaacgcaacatatcatggcaggacatgaaattaaaaacatggaaattcctatcttgaaaggtagtgcaaggatatcatcacacctcaattttgtatgccctcagcttttcccatcctctgggttttggtcggaacaaccttcaaatgatgtcatggaaaatgataagagtgtttcatcggaagcctgtggaagtgtgtctgcgcaaaacctcctaaaggattttgtagaagagcttgtatctgagatcccagcgattagagaagttcctgaacaggtttgcaaattctggcaaaataatgtgaatgataataatatactaacaccaactggcaatcatatgggtgaagaacaatggatcaataaaaaatcagataaggtagatgatggcactctttttcaagaaattgtcttgagaaagcatccaagggacaatcaggaaatcccttgttgtgtggaggatgcaacaagggaagatatggagatcacttttttgggcacaggttcatctcagccttcaaaataccggaacgtaagttccatatatattaacttatttgaacgaggaggtatacttctggattgcggcgaaggaactttaggacaactgaaaaggagatttggtgtaaatgatgctgatgaagctgtaaaaggtttgaggtgtatttggatttcccatattcatgctgatcaccacactgggttggccagaattcttgctctaaggtcgaaattgttaaagggggtgcctcataaacccttgcttgtgattggaccaagaccacttgagagattcctaaatgcatattctacactcgaacatcttgacatgcagttcttagactgcaggcatactttgaagtctagtgttgaggcctttctcagtgaaaatgatactgacccagccacacctcaactggagaccaccatgtttgcccctggaactagaatggagaactacaacaggaagcctgcaagtccaagggataccacagctcttgctaatttcaaagaagtcctacaggaatcaggtttagagattttgtacagcgtccctgtactacactgtccacaagcatttggagttgttttgaaggccatggaaaaagcgaacagcactggaaaggtaattccaggctggaaggttgtatattctggcgacacacgaccctgtccaggtcttatagacgcttccagagatgctacagtgctaatacatgaggcaacattcgaggacagtatgaaggacgaagcgattgcgaggaaccatagtacaaccaaggaagccatagaagtcggcacatcagctggagcgtaccggataattctgacccacttcagccagcgatacccaaaaatcccagttatcgatgaggttgatatggagaagacctgcatcgcctttgacctgatgagcgtaaacctcgcggatctgccggttgtgcccaaggttctaccgcacctgaaggtcctgttcaaggacgagctggtagttgatgaagccgaagaggtccaagaggctgctgtgtactgacatattgcatggataaaaatgatgtaaattaacttggatcgccttgtagcttagcgacattgtttttgacctgaactccagtccaattgaaggtctggatcatctgtctctgtgtctccctttaatggttgcatcgatttttacagttggttttgttgggtgagtgttgtgagttgagttgtgaaaataacaaagataattgtaattgttttgattgtgttggcgccgatctggacgctggtcact

SEQ ID NO: 72262 - DNA, 1899 bp, Zea Mays
cgactatgttcgtatatgttagtgagtagtgactgctggttctcagggtttagttttccataatgatatgggaaaaatacatttaaaaacatggaaattcctatcttgaaaggtagtgcaaggatatcatcacacctcaattttgtatgccctcagcttttcccatcctctgggttttggtcggaacaaccttcaaatgatgtcatggaaaatgataagagtgtttcatcggaagcctgtggaagtgtgtctgcgcaaaacctcctaaagtttcatctgcgtccttatgctcaattgggtttggatagaacttctattccaaacttgttcacctacaaggattttgtagaagagcttgtatctgagatcccagcgattagagaagttcctgaacaggtttgcaaattctggcaaaataatgtgaatgataataatatactaacaccaactggcaatcatatgggtgaagaacaatggatcaataaaaaatcagataaggtagatgatggcactctttttcaagaaattgtcttgagaaagcatccaagggacaatcaggaaatcccttgttgtgtggaggatgcaacaagggaagatatggagatcacttttttgggcacaggttcatctcagccttcaaaataccggaacgtaagttccatatatattaacttatttgaacgaggaggtatacttctggattgcggcgaaggaactttaggacaactgaaaaggagatttggtgtaaatgatgctgatgaagctgtaaaaggtttgaggtgtatttggatttcccatattcatgctgatcaccacactgggttggccagaattcttgctctaaggtcgaaattgttaaagggggtgcctcataaacccttgcttgtgattggaccaagaccacttgagagattcctaaatgcatattctacactcgaacatcttgacatgcagttcttagactgcaggcatactttgaagtctagtgttgaggcctttctcagtgaaaatgatactgacccagccacacctcaactggagaccaccatgtttgcccctggaactagaatggagaactacaacaggaagcctgcaagtccaagggataccacagctcttgctaatttcaaagaagtcctacaggaatcaggtttagagattttgtacagcgtccctgtactacactgtccacaagcatttggagttgttttgaaggccatggaaaaagcgaacagcactggaaaggtaattccaggctggaaggttgtatattctggcgacacacgaccctgtccaggtcttatagacgcttccagagatgctacagtgctaatacatgaggcaacattcgaggacagtatgaaggacgaagcgattgcgaggaaccatagtacaaccaaggaagccatagaagtcggcacatcagctggagcgtaccggataattctgacccacttcagccagcgatacccaaaaatcccagttatcgatgaggttgatatggagaagacctgcatcgcctttgacctgatgagcgtaaacctcgcggatctgccggttgtgcccaaggttctaccgcacctgaaggtcctgttcaaggacgagctggtagttgatgaagccgaagaggtccaagaggctgctgtgtactgacatattgcatggataaaaatgatgtaaattaacttggatcgccttgtagcttagcgacattgtttttgacctgaactccagtccaattgaaggtctggatcatctgtctctgtgtctccctttaatggttgcatcgatttttacagttggttttgttgggtgagtgttgtgagttgagttgtgaaaataacaaagataattgtaattgttttgattgtgttggcgccgatctggacgctggtcact

SEQ ID NO: 72263 - DNA, 2354 bp, Zea Mays
ctgtcgagggatgctgctactggctttacggttgatcaaatacgcaattggaaaatctggtactgatttcaagagggagatgcaaaggcactcagcggctatacgccaactagttcattacaaaggccaccctgaccccttaagaggggatgcccttaataaggctgttcgggaaactgcgaatgaggctattgctgcaattttctccacagaggaccctaaacctgctgtcgcaaccgaaagtcttggcaagcgcatacaaggctttggaaatactaattacgagccatctagagatgaaaagaagtctttccttagtgaacttagcgaagtagtgggtattggaagtgcatccatcaagcagggtttgagcaacttcgctgcagcgcatgcaataatgataaatgacaacggcagcacatacaagagccctaatctacgtaggtctttaaccacagaatctgaaaaatatggccggtatgatccaagtgaaattcaaagtgagagccgtgcctcatctgatgcttcaaagaacgtagcttctggttcttggggtccgacttccagttctgcaccatccgatgatactagctcaagtcaaccaggggttaaaactcgtgaagaaagacttctggagacaattgttactgcaagtggtgtgcgattgcaaccaacgcgagatgctctgcgggtttttttaacagaagcttccaaattggatgcagttgccttgagccgcgcacttgaaaacaaactgaattccccattatggcaggttcgcatgaaggctatttgtgtgttggaagccattgtaaggaaacaggatactgatccttattctatcattgcttcatatttcattgagaacacagcttctgttgttaaatgctctgagctgccacaggtttctctcagagagaaggcctcaaaggtcttgaatatgctgattggggaagagcctactggaaccacagcaacaaaatctgcaatggccacacctgttcagatgcctgatttgatcgatacaggtgatcaagatggtctggcaacaagttctggacaggaaagcaatggacaaaaaaatactgggaaagcatatgtttcttcagttgatgatttgcttggtggtgaacctattgctgatacaagtgtcactgctgatagcaatggaagcgatccatttgcagatgtatcgttccatgaggtagaggctaaggagactaatgatctcttctcaggattgatagtagaagaaaaatcatcagctaccatgcacggcagttcttcatcaaacaaaaatgaattaccagatatctttggcagcccccctgattctttcatccaaggtagtgttactgaccaaggaactgtcaatgatttgatgtctggtttgaaccttaatggaacaggtcaggctcatcctccagttaaagcagaacccaatagcaccttcagtggttcacagttctttgatacaaacaatgagatcggccatgtggcaagtgctgcagcattgaatggcattgttggtcaaaactcgttttaccaacagcagcagactcccttgcagtacagcttccctcaacatatgatgctcaatcaatcatttcctgggcaacaattaaattatggtgctatggggattcttcttgctcagcagcagcagttactgcaaaattttggaaatttcaatgctgaacttgggaattcttctttcaattcgatgaacagtggaaatgcatcagtgcttccagatattttcaattcaagtaatcaacctcaaaatcatgttgcagcgatgagcagttcgaagaaagatgacactagagcttttgattttgtttcggatcaccttgcagcggcacgtgcttcaagaaagtgaaccaggaagcgatgagcatgtccatatgctggcaagagctcaagtgcttgatggacacaaaagctgggactccaaaagctgcatctcgtcacagcctcgcagattggctgcatgatcacacacggctggtttggcatgggatcgggcgcatgtttgaacagttgagaaagaagggttgttccatacggttgaaagacgggatgttgtgtcgtactatgtacttagacaaagactgtttttttactctgaaaaataaattgcatcttccgactttccttatgttctgcccttttctctcttcctttttttattaaaaaaatgagtcagacaccatatacgtatttattacctcaggttttatttcttttctgtacaagtacatggaggatgtttttttttttgcggcaattgtaaagctttgggacacgaataagagggtgcaatatgatatgagctgctacatgatctttgc

SEQ ID NO: 72264 - DNA, 4002 bp, Zea Mays
tttttttctccacgaacaacatgtcagcctcccaaatggccataggaaattctctcaagagaggtcttttcacacagggaaacgaactgacgtggaaatcacctggcgaggttaatttccatgggttaattagcaagtagctactaaactagcccttacatgttggtcaggtacttgagacgagatcttctgcggagcccacttctgatcggttagtttgtaacacgtaaccaagcgtgacgcgctctcactcactcactatggcgtggcgcgagcttgcataaatagtcaccgaatcgaccgcgcaattcttttcttcggatcgaatcgaacgccgacccgagtaaggcgatcgcgcggcggctgaccttccccgccgcccaccgtcgaagacatggacaccgagtaccgcgccttgcagcaggggagcccctcgccgtggcgcacggcggacggcgtgtcgtcgtggggacccgcgcagcaccagaagcgacagcgatgccagggttcttcaagcgatcaagctggttccagctcaagtagttctctgcaaatttcagaacctgaaccacaacaaaaccaagaagaagattactatgtggaggatgattgtgatgcctatgatgaagatgattatgactttgatgaagctgaatttaacctgcaccttgctgataaatttgatgatttggatcttcctccaggcgtggaggctaatgtaccatggctgcaaaaaattccacccaaggaagtagtcaagcagccacctatatcaattactgcagacgagaatgctaataaatatgacaagttcaaacagtttgatactgttcagacattctctgaccatcactatgctaagaattctcatgaagagccaaccagagcctggtcaaagagagttcaacatgactggaaacttttggagaatgatctaccaggctttcatgaggtggtggcaaattcctggaaccagccacttcataattgcgggcatctggagaggatctctctaaagctcaagagactaacaagagcactgcagtcttgggggcacaaaacagtgggcaactttaaataccaactgggcttagcaagggagattttacacagactggaaatggctcaagacagcagggtattatctccagatgaattatggctgctgagaaagctcaagcatcagtgcctggtccttgcttccctggaaagaacggttgcaagactcagatctagagttcagtacctgaaagagggagatgccaacacctctttcttccatttgcaggcctgcttccgcaagaagagaaatcatatcttcagcttactggatgaggaaagagtggtcacatctcatgagcaaaaacaagaggtgctgcataatttctactctaatttgttggggtatgccccccagaggaggttaactttgagattagaagagtgtcacagagctccaattgatttatctgctcttgagcttcccttttcagaagaagaagtttgggatgccattgccagtcttccttcagataaagcgcctgggccagatggatacacagggaaattctataaaacttgttggcctatacttaaggcagatttgatggccgcccttgctgcccttcaccttgggaattctcagaatttgggacctctaaacacagcatatattactttgatccctaagaagacaggagccatgtctgctggtgattacaggcccatcagcctcatccacagctttgcaaaactctccacgaagatccttgctaacaggcttgctcctcttctcaacaagatggtagagactaatcagagtgcttttgttagaggcagatccattcatgacaattatatgttggttcagcactcaattaaatccctgcacaggaaaaaagtggccagcctttttctgaaattagatttaacaaaggcatttgattctgtttcctgggctttccttcttgaggtgttgacccaccttggcttcggtattaagtggaggaatcttgtctccaaccttctggccacttcttcaactctaattttattaaatgggtttccaggggaacagatcaggcatcgcagaggcttgaggcaaggggaccccctctccccaatgctctttgtcctggtgatggatgttctcagcagccttttcaaagtggcagaagaaaaagaattattggccagtctggacagtgccattgtgaagtctagattatctctttatgcagatgatgtagtgctgtttgttaagcccagggaggaagatctaaactgtgtcaaactcattcttgactgttttggtgaagcttctggccttgtagctaatttgcacaagagttgtgccatcccaataagatgtgaagtggaattactgcatgaagggtgtaacattctgcaatgcaccccctcttccttcccttgcacttacttggggctgcctatatcagataagaagcttagcaggaatattttgatgaactgggttgtgcgctttgtactttcagccatcccagtttaccttttccttgctatgaatgtccctaagtgggtgattaacaaaattgataaaatcagaaaaggatttgtgtggagagggagaaaagaggttaatggcggcagctgccttgtggcctgggattcagtcacaagacctttgaagtatggtgggcttgggattcctaatttacaacacatgtgttgggctctccaaaccaaatggttgtggcttcaaaaaacagatcagagcagaccttggcatggattgactattcccattcagcaacctgttaaagatctatttgcagcatccctgatttcctatgtgggaaatggctctaataccttattctggacagataagtggcttaatggatgctccatcagagaccttgctccagaagtggcgtccaaggtgtctaaacgagctctcacctcattgacagtgagtcaggctcttatgaacaggcaatggatagctcatatcaaaacccccctttccttgattggaattcaacaatttcttttcttatgggatactttaggggaagtgcagctttctcaggaggaagaccgccatgtttggaggcacgaggcatcagggctgttctcttctaaatcctgctacaaagtccttctctttggttctactgtttttgagccttggaagagattatggaagacctgggctcctcctaaatgcaaattcttcctttggttggcaataaggaacaaatgttggacagccgacatattacagttgaggggaatgccacacccagatgtttgccctatgtgtgatcaggcccaagagacaattcagcacctccttactgcgtgcatttttgcacggcaattttggcacacaattcttgctgctattggcttggggcacctcactccaacagctgatgaagagaattttgcagactggtggggaaaggcaagccacaaggttgtcaagaccagaaaaaaggggcttaactctctgatcatcctggtggcttggtgtctatggcttcagagaaacagagcagttttccatggggagtcaccctcattacccaggattttccggtgtttctcggatgagtacgtttgctgggtaatggcaggagctaaggagtttgggggcttgggctcagttgctgccctgggcgtggtcgggtcgagttccagcaacaatctgtaatctccttagggtttatttgggagagttgctctgcaacttctctattgtaatgtctttttttcctctctaatatataagatgcgcagttctcctgcggtttttcttaaaaaaaaaagttataccaacaaacattacaggcaaaatcaacattggaaatgttctcttcatgtgtggccacacctacagctgatcagctggtggccacacttgcttcctaagaccaggctacctttcaagttaccaaaaattcaattaggtggaagaagtgataagcttgctataataatcttgttgagttattt

SEQ ID NO: 72265 - DNA, 4048 bp, Zea Mays
tttttttctccacgaacaacatgtcagcctcccaaatggccataggaaattctctcaagagaggtcttttcacacagggaaacgaactgacgtggaaatcacctggcgaggttaatttccatgggttaattagcaagtagctactaaactagcccttacatgttggtcaggtacttgagacgagatcttctgcggagcccacttctgatcggttagtttgtaacacgtaaccaagcgtgacgcgctctcactcactcactatggcgtggcgcgagcttgcataaatagtcaccgaatcgaccgcgcaattcttttcttcggatcgaatcgaacgccgacccgagtaaggcgatcgcgcggcggctgaccttccccgccgcccaccgtcgaagacatggacaccgagtaccgcgccttgcagcaggggagcccctcgccgtggcgcacggcggacggcgtgtcgtcgtggggacccgcgcagcaccagaagcgacagcgatgccagggttcttcaagcgatcaagctggttccagctcaagtagttctctgcaaatttcagaacctgaaccacaacaaaaccaagaagaagattactatgtggaggatgattgtgatgcctatgatgaagatgattatgactttgatgaagctgaatttaacctgcaccttgctgataaatttgatgatttggatcttcctccaggcgtggaggctaatgtaccatggctgcaaaaaattccacccaaggaagtagtcaagcagccacctatatcaattactgcagacgagaatgctaataaatatgacaagttcaaacagtttgatactgttcagacattctctgaccatcactatgctaagaattctcatgaagagccaaccagagcctggtcaaagagagttcaacatgactggaaacttttggagaatgatctaccaggcaagaaggcgatttcattttgagagcttctggaccaaaatgccaggctttcatgaggtggtggcaaattcctggaaccagccacttcataattgcgggcatctggagaggatctctctaaagctcaagagactaacaagagcactgcagtcttgggggcacaaaacagtgggcaactttaaataccaactgggcttagcaagggagattttacacagactggaaatggctcaagacagcagggtattatctccagatgaattatggctgctgagaaagctcaagcatcagtgcctggtccttgcttccctggaaagaacggttgcaagactcagatctagagttcagtacctgaaagagggagatgccaacacctctttcttccatttgcaggcctgcttccgcaagaagagaaatcatatcttcagcttactggatgaggaaagagtggtcacatctcatgagcaaaaacaagaggtgctgcataatttctactctaatttgttggggtatgccccccagaggaggttaactttgagattagaagagtgtcacagagctccaattgatttatctgctcttgagcttcccttttcagaagaagaagtttgggatgccattgccagtcttccttcagataaagcgcctgggccagatggatacacagggaaattctataaaacttgttggcctatacttaaggcagatttgatggccgcccttgctgcccttcaccttgggaattctcagaatttgggacctctaaacacagcatatattactttgatccctaagaagacaggagccatgtctgctggtgattacaggcccatcagcctcatccacagctttgcaaaactctccacgaagatccttgctaacaggcttgctcctcttctcaacaagatggtagagactaatcagagtgcttttgttagaggcagatccattcatgacaattatatgttggttcagcactcaattaaatccctgcacaggaaaaaagtggccagcctttttctgaaattagatttaacaaaggcatttgattctgtttcctgggctttccttcttgaggtgttgacccaccttggcttcggtattaagtggaggaatcttgtctccaaccttctggccacttcttcaactctaattttattaaatgggtttccaggggaacagatcaggcatcgcagaggcttgaggcaaggggaccccctctccccaatgctctttgtcctggtgatggatgttctcagcagccttttcaaagtggcagaagaaaaagaattattggccagtctggacagtgccattgtgaagtctagattatctctttatgcagatgatgtagtgctgtttgttaagcccagggaggaagatctaaactgtgtcaaactcattcttgactgttttggtgaagcttctggccttgtagctaatttgcacaagagttgtgccatcccaataagatgtgaagtggaattactgcatgaagggtgtaacattctgcaatgcaccccctcttccttcccttgcacttacttggggctgcctatatcagataagaagcttagcaggaatattttgatgaactgggttgtgcgctttgtactttcagccatcccagtttaccttttccttgctatgaatgtccctaagtgggtgattaacaaaattgataaaatcagaaaaggatttgtgtggagagggagaaaagaggttaatggcggcagctgccttgtggcctgggattcagtcacaagacctttgaagtatggtgggcttgggattcctaatttacaacacatgtgttgggctctccaaaccaaatggttgtggcttcaaaaaacagatcagagcagaccttggcatggattgactattcccattcagcaacctgttaaagatctatttgcagcatccctgatttcctatgtgggaaatggctctaataccttattctggacagataagtggcttaatggatgctccatcagagaccttgctccagaagtggcgtccaaggtgtctaaacgagctctcacctcattgacagtgagtcaggctcttatgaacaggcaatggatagctcatatcaaaacccccctttccttgattggaattcaacaatttcttttcttatgggatactttaggggaagtgcagctttctcaggaggaagaccgccatgtttggaggcacgaggcatcagggctgttctcttctaaatcctgctacaaagtccttctctttggttctactgtttttgagccttggaagagattatggaagacctgggctcctcctaaatgcaaattcttcctttggttggcaataaggaacaaatgttggacagccgacatattacagttgaggggaatgccacacccagatgtttgccctatgtgtgatcaggcccaagagacaattcagcacctccttactgcgtgcatttttgcacggcaattttggcacacaattcttgctgctattggcttggggcacctcactccaacagctgatgaagagaattttgcagactggtggggaaaggcaagccacaaggttgtcaagaccagaaaaaaggggcttaactctctgatcatcctggtggcttggtgtctatggcttcagagaaacagagcagttttccatggggagtcaccctcattacccaggattttccggtgtttctcggatgagtacgtttgctgggtaatggcaggagctaaggagtttgggggcttgggctcagttgctgccctgggcgtggtcgggtcgagttccagcaacaatctgtaatctccttagggtttatttgggagagttgctctgcaacttctctattgtaatgtctttttttcctctctaatatataagatgcgcagttctcctgcggtttttcttaaaaaaaaaagttataccaacaaacattacaggcaaaatcaacattggaaatgttctcttcatgtgtggccacacctacagctgatcagctggtggccacacttgcttcctaagaccaggctacctttcaagttaccaaaaattcaattaggtggaagaagtgataagcttgctataataatcttgttgagttattt

SEQ ID NO: 72266 - DNA, 1542 bp, Zea Mays
atacaactgtgtgtgtgtctgttcatgcaggttcttcaagcgatcaagctggttccagctcaagtagttctctgcaaatttcagaacctgaaccacaacaaaaccaagaagaagattactatgtggaggatgattgtgatgcctatgatgaagatgattatgactttgatgaagctgaatttaacctgcaccttgctgataaatttgatgatttggatcttcctccaggcgtggaggctaatgtaccatggctgcaaaaaattccacccaaggaagtagtcaagcagccacctatatcaattactgcagacgagaatgctaataaatatgacaagttcaaacagtttgatactgttcagacattctctgaccatcactatgctaagaattctcatgaagaggtgagaagctgagctagtatgtgttatatttttttttgcttggtttgggtgcttacctattcttccatgtatatattgtttcagccaaccagagcctggtcaaagagagttcaacatgactggaaacttttggagaatgatctaccagcatatatttacgtccgggttgctgaagatagaatggatcttcttagggctgccattattgggcccaagggaacaccctaccatgatgggcttttcttctttgatgttcacattccctctgcttatccttctggccctccggactatgttatactcgcttcggaggcccccagagaccttgttgctggccactttcgggtgcatgggcacactattctcgcagcatgcaaacactacatggcgggtaatgatattggctcagtagtgccagaggaggaggaagagtcagcatcccgcagtgcaccaaaggcaaagccaggagtgatcaggacaatccctctgaacagacgctacgcaggctcatttgatactagcttgaaggtgctgtacgaagatcttctgatggaattcaatgtgaagggtgctgacacgaggaagttcatgattgagaagttgaagaaggaccaacctgcaggcacctgagaaaagcttggacagcttaagatagtgtttggttgaagagtcaagtagaacgaagccgttctgttccagttttgttgttgtttggttacaaagtaagtagaacgaaatatctccaattagagaatattctcctcagatccggaaccatttcgctccaaaaaatcaaccgaacggagccgctccgttctcatcccgctctcacagtcacgctccattccgttcactctgcaaccaaacacagaacagagcggctccgttccagattaccaaatacagaatagagcggctccgttcctaaaatcagggatggaacggctccgttctacttggctcctcaaccaaacactacctaagaggaagtagaggtagagatgacgagtctctggaagtaaatagtaggaaatggcatatcgttttttttgtgtgaaacccttcatcttttgctgacattatttgtgcttgttgtcgaacagtaataaagaggtcatttatctagtatcaccgtaagcag

SEQ ID NO: 72267 - DNA, 3451 bp, Zea Mays
ccggaagctctctccccggcggtaggggacggagacggagacggagacggagacggagacggagatggtgccgggcccaccccagttgtcgacggaggcagacatggcattatcttattccggtccaccacgaccttcccgacgggccgcggcggcacacatttgatccccccctcccccacatggcaccgcacctcacccctccaccactccctcctcccgtcctcctcccgtctcgccgtcgcctcctgctcctcctcttccgccgccgacgtcgccgctagctgccgcttttcgccgtccggtcacactagcacagccagcagcagcaaggtttcatcccatggacttcgacccctcccccgcctccgcccacggggacggcagcggcggcgcctggcccttcgactcgctcaccacgtccatgctcttctcctccgtctccgcctccccgcagctgccggccagctcctcgtcctggctcaccccgccctcgccgctctggctcttcgaggaccgccacctgctcccgctcgacgccccctccgccgcgccggaggcagccgtcgcagccgccgtcgtcgaggaggtccagcgggcacgctccgggaattctcacactacaggcaagagagttgatcaaatcaatcacaagtggcagtttcatctatctctggacgaagatggcacagataactctagcttcttcaaggagaagcttacacaagcccttcggtacttcaaggagtccacagatcaacatctgttggtccaagtctgggcaccagtcaagaacggagaccgctatgtgcttactacttcaggacagccttttgtgcttgaccaccagagcattggcctacttcagtacagggctgtatccatgatgtacatgttttcagttgatggggaaaatgctggagacctgggcctacctgggcgtgtctacaagcaaaaggtgcctgagtggacaccaaatgtgcagtactatagcagtgataaactatgcctgtgaggtcgataaagtctgcaaagcacttgaggcggtaaatcttaaaagcactgaaatactggaccatccaaatgtccagatatgtaatgaaggccgtcaagcggctctggtcgaaatactagagatcttgactgtagtatgtgaagagcacaagcttcctttggcacaaacctgggttccttgcaagtatagaagtgtattggcacatggtggtggtttaaagaagagttgcttaagtttcgatggaagttgcatgggggaagtctgcatgtcaactagtgatgtggcgtttcatgtgattgatgctcatatgtggggatttagagatgcatgcgtggagcatcacctacagaggggacaaggagtttctggaaaggcatttatctcacacaaaccttgcttttcaaaagatatccgcaagttctgtaagttggcatatcctcttgtacactatgctcgcatgtttgggttgtctggctgctttgcaatatgcttgcaaagttcttataccgggaatgacgactacatattagagttctttttgccactcgattgtattgacgaagatgaccaaaatgccttactggagtctatattaactctgatgaagcggtgtcttcgtagcctaaagctagttgatgacaatgatttgagtggggtttctcttcaccttagtaatgtgctaaaacttgagaatgaagaatccaaaacagatgcacagtttgatggttcccttcgcgaatcacctgaggatgatagacatggaggatcccacaagtttgataatgagaaccagaaagttttggatatcacagagggacaattgttgactgatgactactctcaagacaatggtacttctgttggcagaccaaatggtagtggtgcttctgattcttcattgcttcacaaaaccaacaaaccccctgaaagaagacgtgggaaagctgaaaagactatcagtttagaggttcttcagcaatatttttctggaagcttgaaaaacgcagctaaaagccttggcgtttgtcctacaaccatgaaacgcatctgccggcagcatggaatttctcgttggccatctcggaaaattaataagaagtcgcttgaaaatgatgaccattttgatatagtcatggcccagcaaggatttatagacaataacaatgacgtgcagcttgaagctgacaaagcttctcactcgagaagttcatctggagagggcagcataaattcacgcacttcagaaggctcatgccagggaagtccagcaaaccaaacatttgtttgtaagccaatcgcttcaatgttcgcagaacctcaacttaatcaagaggagttcaacaaagaaccttttcaagaaccacaactaccactttcaaggatgctgattgaagattctggtagctccaaagatttgaagaatctcttcacttcaacatcggaccaaccatttttggcccctcccaacaacttggtgtcaatgaagcattcagggactgtaacgataaaggcgagttttaaggaagatattgtgaggttccgtttcccatgctcaggtggtgttattgtattgaaagaggaggtagcgaagaggctaaggatggatgttggcacgttcgatatcaagtatctcgatgatgaccatgagtgggtaaagttggcgtgcaatgcagacttggaagaatgcatggagatctcgcggctttctggcagccatgtcattaggctactggttagcgatattgcagcacactttggcagttcttgtggaagctctggttgatatgcgtgtcagccttttgctttgatcaatgtagactcgaaagttcagttccacttggtagttttgttgctagttagctttagctgtttcattgtgtttgataaatgtatcattgtattttacccccaaaaaaatacatgtaattgtgcagaacgcacttgtagtcaactttgtatatatcatgtgctggaaattctatttcaagttataaaaactgaatttgttattgtctagaatttgcacagaacagtgttgggttaaaatgattacattgtattggaattgcagcagattttcgtaggtcataattccatgctgtaaacacgtttatacattttatttatatctttgtgatccatgaagttgagacgcatgctggttttaacttattgcggtgatagaattggcaacttcataaagtagtatcacttgcactttactccctccatttctttctattggatgtaatatattaaaaaaaattgaacttcaaagttttgacaaaatggttaaatgtgttaaattagcttcatgcttagtgtctaaaaatcatatcaataaaattcacatatctcacgtcttttaccatggcgttgattttatagaaactgtatatatatatatatattaatgtgttttataaaaaaaagaaa

SEQ ID NO: 72268 - DNA, 2200 bp, Zea Mays
gggccggggcccgaatcaagtttagtcctcgggagccctcgcgtgcgctctcttttcctgtgtctgctgccgacgaaagggcggccgccgccagacctccatcttcgtgaccttcgtaggcggcgagcacccaccaggagaaggcatggcttcacgcatgacaccttccaagaggccttttcagagaagatcttcagactacgatggccggggcaagtggcagaagacgaagcacccttctccacataaatctcagttcaaaatcgagcctggtgttcccattttccgtattctctgcccggcttcaaaatctggtaatgtgattggcaaaggaggtgccattattgcaaagatacgtcaagaaaccaggatgagaatcagggttgatagggcagcccccggctgtgacgagagagtcatcttcataactgctgccaacaaggatgaagaagctggcagcgagcaaggcggagagaatgacggaggtgctgctgcttctactggtggtgaccatgagaaggataaagataacaacagcaaggagcaaaacgttgatccagaggagaacaactgcaacgagcagaatgatgattcagagaaaggaagtggtaaggaagaaatagatggtttcgagaaagaccatggtacggaagaaaagaatgattcagagaaagaacacaataagggagaaaaggatgatcccttggttgcgaaagttacaaagttagaaccagagagggtaataccgttggcactgaaggccgtttcacttgtattcgataggatttttgcaactgaaggtaataatgaaactgggaacgcatctgctgcaagcgctcctgtttcgttgcgaatgttggtgctatacagccaagcaggttggctcctggggaagggcggtagtgtggttaagcaaatggcagcagataacggctgtgaaatccgtgttttgaaagacaaccttccgtcatgtgctctgttgaatgacaaactttgccagatcactggagagattgactcagtaaggaaaggtctcaatgctgtatctgaagtgctcttagctcatccacccaaggaaactgatgcagttgctgatgttcattcttctggatcatcgtcacgttctttgttcagccagcctgatggtcttccctctggaatgcaatctaacttccatatacctttgcaaggcccgccatcccaagccaatggaccttttgatatagttgatcttcaacctccaatacatggtcatgcctcagtggctatagaatccctctcctttaggatgctgtgtccacaagacaaggttggcagtataataggcaagggtggaaatattgttaaaaccattcaaaatgatacaggctgtgaaattaaagttcttgacactgttccaaaaacagatgatcgcatcataagtatatctggacctgcgcatccgagtgatggaatctcccctgcacagaatgccattctgcatgtgcagcgtaaaattatgttacctagctctgataagaaggaaggtcctgcaacgtgtaggctgatcgtttctggaaaccaagttggttgtgttctcggcaagggtggtagtatcatagctgaaatgaggaagctgtcaggagcatttatagtagtgttgagcaaagacaagattccaaggggtgtcccagagcatgatgaagttatccagataaacggaagttgtgaagctattcaagaagctctaatgcagatccccagtttggtccattttcgggaaaccatgaatcatcatccctgtttcataaagatttcatgggacgaccattggatgggattgctgctccttggacagtgaagggcatgcgggatctcagcgatccagtgtcaatatccgatatccctggagcagggcatagagaagctggtggatttccaggtcctggtcagccatctatgatgccaaacttgactgcagaggtcttggttccaagattagttatccctgttctctgcggtgaggatggaggttgtttggacaggatccgtgagttttctgaagctaagataactgtcgctgagcctacagccgatgcgatggacactgctgttttgatatctggcacaccagagcagatgcatgcagcccgaagtctcgttgaagcattcgttatgagcgaatcttttggcccatgacatgtccagagctgatggtagg

SEQ ID NO: 72269 - DNA, 2659 bp, Zea Mays
gggccggggcccgaatcaagtttagtcctcgggagccctcgcgtgcgctctcttttcctgtgtctgctgccgacgaaagggcggccgccgccagacctccatcttcgtgaccttcgtaggcggcgagcacccaccaggagaaggcatggcttcacgcatgacaccttccaagaggccttttcagagaagatcttcagactacgatggccggggcaagtggcagaagacgaagcacccttctccacataaatctcagttcaaaatcgagcctggtgttcccattttccgtattctctgcccggcttcaaaatctggtaatgtgattggcaaaggaggtgccattattgcaaagatacgtcaagaaaccaggatgagaatcagggttgatagggcagcccccggctgtgacgagagagtcatcttcataactgctgccaacaaggatgaagaagctggcagcgagcaaggcggagagaatgacggaggtgctgctgcttctactggtggtgaccatgagaaggataaagataacaacagcaaggagcaaaacgttgatccagaggagaacaactgcaacgagcagaatgatgattcagagaaaggaagtggtaaggaagaaatagatggtttcgagaaagaccatggtacggaagaaaagaatgattcagagaaagaacacaataagggagaaaaggatgatcccttggttgcgaaagttacaaagttagaaccagagagggtaataccgttggcactgaaggccgtttcacttgtattcgataggatttttgcaactgaaggtaataatgaaactgggaacgcatctgctgcaagcgctcctgtttcgttgcgaatgttggtgctatacagccaagcaggttggctcctggggaagggcggtagtgtggttaagcaaatggcagcagataacggctgtgaaatccgtgttttgaaagacaaccttccgtcatgtgctctgttgaatgacaaactttgccagatcactggagagattgactcagtaaggaaaggtctcaatgctgtatctgaagtgctcttagctcatccacccaaggaaactgatgcagttgctgatgttcattcttctggatcatcgtcacgttctttgttcagccagcctgatggtcttccctctggaatgcaatctaacttccatatacctttgcaaggcccgccatcccaagccaatggaccttttgatatagttgatcttcaacctccaatacatggtcatgcctcagtggctatagaatccctctcctttaggatgctgtgtccacaagacaaggttggcagtataataggcaagggtggaaatattgttaaaaccattcaaaatgatacaggctgtgaaattaaagttcttgacactgttccaaaaacagatgatcgcatcataagtatatctggacctgcgcatccgagtgatggaatctcccctgcacagaatgccattctgcatgtgcagcgtaaaattatgttacctagctctgataagaaggaaggtcctgcaacgtgtaggctgatcgtttctggaaaccaagttggttgtgttctcggcaagggtggtagtatcatagctgaaatgaggaagctgtcaggagcatttatagtagtgttgagcaaagacaagattccaaggggtgtcccagagcatgatgaagttatccagataaacggaagttgtgaagctattcaagaagctctaatgcagatccccagtttggtccattttcgggaaaccatgaatcatcatccctgtttcataaagatttcatgggacgaccattggatgggattgctgctccttggacagtgaagggcatgcgggatctcagcgatccagtgtcaatatccgatatccctggagcagggcatagagaagctggtggatttccaggtcctggtcagccatctatgatgccaaacttgactgcagaggtcttggttccaagattagttatccctgttctctgcggtgaggatggaggttgtttggacaggatccgtgagttttctgaagctaagataactgtcgctgagcctacagccgatgcgatggacactgctgttttgatatctggcacaccagagcagatgcatgcagcccgaagtctcgttgaagcattcgttatgagcgaatcttttggcccatgacatgtccagagtgaagctagcgatcatatgtgggttcatgtttgtgaatatgcgtcccagtctgtctgcagagtgacatatgctccaagtggctaattaggctgaatattcgactggagtcctctttctgtctgcagagtggcaaatgctccaggttgctagttatatataatcttccaaagtcgtcactttgactctgagatacggagcacattttgagtagccgcagaactatgttgcttatgcaaggaagtattgtttggacccggaaaggctctaactttatttttgttgtactgatgttgtgagatgtaccaccattgtctgtatttcagtccggctttatatctgtattttatggtattgctaccatagttaatatgacggtaaggcagcgaaaaggcgtaagccggggaatattaaatagtagaaatctttatctttatatatactaatataatgaagcagatgcaaactccct

SEQ ID NO: 72270 - DNA, 2706 bp, Zea Mays
gggccggggcccgaatcaagtttagtcctcgggagccctcgcgtgcgctctcttttcctgtgtctgctgccgacgaaagggcggccgccgccagacctccatcttcgtgaccttcgtaggcggcgagcacccaccaggagaaggcatggcttcacgcatgacaccttccaagaggccttttcagagaagatcttcagactacgatggccggggcaagtggcagaagacgaagcacccttctccacataaatctcagttcaaaatcgagcctggtgttcccattttccgtattctctgcccggcttcaaaatctggtaatgtgattggcaaaggaggtgccattattgcaaagatacgtcaagaaaccaggatgagaatcagggttgatagggcagcccccggctgtgacgagagagtcatcttcataactgctgccaacaaggatgaagaagctggcagcgagcaaggcggagagaatgacggaggtgctgctgcttctactggtggtgaccatgagaaggataaagataacaacagcaaggagcaaaacgttgatccagaggagaacaactgcaacgagcagaatgatgattcagagaaaggaagtggtaaggaagaaatagatggtttcgagaaagaccatggtacggaagaaaagaatgattcagagaaagaacacaataagggagaaaaggatgatcccttggttgcgaaagttacaaagttagaaccagagagggtaataccgttggcactgaaggccgtttcacttgtattcgataggatttttgcaactgaaggtaataatgaaactgggaacgcatctgctgcaagcgctcctgtttcgttgcgaatgttggtgctatacagccaagcaggttggctcctggggaagggcggtagtgtggttaagcaaatggcagcagataacggctgtgaaatccgtgttttgaaagacaaccttccgtcatgtgctctgttgaatgacaaactttgccagatcactggagagattgactcagtaaggaaaggtctcaatgctgtatctgaagtgctcttagctcatccacccaaggaaactgatgcagttgctgatgttcattcttctggatcatcgtcacgttctttgttcagccagcctgatggtcttccctctggaatgcaatctaacttccatatacctttgcaaggcccgccatcccaagccaatggaccttttgatatagttgatcttcaacctccaatacatggtcatgcctcagtggctatagaatccctctcctttaggatgctgtgtccacaagacaaggttggcagtataataggcaagggtggaaatattgttaaaaccattcaaaatgatacaggctgtgaaattaaagttcttgacactgttccaaaaacagatgatcgcatcataagtatatctggacctgcgcatccgagtgatggaatctcccctgcacagaatgccattctgcatgtgcagcgtaaaattatgttacctagctctgataagaaggaaggtcctgcaacgtgtaggctgatcgtttctggaaaccaagttggttgtgttctcggcaagggtggtagtatcatagctgaaatgaggaagctgtcaggagcatttatagtagtgttgagcaaagacaagattccaaggggtgtcccagagcatgatgaagttatccaggttacagctaggcttcgtaaccatcttttccgggacagaatgcctgcagtggggcctaatatgcggccaccttttggtttgttagatccccagtttggtccattttcgggaaaccatgaatcatcatccctgtttcataaagatttcatgggacgaccattggatgggattgctgctccttggacagtgaagggcatgcgggatctcagcgatccagtgtcaatatccgatatccctggagcagggcatagagaagctggtggatttccaggtcctggtcagccatctatgatgccaaacttgactgcagaggtcttggttccaagattagttatccctgttctctgcggtgaggatggaggttgtttggacaggatccgtgagttttctgaagctaagataactgtcgctgagcctacagccgatgcgatggacactgctgttttgatatctggcacaccagagcagatgcatgcagcccgaagtctcgttgaagcattcgttatgagcgaatcttttggcccatgacatgtccagaggcagtgaagctagcgatcatatgtgggttcatgtttgtgaatatgcgtcccagtctgtctgcagagtgacatatgctccaagtggctaattaggctgaatattcgactggagtcctctttctgtctgcagagtggcaaatgctccaggttgctagttatatataatcttccaaagtcgtcactttgactctgagatacggagcacattttgagtagccgcagaactatgttgcttatgcaaggaagtattgtttggacccggaaaggctctaactttatttttgttgtactgatgttgtgagatgtaccaccattgtctgtatttcagtccggctttatatctgtattttatggtattgctaccatagttaatatgacggtaaggcagcgaaaaggcgtaagccggggaatattaaatagtagaaatctttatctttatatatactaatataatgaagcagatgcaaactccct

SEQ ID NO: 72271 - DNA, 2742 bp, Zea Mays
gggccggggcccgaatcaagtttagtcctcgggagccctcgcgtgcgctctcttttcctgtgtctgctgccgacgaaagggcggccgccgccagacctccatcttcgtgaccttcgtaggcggcgagcacccaccaggcatggcttcacgcatgacaccttccaagaggccttttcagagaagatcttcagactacgatggccggggcaagtggcagaagacgaagcacccttctccacataaatctcagttcaaaatcgagcctggtgttcccattttccgtattctctgcccggcttcaaaatctggtaatgtgattggcaaaggaggtgccattattgcaaagatacgtcaagaaaccaggatgagaatcagggttgatagggcagcccccggctgtgacgagagagtcatcttcataactgctgccaacaaggatgaagaagctggcagcgagcaaggcggagagaatgacggaggtgctgctgcttctactggtggtgaccatgagaaggataaagataacaacagcaaggagcaaaacgttgatccagaggagaacaactgcaacgagcagaatgatgattcagagaaaggaagtggtaaggaagaaatagatggtttcgagaaagaccatggtacggaagaaaagaatgattcagagaaagaacacaataagggagaaaaggatgatcccttggttgcgaaagttacaaagttagaaccagagagggtaataccgttggcactgaaggccgtttcacttgtattcgataggatttttgcaactgaaggtaataatgaaactgggaacgcatctgctgcaagcgctcctgtttcgttgcgaatgttggtgctatacagccaagcaggttggctcctggggaagggcggtagtgtggttaagcaaatggcagcagataacggctgtgaaatccgtgttttgaaagacaaccttccgtcatgtgctctgttgaatgacaaactttgccagatcactggagagattgactcagtaaggaaaggtctcaatgctgtatctgaagtgctcttagctcatccacccaaggaaactgatgcagttgctgatgttcattcttctggatcatcgtcacgttctttgttcagccagcctgatggtcttccctctggaatgcaatctaacttccatatacctttgcaaggcccgccatcccaagccaatggaccttttgatatagttgatcttcaacctccaatacatggtcatgcctcagtggctatagaatccctctcctttaggatgctgtgtccacaagacaaggttggcagtataataggcaagggtggaaatattgttaaaaccattcaaaatgatacaggctgtgaaattaaagttcttgacactgttccaaaaacagatgatcgcatcataagtatatctggacctgcgcatccgagtgatggaatctcccctgcacagaatgccattctgcatgtgcagcgtaaaattatgttacctagctctgataagaaggaaggtcctgcaacgtgtaggctgatcgtttctggaaaccaagttggttgtgttctcggcaagggtggtagtatcatagctgaaatgaggaagctgtcaggagcatttatagtagtgttgagcaaagacaagattccaaggggtgtcccagagcatgatgaagttatccagataaacggaagttgtgaagctattcaagaagctctaatgcaggttacagctaggcttcgtaaccatcttttccgggacagaatgcctgcagtggggcctaatatgcggccaccttttggtttgttagatccccagtttggtccattttcgggaaaccatgaatcatcatccctgtttcataaagatttcatgggacgaccattggatgggattgctgctccttggacagtgaagggcatgcgggatctcagcgatccagtgtcaatatccgatatccctggagcagggcatagagaagctggtggatttccaggtcctggtcagccatctatgatgccaaacttgactgcagaggtcttggttccaagattagttatccctgttctctgcggtgaggatggaggttgtttggacaggatccgtgagttttctgaagctaagataactgtcgctgagcctacagccgatgcgatggacactgctgttttgatatctggcacaccagagcagatgcatgcagcccgaagtctcgttgaagcattcgttatgagcgaatcttttggcccatgacatgtccagaggcagtgaagctagcgatcatatgtgggttcatgtttgtgaatatgcgtcccagtctgtctgcagagtgacatatgctccaagtggctaattaggctgaatattcgactggagtcctctttctgtctgcagagtggcaaatgctccaggttgctagttatatataatcttccaaagtcgtcactttgactctgagatacggagcacattttgagtagccgcagaactatgttgcttatgcaaggaagtattgtttggacccggaaaggctctaactttatttttgttgtactgatgttgtgagatgtaccaccattgtctgtatttcagtccggctttatatctgtattttatggtattgctaccatagttaatatgacggtaaggcagcgaaaaggcgtaagccggggaatattaaatagtagaaatctttatctttatatatactaatataatgaagcagatgcaaactccct

SEQ ID NO: 72272 - DNA, 2738 bp, Zea Mays
gggccggggcccgaatcaagtttagtcctcgggagccctcgcgtgcgctctcttttcctgtgtctgctgccgacgaaagggcggccgccgccagacctccatcttcgtgaccttcgtaggcggcgagcacccaccaggcatggcttcacgcatgacaccttccaagaggccttttcagagaagatcttcagactacgatggccggggcaagtggcagaagacgaagcacccttctccacataaatctcagttcaaaatcgagcctggtgttcccattttccgtattctctgcccggcttcaaaatctggtaatgtgattggcaaaggaggtgccattattgcaaagatacgtcaagaaaccaggatgagaatcagggttgatagggcagcccccggctgtgacgagagagtcatcttcataactgctgccaacaaggatgaagaagctggcagcgagcaaggcggagagaatgacggaggtgctgctgcttctactggtggtgaccatgagaaggataaagataacaacagcaaggagcaaaacgttgatccagaggagaacaactgcaacgagcagaatgatgattcagagaaaggaagtggtaaggaagaaatagatggtttcgagaaagaccatggtacggaagaaaagaatgattcagagaaagaacacaataagggagaaaaggatgatcccttggttgcgaaagttacaaagttagaaccagagagggtaataccgttggcactgaaggccgtttcacttgtattcgataggatttttgcaactgaaggtaataatgaaactgggaacgcatctgctgcaagcgctcctgtttcgttgcgaatgttggtgctatacagccaagcaggttggctcctggggaagggcggtagtgtggttaagcaaatggcagcagataacggctgtgaaatccgtgttttgaaagacaaccttccgtcatgtgctctgttgaatgacaaactttgccagatcactggagagattgactcagtaaggaaaggtctcaatgctgtatctgaagtgctcttagctcatccacccaaggaaactgatgcagttgctgatgttcattcttctggatcatcgtcacgttctttgttcagccagcctgatggtcttccctctggaatgcaatctaacttccatatacctttgcaaggcccgccatcccaagccaatggaccttttgatatagttgatcttcaacctccaatacatggtcatgcctcagtggctatagaatccctctcctttaggatgctgtgtccacaagacaaggttggcagtataataggcaagggtggaaatattgttaaaaccattcaaaatgatacaggctgtgaaattaaagttcttgacactgttccaaaaacagatgatcgcatcataagtatatctggacctgcgcatccgagtgatggaatctcccctgcacagaatgccattctgcatgtgcagcgtaaaattatgttacctagctctgataagaaggaaggtcctgcaacgtgtaggctgatcgtttctggaaaccaagttggttgtgttctcggcaagggtggtagtatcatagctgaaatgaggaagctgtcaggagcatttatagtagtgttgagcaaagacaagattccaaggggtgtcccagagcatgatgaagttatccagataaacggaagttgtgaagctattcaagaagctctaatgcaggttacagctaggcttcgtaaccatcttttccgggacagaatgcctgcagtggggcctaatatgcggccaccttttggtttgttagatccccagtttggtccattttcgggaaaccatgaatcatcatccctgtttcataaagatttcatgggacgaccattggatgggattgctgctccttggacagtgaagggcatgcgggatctcagcgatccagtgtcaatatccgatatccctggagcagggcatagagaagctggtggatttccaggtcctggtcagccatctatgatgccaaacttgactgcagaggtcttggttccaagattagttatccctgttctctgcggtgaggatggaggttgtttggacaggatccgtgagttttctgaagctaagataactgtcgctgagcctacagccgatgcgatggacactgctgttttgatatctggcacaccagagcagatgcatgcagcccgaagtctcgttgaagcattcgttatgagcgaatcttttggcccatgacatgtccagagtgaagctagcgatcatatgtgggttcatgtttgtgaatatgcgtcccagtctgtctgcagagtgacatatgctccaagtggctaattaggctgaatattcgactggagtcctctttctgtctgcagagtggcaaatgctccaggttgctagttatatataatcttccaaagtcgtcactttgactctgagatacggagcacattttgagtagccgcagaactatgttgcttatgcaaggaagtattgtttggacccggaaaggctctaactttatttttgttgtactgatgttgtgagatgtaccaccattgtctgtatttcagtccggctttatatctgtattttatggtattgctaccatagttaatatgacggtaaggcagcgaaaaggcgtaagccggggaatattaaatagtagaaatctttatctttatatatactaatataatgaagcagatgcaaactccct

SEQ ID NO: 72273 - DNA, 2663 bp, Zea Mays
gggccggggcccgaatcaagtttagtcctcgggagccctcgcgtgcgctctcttttcctgtgtctgctgccgacgaaagggcggccgccgccagacctccatcttcgtgaccttcgtaggcggcgagcacccaccaggagaaggcatggcttcacgcatgacaccttccaagaggccttttcagagaagatcttcagactacgatggccggggcaagtggcagaagacgaagcacccttctccacataaatctcagttcaaaatcgagcctggtgttcccattttccgtattctctgcccggcttcaaaatctggtaatgtgattggcaaaggaggtgccattattgcaaagatacgtcaagaaaccaggatgagaatcagggttgatagggcagcccccggctgtgacgagagagtcatcttcataactgctgccaacaaggatgaagaagctggcagcgagcaaggcggagagaatgacggaggtgctgctgcttctactggtggtgaccatgagaaggataaagataacaacagcaaggagcaaaacgttgatccagaggagaacaactgcaacgagcagaatgatgattcagagaaaggaagtggtaaggaagaaatagatggtttcgagaaagaccatggtacggaagaaaagaatgattcagagaaagaacacaataagggagaaaaggatgatcccttggttgcgaaagttacaaagttagaaccagagagggtaataccgttggcactgaaggccgtttcacttgtattcgataggatttttgcaactgaaggtaataatgaaactgggaacgcatctgctgcaagcgctcctgtttcgttgcgaatgttggtgctatacagccaagcaggttggctcctggggaagggcggtagtgtggttaagcaaatggcagcagataacggctgtgaaatccgtgttttgaaagacaaccttccgtcatgtgctctgttgaatgacaaactttgccagatcactggagagattgactcagtaaggaaaggtctcaatgctgtatctgaagtgctcttagctcatccacccaaggaaactgatgcagttgctgatgttcattcttctggatcatcgtcacgttctttgttcagccagcctgatggtcttccctctggaatgcaatctaacttccatatacctttgcaaggcccgccatcccaagccaatggaccttttgatatagttgatcttcaacctccaatacatggtcatgcctcagtggctatagaatccctctcctttaggatgctgtgtccacaagacaaggttggcagtataataggcaagggtggaaatattgttaaaaccattcaaaatgatacaggctgtgaaattaaagttcttgacactgttccaaaaacagatgatcgcatcataagtatatctggacctgcgcatccgagtgatggaatctcccctgcacagaatgccattctgcatgtgcagcgtaaaattatgttacctagctctgataagaaggaaggtcctgcaacgtgtaggctgatcgtttctggaaaccaagttggttgtgttctcggcaagggtggtagtatcatagctgaaatgaggaagctgtcaggagcatttatagtagtgttgagcaaagacaagattccaaggggtgtcccagagcatgatgaagttatccagataaacggaagttgtgaagctattcaagaagctctaatgcagatccccagtttggtccattttcgggaaaccatgaatcatcatccctgtttcataaagatttcatgggacgaccattggatgggattgctgctccttggacagtgaagggcatgcgggatctcagcgatccagtgtcaatatccgatatccctggagcagggcatagagaagctggtggatttccaggtcctggtcagccatctatgatgccaaacttgactgcagaggtcttggttccaagattagttatccctgttctctgcggtgaggatggaggttgtttggacaggatccgtgagttttctgaagctaagataactgtcgctgagcctacagccgatgcgatggacactgctgttttgatatctggcacaccagagcagatgcatgcagcccgaagtctcgttgaagcattcgttatgagcgaatcttttggcccatgacatgtccagaggcagtgaagctagcgatcatatgtgggttcatgtttgtgaatatgcgtcccagtctgtctgcagagtgacatatgctccaagtggctaattaggctgaatattcgactggagtcctctttctgtctgcagagtggcaaatgctccaggttgctagttatatataatcttccaaagtcgtcactttgactctgagatacggagcacattttgagtagccgcagaactatgttgcttatgcaaggaagtattgtttggacccggaaaggctctaactttatttttgttgtactgatgttgtgagatgtaccaccattgtctgtatttcagtccggctttatatctgtattttatggtattgctaccatagttaatatgacggtaaggcagcgaaaaggcgtaagccggggaatattaaatagtagaaatctttatctttatatatactaatataatgaagcagatgcaaactccct

SEQ ID NO: 72274 - DNA, 2737 bp, Zea Mays
atttctcgtgtgcgaaaccgagcacccaaaccctaaccctagccttgtatcccgtccttcctgctgtgcgaacacgagcacccaaaccctagctatctgtattcgaatctgatcttacccaatcccaagtgagaaggcatggcttcacgcatgacaccttccaagaggccttttcagagaagatcttcagactacgatggccggggcaagtggcagaagacgaagcacccttctccacataaatctcagttcaaaatcgagcctggtgttcccattttccgtattctctgcccggcttcaaaatctggtaatgtgattggcaaaggaggtgccattattgcaaagatacgtcaagaaaccaggatgagaatcagggttgatagggcagcccccggctgtgacgagagagtcatcttcataactgctgccaacaaggatgaagaagctggcagcgagcaaggcggagagaatgacggaggtgctgctgcttctactggtggtgaccatgagaaggataaagataacaacagcaaggagcaaaacgttgatccagaggagaacaactgcaacgagcagaatgatgattcagagaaaggaagtggtaaggaagaaatagatggtttcgagaaagaccatggtacggaagaaaagaatgattcagagaaagaacacaataagggagaaaaggatgatcccttggttgcgaaagttacaaagttagaaccagagagggtaataccgttggcactgaaggccgtttcacttgtattcgataggatttttgcaactgaaggtaataatgaaactgggaacgcatctgctgcaagcgctcctgtttcgttgcgaatgttggtgctatacagccaagcaggttggctcctggggaagggcggtagtgtggttaagcaaatggcagcagataacggctgtgaaatccgtgttttgaaagacaaccttccgtcatgtgctctgttgaatgacaaactttgccagatcactggagagattgactcagtaaggaaaggtctcaatgctgtatctgaagtgctcttagctcatccacccaaggaaactgatgcagttgctgatgttcattcttctggatcatcgtcacgttctttgttcagccagcctgatggtcttccctctggaatgcaatctaacttccatatacctttgcaaggcccgccatcccaagccaatggaccttttgatatagttgatcttcaacctccaatacatggtcatgcctcagtggctatagaatccctctcctttaggatgctgtgtccacaagacaaggttggcagtataataggcaagggtggaaatattgttaaaaccattcaaaatgatacaggctgtgaaattaaagttcttgacactgttccaaaaacagatgatcgcatcataagtatatctggacctgcgcatccgagtgatggaatctcccctgcacagaatgccattctgcatgtgcagcgtaaaattatgttacctagctctgataagaaggaaggtcctgcaacgtgtaggctgatcgtttctggaaaccaagttggttgtgttctcggcaagggtggtagtatcatagctgaaatgaggaagctgtcaggagcatttatagtagtgttgagcaaagacaagattccaaggggtgtcccagagcatgatgaagttatccagataaacggaagttgtgaagctattcaagaagctctaatgcaggttacagctaggcttcgtaaccatcttttccgggacagaatgcctgcagtggggcctaatatgcggccaccttttggtttgttagatccccagtttggtccattttcgggaaaccatgaatcatcatccctgtttcataaagatttcatgggacgaccattggatgggattgctgctccttggacagtgaagggcatgcgggatctcagcgatccagtgtcaatatccgatatccctggagcagggcatagagaagctggtggatttccaggtcctggtcagccatctatgatgccaaacttgactgcagaggtcttggttccaagattagttatccctgttctctgcggtgaggatggaggttgtttggacaggatccgtgagttttctgaagctaagataactgtcgctgagcctacagccgatgcgatggacactgctgttttgatatctggcacaccagagcagatgcatgcagcccgaagtctcgttgaagcattcgttatgagcgaatcttttggcccatgacatgtccagagtgaagctagcgatcatatgtgggttcatgtttgtgaatatgcgtcccagtctgtctgcagagtgacatatgctccaagtggctaattaggctgaatattcgactggagtcctctttctgtctgcagagtggcaaatgctccaggttgctagttatatataatcttccaaagtcgtcactttgactctgagatacggagcacattttgagtagccgcagaactatgttgcttatgcaaggaagtattgtttggacccggaaaggctctaactttatttttgttgtactgatgttgtgagatgtaccaccattgtctgtatttcagtccggctttatatctgtattttatggtattgctaccatagttaatatgacggtaaggcagcgaaaaggcgtaagccggggaatattaaatagtagaaatctttatctttatatatactaatataatgaagcagatgcaaactccct

SEQ ID NO: 72275 - DNA, 2189 bp, Zea Mays
caggtatcctgcaacaacaaacagcaaaatatcgcactaataagcaagcaagcaagcaagcaaattccttgtagtttgttttttttccctaaaagaagaagatcaggtccaggtactacatgctgctcttatatcgatcagattactcaaggattgcgctatgcagattactgcaggaaaattatttccagtggatggaatatgctgcaagtgcaaggttgcaagctgttcaatcaccatcctatatacactaaaaataataatcacaataaaaacagaggaggaatgaggatcaccttttttttttacttgagcaaactttgctgaacaatcaccatcctatatacactaaaaataataatccagaacctatacgcatttccggtcaacacttggcttgagcgagctggttggcatgaactacaagataaaagtagtggtacgagcaatccaatcaaggtgctcccactgtttcaacctataaagtgaagtatatgtaacccagacaatcaaatagttgatatacagacagaactttctacatatcccttcaccaccttgccagaaaagcctttggaatggcaaatcctttattacccagacaaaccgaactaagcacacacaatcaaaaagacgtagaaacaagaaacaggtcttcaacccggccagaaggcacttcgcagttctatcattttttaatcgttttattactttattttaggtcaaggtatataagtgttttgatgattaacggcaacataagattattgtgactaacgtgtgttttgcagaggcttagatcacaacgatggagattggtttgagcaatccatggtcttcatgcccctccttatgaatttcgttgtggtttttaaaggatgaaagataagaataagaatggactagttttaagtgtcgatgggagttgagagacatttagagtactttaagacgttgttatttcctttaaccgtactataaaagagggtgtgaacgagtagctagacctagagaagtctagtgagttctatgtggcttaggagagacccacgacaagtacggaccaacccaattccaaatattcaattaccagctgtgtgtttgctagggatttctggtacaggatcttctcagagcttaaactcgaaccgggggttttcgaatgaaaacgaaacaaaattggcccggcccacgacattgggggcaatccaggctcagcccaactactctctcgtcctcttgttccactgtttcccaccccaaaatactccaccaccgcacccactagggtttccgcaccgcattgcagaacctcgccgcctccacccgcaccacaccaccggcgatgtccacagcggcggcgcagggcggcagcgacaagccggcgctccggaggcccgtcttcaccaaggtcgaccagctcaggccgggcaccaacgggcacaccctcaccgtcaaggtcgtcagcgccacccccgtgcctgggcgcgcgcgcccaggcgcacccgccgccgccccatcccgcgcgccgcgcatcgccgagtgcctcgtcggggacgagaccggcgccatcgtcttcaccgcccgcaacgaccaagttgacttgctgaagcccaatgcgacagtgatcttgcgcaatgccaaaatagacatgttcaaaggatcaatgaggcttgcagtggacaagtgggggcggattgaggctgtagagccagccagtttcacggtgaaggaagacaacaacctgtctctaatagagtatgaattggttaatgtggctgagtaactgtccaatccaagcgtttctgccccctttatttcgtgccataagaaggaagtaccatgaatgaacattataaagcctcttgaagcgaagcgagtttatttgctacggtggggtagataaaggtcaaggctgtatggcctgtgttagaactttggataaattaagatgaattgcccttgcatctatgagattgttatccatctttgtactgctcgtgttgctttgatgcaagaaatctgaagcaggaaatgcgtacccagtgctctggacactggcgtctgttgtaattgtgtggctaccccaaaagtgtgcaattaatatctttcgacggggtgtgatttagtactgatttaaactggttttttggtatcaacaatcacaaacggaatgtcgtttggccaag

SEQ ID NO: 72276 - DNA, 829 bp, Zea Mays
cacgggcacggcaccgacaagccggcgctccggaggcccgtcttcaccaaggtcgaccagctcaggccgggcaccaacgggcacaccctcaccgtcaaggtcgtcagcgccacccccgtgcctgggcgcgcgcgcccaggcgcacccgccgccgccccatcccgcgcgccgcgcatcgccgagtgcctcgtcggggacgagaccggcgccatcgtcttcaccgcccgcaacgaccaagttgacttgctgaagcccaatgcgacagtgatcttgcgcaatgccaaaatagacatgttcaaaggatcaatgaggcttgcagtggacaagtgggggcggattgaggctgtagagccagccagtttcacggtgaaggaagacaacaacctgtctctaatagagtatgaattggttaatgtggctgagtaactgtccaatccaagcgtttctgccccctttatttcgtgccataagaaggaagtaccatgaatgaacattataaagcctcttgaagcgaagcgagtttatttgctacggtggggtagataaaggtcaaggctgtatggcctgtgttagaactttggataaattaagatgaattgcccttgcatctatgagattgttatccatctttgtactgctcgtgttgctttgatgcaagaaatctgaagcaggaaatgcgtacccagtgctctggacactggcgtctgttgtaattgtgtggctaccccaaaagtgtgcaattaatatctttcgacggggtgtgatttagtactgatttaaactggttttttggtatcaacaatcacaaacggaatgtcgtttggccaag

SEQ ID NO: 72277 - DNA, 635 bp, Zea Mays
cgactgtgatctgactgcaaaacgattctgcggaggaagatgagttgacttgctgaagcccaatgcgacagtgatcttgcgcaatgccaaaatagacatgttcaaaggatcaatgaggcttgcagtggacaagtgggggcggattgaggctgtagagccagccagtttcacggtgaaggaagacaacaacctgtctctaatagagtatgaattggttaatgtggctgagtaactgtccaatccaagcgtttctgccccctttatttcgtgccataagaaggaagtaccatgaatgaacattataaagcctcttgaagcgaagcgagtttatttgctacggtggggtagataaaggtcaaggctgtatggcctgtgttagaactttggataaattaagatgaattgcccttgcatctatgagattgttatccatctttgtactgctcgtgttgctttgatgcaagaaatctgaagcaggaaatgcgtacccagtgctctggacactggcgtctgttgtaattgtgtggctaccccaaaagtgtgcaattaatatctttcgacggggtgtgatttagtactgatttaaactggttttttggtatcaacaatcacaaacggaatgtcgtttggccaag

SEQ ID NO: 72278 - DNA, 901 bp, Zea Mays
ctctcgcccaccacactccactcgcaatgtatgacatggacatcgccgcccactccatcgcctaatcatcctatcgtcgtgctccgccgcgccctgcaggtgcttctcatccgccgcgtcctgcagcaatcttgtcctttcttggtgatatcggtacgcgcaagaattatcatctacccaccatctatccgaggaggtaattgcattttgccttccctacaaatttgcgtagaaatcaatttgttccatatgagaattatggtccttctgcaatgttctatatgtcttccctactaatttaattacctacaatattgcaaatggatcttctatcatgtttcatatgtctttccctactaattcaattgcctacaaactatggcttagctcacagagaccatctgccatgtgtttattgaacattctacttgctcccttgacctcttttggtcataccatagggtggtttttgtactggtcctcttggaccttaaattcccctcttcttattacaaagatgcgcagctctcctgcgtttttcgagggagaaaaaatggttcatgacggcttctctgtacgttatttgccttccctactaatacaactgcctataaatttgcatagaaattaatttatttaatatgcaaatagttcttgcaatgactaggactactcttactaatttattatgttctggagaacaccaaaccacataagctaaggattagctcacagagatcttcagtcatgtgtttattgaaccttctacttactcacctgacttctctttgccatactgacccatcgtgtcttgtaaaaataagtttacagcctaccaaaaaatatgttcatatcatgtagatgcataatgcagtattttcatctgtgaatttgagaacgc

SEQ ID NO: 72279 - DNA, 1633 bp, Zea Mays
accgaacgcgcttcaaatcaagggttcctgttcttcgaccgaacgcgcttcaaatcaagcaatcttgtcctttcttggtgatatcggtacgcgcaagaattatcatctacccaccatctatccgaggagctgccatcctggtcgccggagtggcgtggttctactggcggtaccggagcttcagcaaatcgaagctgcgcgtggaccgctcgaaatggacattgacgtctttccacaagctctcattcagcgagtacgagatccttgattgcctggacgaggacaacgtgattggcagcggcgcgtccgggaaggtgtacaaggccgtgctgagcaacggcgaggtggtggcggtgaagaagctgtggagcacggcggtgaagaaggaggagggctctgcatctgcatctgctgccgacaacagctttgaggcggaggtgaggacgctgggcaagattcggcacaagaacatcgtgaagctgtggtgctgctgcagctgccgggactgcaagctgctggtgtatgagtacatggcgaacggcagcctgggggacgtgctgcacagcagcaaggcggggttgctggactgggcgacgcggtacaaggttgcgctggatgcggcggaggggctgtcctacctccaccacgacagcgtgccggcgatcgtccaccgggacgtgaagtcgaacaacatcctcctggatgcggagttcagtgcccgtgtggcggacttcggggtggccaaggtggtggagggggggaccaccgccatgtcggtgatcgccggctcgtgcggttacattgcgcctgtatgcatacacgcttcgtgtgaccgagaagagcgacacctacagctttggcgtggtgctgctggagctggtgacggggaagccgccggtggatgtggagctgttcggggagaaggacctggtgaagtgggtgtgcagcacgatggagcacgagggcgtggagcacgtcctggacagcaggctggacatgggtttcaaggaggagatggtccgggtgctccacatcgggctcctgtgcgcgagctcgctgccgatcaaccggccggcgatgcggagggtggtgaagatgctgcaggaggtgcgcgctccgccggcgcgggtggtggtggacagggacgggaagctgtcgccgtactactactacgaggacgcgtcgtcggagcaagggagcagctagcgtgtaattgtcttgcatggcattgattccgggcggtagggtggacgaaacaacagctaattgatgacttgcatggcccttggttggttgcattgcattgcatttgctttgctagctaccaattcacagcatcagagatgaactgatgcaagcattctacgagcctgttcttctaatgcttctatgttattttgtcattataaattagtccgaaaagctagcttgactttaatctgaatccaacagtctaacagtctgtctggctctgaaacatctgctgcagcagtacaagagggaccaggcgctcttcttctgatgggtccctcgctcggtcgttcaagttggactttcctctgacaaattggaatttgtgtcgctcggcagcattttgccgcactcgatgttgaacaatagatttatgaataga

SEQ ID NO: 72280 - DNA, 2877 bp, Zea Mays
gccatcgtaaccatgaagtagtattcttttctttcatttctctgaatactgtcattaattcctagagagtatttctttaaaaagtaataatcagatacttctagttggtttgagagggattgtatcagttctcttctttttttgtcctttctatttcccatatcatgttaatgcctgattgttttgatgtactcggttcattaaattaaaggaatttaggttcaaagaacattcgttaagcagtggccatattagttatgcattgagcttctttgttcaataaactacataatacaccaactgtaaagtacacagctaaattaggtaaccatagatgtacatacatagaagcataaacatacaattacatgtacacacatagagagtgtatgtctcagattttttcccctagagataacataagagattagtgccactatatttcctatatacaaacatatctggatatatacacatatatatattgtctatatcgattgtctagtacgaataacatacaagaagcaaagtaagtatcttcgtacaatcataaataaacatcgctttatttcaattcatttcaattccacatgttcccataattatatagctatgtactcttcttttagcaaaaaaagtagtgttcatttggcccagaccacatttttttaatcctaaacattttagatttgccatacgtgcaatcgatcttatatgacgtacataaacatttacacacaacacttttaaaaataagagagatcattctagattttttttggtttgtttgaaatatggccaatccatatcaatcttgtgtacaagactatcctatgtttcatatagaaggaagaatctttgagagggcagatagagggatttaggctatcttcaacaacttttttattttcaatttcaatttgtaaatagtgttatgtacagtgttatttacattgacgtgtgtccctgttttacactaaaaaacagccttattaaatagaaacaccgcattgggttgcaagctcacatgcgagtcgggaagaggcctactggtcagcgacacagcgccatcagacaggatttggcagtggagaacgtgtgaaaacaaagaccgacacgcgaggtcaaagtcgtcgtctcgctcgaggccgaccaccaccaccttgtttttacccagcccacattattaattaacggaacgtacagtaccagtctcacactctcactctcctctgttctgctctgctctgctggaggctggagctgcctctctcgtccccacttcttgcggcagcggggagcgggcagcagcgccggcgagtgacactactgtctactgccctccagctctcacccggccagtctctccagctgccatcctggtcgccggagtggcgtggttctactggcggtaccggagcttcagcaaatcgaagctgcgcgtggaccgctcgaaatggacattgacgtctttccacaagctctcattcagcgagtacgagatccttgattgcctggacgaggacaacgtgattggcagcggcgcgtccgggaaggtgtacaaggccgtgctgagcaacggcgaggtggtggcggtgaagaagctgtggagcacggcggtgaagaaggaggagggctctgcatctgcatctgctgccgacaacagctttgaggcggaggtgaggacgctgggcaagattcggcacaagaacatcgtgaagctgtggtgctgctgcagctgccgggactgcaagctgctggtgtatgagtacatggcgaacggcagcctgggggacgtgctgcacagcagcaaggcggggttgctggactgggcgacgcggtacaaggttgcgctggatgcggcggaggggctgtcctacctccaccacgacagcgtgccggcgatcgtccaccgggacgtgaagtcgaacaacatcctcctggatgcggagttcagtgcccgtgtggcggacttcggggtggccaaggtggtggagggggggaccaccgccatgtcggtgatcgccggctcgtgcggttacattgcgcctgagtatgcatacacgcttcgtgtgaccgagaagagcgacacctacagctttggcgtggtgctgctggagctggtgacggggaagccgccggtggatgtggagctgttcggggagaaggacctggtgaagtgggtgtgcagcacgatggagcacgagggcgtggagcacgtcctggacagcaggctggacatgggtttcaaggaggagatggtccgggtgctccacatcgggctcctgtgcgcgagctcgctgccgatcaaccggccggcgatgcggagggtggtgaagatgctgcaggaggtgcgcgctccgccggcgcgggtggtggtggacagggacgggaagctgtcgccgtactactactacgaggacgcgtcgtcggagcaagggagcagctagcgtgtaattgtcttgcatggcattgattccgggcggtagggtggacgaaacaacagctaattgatgacttgcatggcccttggttggttgcattgcattgcatttgctttgctagctaccaattcacagcatcagagatgaactgatgcaagcattctacgagcctgttcttctaatgcttctatgttattttgtcattataaattagtccgaaaagctagcttgactttaatctgaatccaacagtctaacagtctgtctggctctgaaacatctgctgcagcagtacaagagggaccaggcgctcttcttctgatgggtccctcgctcggtcgttcaagttggactttcctctgacaaattggaatttgtgtcgctcggcagcattttgccgcactcgatgttgaacaatagatttatgaataga

SEQ ID NO: 72281 - DNA, 2875 bp, Zea Mays
gccatcgtaaccatgaagtagtattcttttctttcatttctctgaatactgtcattaattcctagagagtatttctttaaaaagtaataatcagatacttctagttggtttgagagggattgtatcagttctcttctttttttgtcctttctatttcccatatcatgttaatgcctgattgttttgatgtactcggttcattaaattaaaggaatttaggttcaaagaacattcgttaagcagtggccatattagttatgcattgagcttctttgttcaataaactacataatacaccaactgtaaagtacacagctaaattaggtaaccatagatgtacatacatagaagcataaacatacaattacatgtacacacatagagagtgtatgtctcagattttttcccctagagataacataagagattagtgccactatatttcctatatacaaacatatctggatatatacacatatatatattgtctatatcgattgtctagtacgaataacatacaagaagcaaagtaagtatcttcgtacaatcataaataaacatcgctttatttcaattcatttcaattccacatgttcccataattatatagctatgtactcttcttttagcaaaaaaagtagtgttcatttggcccagaccacatttttttaatcctaaacattttagatttgccatacgtgcaatcgatcttatatgacgtacataaacatttacacacaacacttttaaaaataagagagatcattctagattttttttggtttgtttgaaatatggccaatccatatcaatcttgtgtacaagactatcctatgtttcatatagaaggaagaatctttgagagggcagatagagggatttaggctatcttcaacaacttttttattttcaatttcaatttgtaaatagtgttatgtacagtgttatttacattgacgtgtgtccctgttttacactaaaaaacagccttattaaatagaaacaccgcattgggttgcaagctcacatgcgagtcgggaagaggcctactggtcagcgacacagcgccatcagacaggatttggcagtggagaacgtgtgaaaacaaagaccgacacgcgaggtcaaagtcgtcgtctcgctcgaggccgaccaccaccaccttgtttttacccagcccacattattaattaacggaacgtacagtaccagtctcacactctcactctcctctgttctgctctgctctgctggaggctggagctgcctctctcgtccccacttcttgcggcagcggggagcgggcagcagcgccggcgagtgacactactgtctactgccctccagctctcacccggccagtctctccagctgccatcctggtcgccggagtggcgtggttctactggcggtaccggagcttcagcaaatcgaagctgcgcgtggaccgctcgaaatggacattgacgtctttccacaagctctcattcagcgagtacgagatccttgattgcctggacgaggacaacgtgattggcagcggcgcgtccgggaaggtgtacaaggccgtgctgagcaacggcgaggtggtggcggtgaagaagctgtggagcacggcggtgaagaaggaggagggctctgcatctgcatctgctgccgacaacagctttgaggcggaggtgaggacgctgggcaagattcggcacaagaacatcgtgaagctgtggtgctgctgcagctgccgggactgcaagctgctggtgtatgagtacatggcgaacggcagcctgggggacgtgctgcacagcagcaaggcggggttgctggactgggcgacgcggtacaaggttgcgctggatgcggcggaggggctgtcctacctccaccacgacagcgtgccggcgatcgtccaccgggacgtgaagtcgaacaacatcctcctggatgcggagttcagtgcccgtgtggcggacttcggggtggccaaggtggtggagggggggaccaccgccatgtcggtgatcgccggctcgtgcggttacattgcgcctgtatgcatacacgcttcgtgtgaccgagaagagcgacacctacagctttggcgtggtgctgctggagctggtgacggggaagccgccggtggatgtggagctgttcggggagaaggacctggtgaagtgggtgtgcagcacgatggagcacgagggcgtggagcacgtcctggacagcaggctggacatgggtttcaaggaggagatggtccgggtgctccacatcgggctcctgtgcgcgagctcgctgccgatcaaccggccggcgatgcggagggtggtgaagatgctgcaggaggtgcgcgctccgccggcgcgggtggtggtggacagggacgggaagctgtcgccgtactactactacgaggacgcgtcgtcggagcaagggagcagctagcgtgtaattgtcttgcatggcattgattccgggcggtagggtggacgaaacaacagctaattgatgacttgcatggcccttggttggttgcattgcattgcatttgctttgctagctaccaattcacagcatcagagatgaactgatgcaagcattctacgagcctgttcttctaatgcttctatgttattttgtcattataaattagtccgaaaagctagcttgactttaatctgaatccaacagtctaacagtctgtctggctctgaaacatctgctgcagcagtacaagagggaccaggcgctcttcttctgatgggtccctcgctcggtcgttcaagttggactttcctctgacaaattggaatttgtgtcgctcggcagcattttgccgcactcgatgttgaacaatagatttatgaataga

SEQ ID NO: 72282 - DNA, 2031 bp, Zea Mays
gttctgctctgctctgctggaggctggagctgcctctctcgtccccacttcttgcggcagcggggagcgggcagcagcgccggcgagtgacactactgtctactgccctccagctctcacccggccagtctctccagttgctccaggggatccaaatccagtcgtggaagaagctgagcgagctcagcctcgcggacaatggcttcaccggatccataccgccggagctcggtgacctgccggtgctcaactaccttgacctctccggcaacgagcttagcggcgaggtgccgatgcagctggagaacctgaagctgaaccagttcaatgtgtccaacaaccagctgcgtggcccgctgccgccgcagtatgccacggagacgtaccgcagcagcttcttgggcaaccctgggctttgtggagagatcgccggtctatgtgccgactcggaggggggaaggctgtcaagaaggtaccgtggctcaggctttgcctggatgatgcgctccatcttcatgtttgcagctgccatcctggtcgccggagtggcgtggttctactggcggtaccggagcttcagcaaatcgaagctgcgcgtggaccgctcgaaatggacattgacgtctttccacaagctctcattcagcgagtacgagatccttgattgcctggacgaggacaacgtgattggcagcggcgcgtccgggaaggtgtacaaggccgtgctgagcaacggcgaggtggtggcggtgaagaagctgtggagcacggcggtgaagaaggaggagggctctgcatctgcatctgctgccgacaacagctttgaggcggaggtgaggacgctgggcaagattcggcacaagaacatcgtgaagctgtggtgctgctgcagctgccgggactgcaagctgctggtgtatgagtacatggcgaacggcagcctgggggacgtgctgcacagcagcaaggcggggttgctggactgggcgacgcggtacaaggttgcgctggatgcggcggaggggctgtcctacctccaccacgacagcgtgccggcgatcgtccaccgggacgtgaagtcgaacaacatcctcctggatgcggagttcagtgcccgtgtggcggacttcggggtggccaaggtggtggagggggggaccaccgccatgtcggtgatcgccggctcgtgcggttacattgcgcctgagtatgcatacacgcttcgtgtgaccgagaagagcgacacctacagctttggcgtggtgctgctggagctggtgacggggaagccgccggtggatgtggagctgttcggggagaaggacctggtgaagtgggtgtgcagcacgatggagcacgagggcgtggagcacgtcctggacagcaggctggacatgggtttcaaggaggagatggtccgggtgctccacatcgggctcctgtgcgcgagctcgctgccgatcaaccggccggcgatgcggagggtggtgaagatgctgcaggaggtgcgcgctccgccggcgcgggtggtggtggacagggacgggaagctgtcgccgtactactactacgaggacgcgtcgtcggagcaagggagcagctagcgtgtaattgtcttgcatggcattgattccgggcggtagggtggacgaaacaacagctaattgatgacttgcatggcccttggttggttgcattgcattgcatttgctttgctagctaccaattcacagcatcagagatgaactgatgcaagcattctacgagcctgttcttctaatgcttctatgttattttgtcattataaattagtccgaaaagctagcttgactttaatctgaatccaacagtctaacagtctgtctggctctgaaacatctgctgcagcagtacaagagggaccaggcgctcttcttctgatgggtccctcgctcggtcgttcaagttggactttcctctgacaaattggaatttgtgtcgctcggcagcattttgccgcactcgatgttgaacaatagatttatgaataga

SEQ ID NO: 72283 - DNA, 1368 bp, Zea Mays
cgcgaccatgcccagcccagcgcaggagcgcgcgtgtgaagcctgccctgtgtccctcgcgtggccccaggcgtgggccccactggccatgggccccaccgcggcgcgacaacatggccggtggccggccagccctcccccggcgatgccctcccatgcggttacagtcaacaggaagaagaaagggagttgcaacctgcagcagctgctccttattactttggtgagtaggaggaggcacttatccatggcacccgtacttctgtcgatcacagcatgatcggaagtgatgtggacacagagattaagagaattttctttatgatgttgggcattgtaatgttcatccctaggttctactacacaaggattgcctactatgcatacaaaggttacaagggcttatctttttcgaacatcccaccgatctgaaggagtgtgctgcctgcctgctggttatgaagtggtgtcgctggtttaagcgtctgtccctggttatgaagtggctctatagacacccttggtctacatctttctgtggccattctctttgaacactctagaatgaactggtggatgtgtacagataaatgcagccatagtagtgctccatcgcggtttggccgattggaaggtcatttgttgtgctagtgtgaccatgttcaaccgatacgcattgctacttgtgcattactgtcgtttttgtcagggaccttaaatcattctatgagaataagatctcgtcattccaattgtgaagaatatactactacctccagtttcaaattacaatttcaaattattacaagttgtttagaacaaccataaggtaattgcgaagaatatactaattgctctagtttcaaattcactaatatatcttcggctacaaaagaatagttgatgcatagcatagggggcagaaatggggacagttgggatccgaggacctaagggcttgcttacagagaaagcttaccttggcctgagaagttgcggaagtcgtcgctgcttgagcagtgggctccttcccacaccggccaccacgcgtgcggttgcagtgaacccccggcggtgtcttgccgtccgttccgggtcaaccaagcgcctctcccttccggcttccgcacccggtcgctgtttgctgccacaacaggctactaaagaatagttgacgcagtgaaacaactcccatccagaagtggtgtatagtagttcaaatgaaaatagagagtttgcaagcatcaccatacctgtaatggattaaaattaactggaattatctatccattttgcgaattttcagaagtagaagagcaagcaaagaatcctgctagcaatgatccaaattcagattgaacatttact

SEQ ID NO: 72284 - DNA, 1325 bp, Zea Mays
cgcgaccatgcccagcccagcgcaggagcgcgcgtgtgaagcctgccctgtgtccctcgcgtggccccaggcgtgggccccactggccatgggccccaccgcggcgcgacaacatggccggtggccggccagccctcccccggcgatgccctcccatgcggttacagtcaacaggaagaagaaagggagttgcaacctgcagcagctgctccttattactttggtgagtaggaggaggcacttatccatggcacccgtacttctgtcgatcacagcatgatcggaagtgatgtggacacagagattaagagttctactacacaaggattgcctactatgcatacaaaggttacaagggcttatctttttcgaacatcccaccgatctgaaggagtgtgctgcctgcctgctggttatgaagtggtgtcgctggtttaagcgtctgtccctggttatgaagtggctctatagacacccttggtctacatctttctgtggccattctctttgaacactctagaatgaactggtggatgtgtacagataaatgcagccatagtagtgctccatcgcggtttggccgattggaaggtcatttgttgtgctagtgtgaccatgttcaaccgatacgcattgctacttgtgcattactgtcgtttttgtcagggaccttaaatcattctatgagaataagatctcgtcattccaattgtgaagaatatactactacctccagtttcaaattacaatttcaaattattacaagttgtttagaacaaccataaggtaattgcgaagaatatactaattgctctagtttcaaattcactaatatatcttcggctacaaaagaatagttgatgcatagcatagggggcagaaatggggacagttgggatccgaggacctaagggcttgcttacagagaaagcttaccttggcctgagaagttgcggaagtcgtcgctgcttgagcagtgggctccttcccacaccggccaccacgcgtgcggttgcagtgaacccccggcggtgtcttgccgtccgttccgggtcaaccaagcgcctctcccttccggcttccgcacccggtcgctgtttgctgccacaacaggctactaaagaatagttgacgcagtgaaacaactcccatccagaagtggtgtatagtagttcaaatgaaaatagagagtttgcaagcatcaccatacctgtaatggattaaaattaactggaattatctatccattttgcgaattttcagaagtagaagagcaagcaaagaatcctgctagcaatgatccaaattcagattgaacatttact

SEQ ID NO: 72285 - DNA, 1916 bp, Zea Mays
tggattgtacagtaccccgaatgagctaaaaatattgtcttagcacaaggaatgaaaaaggcacccatgtttgtgcaatgttgaagatatgtgtgagatctatgtcaatcacattttgcagtggttgatcctgattagttttgtgcttctgctaggacaagaaaagccagggtagtaaacaataccctactaaagcttggcagcaaatggaaagaacccaatgagctatattactatatatcatatctccaagataggtgagtatatgtccactgaggcttgaacacagatacggcagaggcgcaaacaacaccgagataaaaaaacaaatgcacaaggcttttctacttctaattgcattggccagttaccacttaatatactgacagtaataaaacattatattagcgagaaggcacaaatttatagtacaaaaaattcacacagatgtagatataaataagaaagcctaagaagaaacatgatgagcatttaactgacatgatcactactcatattttaattcacggtgatccctattattggtgcaagtgatcttaccttcctgctcctcttttcagccctcatccatatctgtacacctctgaccctcctcacttttctgtcattgcctttaccttcttgaaaaaaaattaagctttttatctgctttgccttatatttcatatggctgccattggtgctgaacttgctgcgctactgcttggcccagggagttgcaacctgcagcagctgctccttattactttggtgagtaggaggaggcacttatccatggcacccgtacttctgtcgatcacagcatgatcggaagtgatgtggacacagagattaagagaattttctttatgatgttgggcattgtaatgttcatccctaggttctactacacaaggattgcctactatgcatacaaaggttacaagggcttatctttttcgaacatcccaccgatctgaaggagtgtgctgcctgcctgctggttatgaagtggtgtcgctggtttaagcgtctgtccctggttatgaagtggctctatagacacccttggtctacatctttctgtggccattctctttgaacactctagaatgaactggtggatgtgtacagataaatgcagccatagtagtgctccatcgcggtttggccgattggaaggtcatttgttgtgctagtgtgaccatgttcaaccgatacgcattgctacttgtgcattactgtcgtttttgtcagggaccttaaatcattctatgagaataagatctcgtcattccaattgtgaagaatatactactacctccagtttcaaattacaatttcaaattattacaagttgtttagaacaaccataaggtaattgcgaagaatatactaattgctctagtttcaaattcactaatatatcttcggctacaaaagaatagttgatgcatagcatagggggcagaaatggggacagttgggatccgaggacctaagggcttgcttacagagaaagcttaccttggcctgagaagttgcggaagtcgtcgctgcttgagcagtgggctccttcccacaccggccaccacgcgtgcggttgcagtgaacccccggcggtgtcttgccgtccgttccgggtcaaccaagcgcctctcccttccggcttccgcacccggtcgctgtttgctgccacaacaggctactaaagaatagttgacgcagtgaaacaactcccatccagaagtggtgtatagtagttcaaatgaaaatagagagtttgcaagcatcaccatacctgtaatggattaaaattaactggaattatctatccattttgcgaattttcagaagtagaagagcaagcaaagaatcctgctagcaatgatccaaattcagattgaacatttact

SEQ ID NO: 72286 - DNA, 1770 bp, Zea Mays
gtcaatcacattttgcagtggttgatcctgattagttttgtgcttctgctaggacaagaaaagccagggtagtaaacaataccctactaaagcttggcagcaaatggaaagaacccaatgagctatattactatatatcatatctccaagataggtgagtatatgtccactgaggcttgaacacagatacggcagaggcgcaaacaacaccgagataaaaaaacaaatgcacaaggcttttctacttctaattgcattggccagttaccacttaatatactgacagtaataaaacattatattagcgagaaggcacaaatttatagtacaaaaaattcacacagatgtagatataaataagaaagcctaagaagaaacatgatgagcatttaactgacatgatcactactcatattttaattcacggtgatccctattattggtgcaagtgatcttaccttcctgctcctcttttcagccctcatccatatctgtacacctctgaccctcctcacttttctgtcattgcctttaccttcttgaaaaaaaattaagctttttatctgctttgccttatatttcatatggctgccattggtgctgaacttgctgcgctactgcttggcccagggagttgcaacctgcagcagctgctccttattactttggtgagtaggaggaggcacttatccatggcacccgtacttctgtcgatcacagcatgatcggaagtgatgtggacacagagattaagagttctactacacaaggattgcctactatgcatacaaaggttacaagggcttatctttttcgaacatcccaccgatctgaaggagtgtgctgcctgcctgctggttatgaagtggtgtcgctggtttaagcgtctgtccctggttatgaagtggctctatagacacccttggtctacatctttctgtggccattctctttgaacactctagaatgaactggtggatgtgtacagataaatgcagccatagtagtgctccatcgcggtttggccgattggaaggtcatttgttgtgctagtgtgaccatgttcaaccgatacgcattgctacttgtgcattactgtcgtttttgtcagggaccttaaatcattctatgagaataagatctcgtcattccaattgtgaagaatatactactacctccagtttcaaattacaatttcaaattattacaagttgtttagaacaaccataaggtaattgcgaagaatatactaattgctctagtttcaaattcactaatatatcttcggctacaaaagaatagttgatgcatagcatagggggcagaaatggggacagttgggatccgaggacctaagggcttgcttacagagaaagcttaccttggcctgagaagttgcggaagtcgtcgctgcttgagcagtgggctccttcccacaccggccaccacgcgtgcggttgcagtgaacccccggcggtgtcttgccgtccgttccgggtcaaccaagcgcctctcccttccggcttccgcacccggtcgctgtttgctgccacaacaggctactaaagaatagttgacgcagtgaaacaactcccatccagaagtggtgtatagtagttcaaatgaaaatagagagtttgcaagcatcaccatacctgtaatggattaaaattaactggaattatctatccattttgcgaattttcagaagtagaagagcaagcaaagaatcctgctagcaatgatccaaattcagattgaacatttact

SEQ ID NO: 72287 - DNA, 1533 bp, Zea Mays
ccagcctctagccaggagggtacacgctactcccaccatctcccatgcccagtgcgcggttgtcttttcacgtatggaatagccgggttcaggcttatcggagcatgtggataattgcaaagtctccaccacaacaggcctacatcgaacggtccttaatagacacagacgggcaaactttcttgctcaacgtctggtctacattacatattatttcccaaaacttgatacctgagagagataccctacttgaatgatgaaaccatcatggcgacaatgggttcatcatcacaagtccttttatttcacaaactcccatatcccgtgttacacatcatcttttaaaaaccatcctaaattaataagcagggctaagcatcactaaattttcataaaataggtattagggttgtttaatcaaggaaggaaatgcatcaattgtttaatcacacaactcctattacctaatgcatcattcaaggtgataaaaattttaaaacagcaaggaggtggcaaatgcatcggggcttgcctagaataaacactacattagtgtttgttaggtgacgtccacttggcgatcagcttttgttccgatacttgctttgtgtgtccatcttcagtttcgttcatcagcatcatcttgcgaatggctcacgctttccagcatcttgtggtcgactcagttatgatcctccgcatcacgtgattaattatcgtacctaaatgaaatgcataatgcacatgtatgaatttaaaaagaactagcacaatactagataattttatacggttgaggattacacactactaacaagtccttagaaccaattacaagaaatgcccagctgtcgatataatactaacgataatatttgtgcttcttatgctcatctggtgctagctcaacatcacgaacaacacactaagcatgaattttatatctttcttagctaacacataataccaaagactaacaatacttaggttaattaatctagtatacctcggacttagaataacaattagtagctttacaattaactttaaaattactattccatagtctcgtaagtagagtattatcaaggactgtagatctttataagaccataattttaaggcctaatgacttaaaacattaatgtagaccctttatcatgaaattctcatattttaaccaaaacagacttgtcaatgctattcatttaaattattctagtagcaatcaacattcatccatgacactgagtctattactaaacatagaatacaataactaccagataaaattattgactttatcatggggtttctcatatttcgactgaaattggctcgctaacgctactcgcttccaatttatttaggaacaacgcaacagagcagcatacctaaaatagtaagaatatggagctcatcacacagcacgcctgctaaacacgagaatcatcatgactaataaatctagctaatctaatcatcgaactaataatagaaatagcgaatcaactcaccatattgcaatttgac

SEQ ID NO: 72288 - DNA, 883 bp, Zea Mays
atggcgaggaaatggaagcgccatgggggatggaatccgacgattcgacgacatgcgcaggctaggatggtcgagttaggacaggaggggcatcgatggggagtccacaacagcgtgcccagatcccaagtcgcacgaccatgcccgcgaccaaaactcaccatgcttccgctacacacagcgatgcgaggaccagggccatggcgagcagggagaggactcgacgaccagcgcataggggagcttggcatgggtacggcgagcagagcaggcaggacgctaggcatcgcgggtgagcatggtcgcagcaaggagcaggacggccgcagtaggcaagcaccgacagcgagggcgcggtccgagcgcaggcgagatggggcctcggcagaggacgagcgtgcgtcagggagaaacagaggggcgcaactatggagatggagaggagggagagagaagcagggggctcggcggaggggttcaggcggggtcgacggcgcgacttccatggctgagcagggaggagcgtggcgtgcttgagggaggcgagctaaggggggggcatggccatggcaagggggatgggcggccgagcagggagtcggcatgggcgcgacggccagcgccatggctcagggcaaggccggggaccggcgcgcgcagggagcactgagcttgaggaagcgactgtcaggcacgcggctaagggaaaaatctagggaggggcgcagggaggaagaagatttgggcgcgcggcagggagctgctcgggtaagcgcacgtcgcgtggaggaagatgagcaggggctagggcgcgcggatgagataagggagaaacttggatggacgcaggagatggacaccacggctagagcggcgagatttt

SEQ ID NO: 72289 - DNA, 884 bp, Zea Mays
cttgtcccctaattgtgactaggctgcctgcctgtttccctgtcaagagcttctgctgtttgatctatggatgccctacggtgcttcatctgattatataaattggaatgaacatgcagtgcatagttaaggtctagaggtctcactctcccctgaaaatatcaaatcgagctgtgagtttgggggaaaggaaaatatctttatctctctgttgtactccactttgtgcacacactgagataagtttagggtggacaacaaagggtctcgtgctccagttcctgctgcagaaaatatcaactttggatccactagtgcctgtattcagagttcttatctggcccttttccctgtctatgttactggactaagttcagtgtctaggaaagccagtgtcctgcgtggtatgtggatttgggagccacgtttgtgagtccctgctgtgttgtcacccttggaacccttctccaccagtctagctgaactcgaggacatctgccctatcctggttgctttagcgcctggatcagggaatcctcttccctgtccttgagctctagccctggtttctttgcatgtgtgggggtggtcttcgtgccttcagggatcctcgacggggttttcagccgcgttgtgctcgtcccataatctccagagagctcccaaaataaagagtgaagattcaagatgaagtggttgctaaagaggagtctactccaatgcctgcttatcaagtggatggagctatctaactaaaggttgggtagaaggattttgggatcttctcctgcaacaaggcaagccccggtgcatttgccaccctccttgtatttacaaaattttatcacttatatgatgcattaggtgataggagttgattgatt

SEQ ID NO: 72290 - DNA, 1156 bp, Zea Mays
gtttccctgtcaagagcttctgctgtttgatctatggatgccctacggtgcttcatctgattatataaattggaatgaacatgcagtgcatagttaaggtctagaggtctcactctcccctgaaaatatcaaatcgagctgtgagtttgggggaaaggaaaatatctttatctctctgttgtactccactttgtgcacacactgagataagtttagggtggacaacaaagggtctcgtgctccagttcctgctgcagaaaatatcaactttggatccactagtgcctgtattcagagttcttatctggcccttttccctgtctatgttactggactaagttcagtgtctaggaaagccagtgtcctgcgtggtatgtggatttgggagccacgtttgtgagtccctgctgtgttgtcacccttggaacccttctccaccagtctagctgaactcgaggacatctgccctatcctggttgctttagcgcctggatcagggaatcctcttccctgtccttgagctctagccctggtttctttgcatgtgtgggggtggtcttcgtgccttcagggatcctcgacggggttttcagccgcgttgtgctcgtcccataatctccagaggtcagtgatgctcaccagatttccctttttaatgctgtagttgtttgctggatggaacaaggttgcgccactgtgtattggcgccagggacagccatcacattgacccattcacccgcgccatttccggtcaagttcacacgcgcaccataggtttatgtgatcgctgaagctctctgagtccttagtcggagctctaccgcacgggttcacgggatcgagctttcgggctgagcttgccgcaccgccgtcgaaagctcggttttaggatctccatgagacaaacattatggggtgtctaaattgagctcccaaaataaagagtgaagattcaagatgaagtggttgctaaagaggagtctactccaatgcctgcttatcaagtggatggagctatctaactaaaggttgggtagaaggattttgggatcttctcctgcaacaaggcaagccccggtgcatttgccaccctccttgtatttacaaaattttatcacttatatgatgcattaggtgataggagttgattgatt

SEQ ID NO: 72291 - DNA, 1773 bp, Zea Mays
aagagcttctgctgtttgatctatggatgccctacggtgcttcatctgattatataaattggaatgaacatgcagtgcatagttaaggtctagaggtctcactctcccctgaaaatatcaaatcgagctgtgagtttgggggaaaggaaaatatctttatctctctgttgtactccactttgtgcacacactgagataagtttagggtggacaacaaagggtctcgtgctccagttcctgctgcagaaaatatcaactttggatccactagtgcctgtattcagagttcttatctggcccttttccctgtctatgttactggactaagttcagtgtctaggaaagccagtgtcctgcgtggtatgtggatttgggagccacgtttgtgagtccctgctgtgttgtcacccttggaacccttctccaccagtctagctgaactcgaggacatctgccctatcctggttgctttagcgcctggatcagggaatcctcttccctgtccttgagctctagccctggtttctttgcatgtgtgggggtggtcttcgtgccttcagggatcctcgacggggttttcagccgcgttgtgctcgtcccataatctccagaggtcagtgatgctcaccagatttccctttttaatgctgtagttgtttgctggatggaacaaggttgcgccactgtgtattggcgccagggacagccatcacattgacccattcacccgcgccatttccggtcaagttcacacgcgcaccataggtttatgtgatcgctgaagctctctgagtccttagtcggagctctaccgcacgggttcacgggatcgagctttcgggctgagcttgccgcaccgccgtcgaaagctcggttttaggatctccatgagacaaacattatggggtgtctaaattggtaagctctctggtaaatgtgttgttgggatctttagtgcagtttacaaatgttaagtaatttagtgtgctctaaaaaggattaattgaatatttagggagcaattatgagcaccaaaaattgtgaaaacttgtggagagtcttgttatcagaagataaactcttggtaaaagtttgaggctgtttgtaagccatttgctcagaaatccttgtagagtccctaattggaataataaggagaacataatcacatgtggattagaactttggaagaaggaacaagtttaacaagtgaaacctgatctttggataaagaagcaagagtgcctagtggtatctagatttttggcgtagtttgaagattgttctaatcctctagatgttcaagttgtaggattcaagtcaaagaagtaagtccttacttaatgcaagcatagagtgcttggttttggaggcagaattccctggtgtggttcgagagcttagtgatgatattagaatgtttagctcccctgttgtttggttagttttgtgtgcacctttagtaaggtgtagtttgtactgctttaaagtatcttctttgtagttgcataagtatatgcattcatgttcatatcatttcatgtagagctcccaaaataaagagtgaagattcaagatgaagtggttgctaaagaggagtctactccaatgcctgcttatcaagtggatggagctatctaactaaaggttgggtagaaggattttgggatcttctcctgcaacaaggcaagccccggtgcatttgccaccctccttgtatttacaaaattttatcacttatatgatgcattaggtgataggagttgattgatt

SEQ ID NO: 72292 - DNA, 957 bp, Zea Mays
gtctcactctcccctgaaaatatcaaatcgagctgtgagtttgggggaaaggaaaatatctttatctctctgttgtactccactttgtgcacacactgagataagtttagggtggacaacaaagggtctcgtgctccagttcctgctgcagaaaatatcaactttggatccactagtgcctgtattcagagttcttatctggcccttttccctgtctatgttactggactaagttcagtgtctaggaaagccagtgtcctgcgtggtatgtggatttgggagccacgtttgtgagtccctgctgtgttgtcacccttggaacccttctccaccagtctagctgaactcgaggacatctgccctatcctggttgctttagcgcctggatcagggaatcctcttccctgtccttgagctctagccctggtttctttgcatgtgtgggggtggtcttcgtgccttcagttgtttgctggatggaacaaggttgcgccactgtgtattggcgccagggacagccatcacattgacccattcacccgcgccatttccggtcaagttcacacgcgcaccataggtttatgtgatcgctgaagctctctgagtccttagtcggagctctaccgcacgggttcacgggatcgagctttcgggctgagcttgccgcaccgccgtcgaaagctcggttttaggatctccatgagacaaacattatggggtgtctaaattgagctcccaaaataaagagtgaagattcaagatgaagtggttgctaaagaggagtctactccaatgcctgcttatcaagtggatggagctatctaactaaaggttgggtagaaggattttgggatcttctcctgcaacaaggcaagccccggtgcatttgccaccctccttgtatttacaaaattttatcacttatatgatgcattaggtgataggagttgattgatt

SEQ ID NO: 72293 - DNA, 473 bp, Zea Mays
ctgcacatgaccatgggggcaaagcgaatggccggctacagaaaatgagctcggttgtcgatgggagcggccatggccggacctgggcgaggccacaggcagcaggggaagcgacggtccggagagcagctcgctggagaggtagaaatggcgcgtggaacagagaggcgagggcctgggcgtttcctggccgtggcagggaagagaaaaagggggcgccatggccatggaggaaaggagctgctgctccctgcgctgagaagggggtgctgctgctcgcctatagggagcgagcgccagggggaaagcttgcctgggcacctgtgggccagtgttgagggaggagggatggacgccatggctgctggcttgctccctgctggccgccgtggggaaccagggaggaagaagctgacgcctgctgttctatcgtgtaggagaaggaggaaagaagagggctggtttgggcggct

SEQ ID NO: 72294 - DNA, 457 bp, Zea Mays
gcgggagcagggagccagctaaccagctagaacgaagtgccgagcgccgtgcgccgtgcgtgactacacacaggggggaggaagagcgacgcgccagtgcctgctgtggcgagcgaagggagtgtcgtctaggcgtccatcgtgcgccgccgccttgtgggcctgtgaggaggccgagccgctaccccgtcgaggagaaggaacgccgtgagcaaaggccaagcagccgaggggagaagtcgccatggcccgtgtgcgtgcgcggaggccgagcaccgaggggagcggcggcggaggacctgagtccggacacgagctacgcttacactgggtctgtacgccgattcgagatctgaaaatgaagagaaagaagactgctactactgattcgatagcttttttttagcaacagctgctgcaaaaaagaaacaatctgcaagtgagacattgacagtag

SEQ ID NO: 72295 - DNA, 2810 bp, Zea Mays
acacgcttcgtccacagcccaactacccaagagcagagggcagaggatgcctcttgccgcaatggcgtcggcatcctcctcgccctgctcgcggcatcctctgatcttggtcgttctcttgtgcgccattgccgccatctctttctcttcctctgtggctgctggaaccgttggcggcggcacaggcggactgggccccatcagcaccaacgggaagaactacaccaaggtgtgcgaccccgcacggttcgtggcgctggggctcgacatgtcacgcttccggtactgcgacgcgtcgttgccgtacgccgaccgggtgcgcgacctcgtgggccgcctcgcgctggaggagaaggtgcgcaacctcggggaccaggcggagggcgcgccccgcgtcggcctgccgccgtacaagtggtggggggaggccctccacggcgtgtccgacgtcggccccggcggcacgtggttcggcgacgtggtgcccggcgccaccagcttcccgctcgtcatcaacagcgccgcggcgttcaacgagtcgctgtggcgcgccatcggcggcgtggtgtccacggagatcagggccatgtacaacctgggccacgcagagctcacctactggagccccaacatcaacgtggtgcgcgacccgcggtggggacgcgccagcgagacccccggcgaggaccccttcgtcgtcggccgctacgccgtcaacttcgtccgcggaatgcaggacgtcgacgaccgcccctacgccgccgccgcagacccgttctcgcggcccatcaaggtgtccagctgctgcaagcacttcgccgcctacgacgtggacgcgtggttcaaggccgaccgcctcacgttcgacgcgcaggtggaggagcgcgacatggtcgagaccttcgagcgccccttcgagatgtgcatccgggacggcgacgccagctgcgtcatgtgctcctacaaccgcatcaacgggatacccgcctgcgccgacgcgcgcctgctgtcggagaccgtccggagccagtggcagctccacgggtacatcgtctctgactgcgactccgtacgcgtcatggtccgggacgccaagtggctcaactacaccggcgtcgaggccaccgccgcggccatgaaggccgggctcgacctcgactgcggcatgttctgggagggcgcccgggacttcttcaccacctacggcgtcgacgccgtccggcaggggaagatcaaggagggcgacgtcgacaacgcgctcagcaacgtctacaccaccctgatgcggctcggcttcttcgacggcatgccggaattcgagtccctcggcgctagcaacgtttgcaccgacggccacaaggagctggctgccgacgccgcaaggcaggggatggtcctcctcaagaacgatgcccgccgcctaccattggaccccaacaagattaattcagtgtcgttggttggcctgttggagcacatcaatgccacggatgtcatgctgggagactaccgagaattgtgacaccatacaacgctatcaggaacatggtgaatgccacgtacgtgcacgcctgcgacagtggggcgtgtaacacggcggaagggatgggaagagcatccagcacagcaaagatcgccgacgcgaccatcgtcatcgctggtctgaacatgagcgtggagagggagagcaacgacagggaggatctcctgctgccgtggaaccagagcagctggatcaatgccgtcgccatggcctcgcccacaccgatcgtcctggtgatcatgtcggccggcggcgtggacgtctcgtttgcgcacaacaacaccaagatcggcgccatcgtttgggccgggtaccccggcgaggaaggcggcacggccatcgccgacgtcctcttcggaaaatacaatccaggaggacggctgccgctgacatggttcaagaacgagtacgtcaaccagatccccatgacgtccatggcgctgcgtcccgacgccgcgctgggctaccccggccggacgtacaagttctacggcggcccggctgtgctctacccgttcggccacggcctcagctacaccaacttcagctatgcttccggcaccaccggcgccactgtcaccatccacatcggcgcctgggagcactgcaagatgctcacctacaagatgggtgcgccgtcgccgtcgccagcctgcccggccctaaacgtcgctagccacatgtgcagcgaggtggtgagcttcagcctcagggtggcgaacaccggcggtgtcggcggcgaccacgtggtgccagtgtacaccgcgccgcctcccgaggtgggcgacgcgccgctgaagcagctggtggcgttccggagggtgttcgtgcccgccggcgccgccgtcgacgtgcccttcgccctcaacgtgtgcaagacgttcgcgatcgtcgaggagacggcgtacaccgtcgtgccgtcgggcgtcagcacggtcgtcgtcggagatgacgcgctggtgttgtcgttccccgtcacgatcaacctggcagtgtagactacttgtctgcaggactaggcgttaattgattctttttttttactcaaggtaataactttaaaccattaaatgtagcgggcgagaaagtggaagcaagtgtaattactttacacagtgctatacaaaagcagaagcagatcgatccattaattgtcacatgatttgtatccctgaaagcagaacgggtgaaaaaatttactattgctgttttgcgcctttgcggcacagtttgatctcatcttaaatacaattctaccacggtactg

SEQ ID NO: 72296 - DNA, 1872 bp, Zea Mays
cgtctctctccgatccagctggtcagtagtgatcagtactagctagctactaccaccgcccccaaaaccattccacctctcaagaacagcgctctggcagcgctggtagtgtagcatcgcgcgttcatcactacgctactaggaatcatatatcatcatcggtcgagagagagagagagcaagcaagtttcctccggcggccggagggtacgtaatcgatcgccggccgccacagcaggatgagcaggatgggcggcaaggactgcgtgccccccgtcgccatggtgctcgtgcagctgggcttcgccgtcatgaacatcgtgtcgaagctggcgctggacgcgggcatgagcccctacgtgctcatcgcctaccgcaacctcatcgccgccgccgtcatctcccccatcgcctacttgcttgagaggtgtttcagttcatcgggtgcgtgcacgtcagttcattccagtgcgagcccacacacacgcacacacttgatcagaagaagcggggcgacgatcacaaagaaggtgctcctgcagatcttctgctcctccatcttcggggcaacgctgaaccaggtgctgttcgtcgtggggctcaagtccaccagcgcgaccgtggcgtgcgcgctcaccaacacgctgccggcgctgaccttcgtgatggcggcggcgctcaagatggagccggtgcggccgggcacggcggcggggcaggccaagctggtgggcacggcggtgtgcgtgggcggatccatgctcatacccttctacaagggccccgtcctcagggtgtgggcgtccccgatccactggcgcttcgcggagcacgcgtcgccccccgccgccgccgccgcggcaggcgcccacacgggccccgccgcggtgctcggggacgtcctcgtcatcgccagctgcgtcgcctgggccgtctggttcattctccacaccaagatctcccaggggttctccgcgccctacaccagcaccgccatcatgtgcctcatggcgggcgtgcagtgcgcgggcgtcagcgccgccctggaccggagcctcgccgtctggaagctcgggttcgacatcaggctctactccgtgctctacatcgggatcgttggctccggggccgggttcacgctcatgtcgtggtgcatccaggtgcgcggcccgctgtacgtgtccatgttcagcccgctgctgctcgtcatcgtcgccgtcgtcggctgggccatcctcggcgacaagatacgcctgggaagtgctatcggctccgtgctcatcgttgccgggctatacatggtgctctggggcaaaggaagggagatggacagaccgggcctcgacaacgacaaaggcgacgaggagaccgccgccgcattgggccttgcggtcgcaagcagcaagggtggtgcggtcgtcgtaagcagccgtgtcgacgccgtcagcagcctgccggtgttctccacaacaactagccccaagaggcagcaactcattcacggatgaaatagctagtgggtcggagttggaggaactggccggggcgaagacggcggcgaagattggattggaggggcataactacagacttgtgcacggttggttgcattgcagttgcatgcagcagcgtcagagtcgtgtggtctgttacaaagaggaagcaaacaaacaggagtgtgatgtggctgtactagtgcctagtggaagctggaagggttgcttgctaccttggatgatttcgtgctactgtcgttgggcttctctgtgtgcgctgcacttcacttgaatgatctgatttggttcctccaaaaagtctcaccataccattaattatcttcatcttcatgacattaagtacagtttctctttt

SEQ ID NO: 72297 - DNA, 1797 bp, Zea Mays
cgtctctctccgatccagctggtcagtagtgatcagtactagctagctactaccaccgcccccaaaaccattccacctctcaagaacagcgctctggcagcgctggtagtgtagcatcgcgcgttcatcactacgctactaggaatcatatatcatcatcggtcgagagagagagagagcaagcaagtttcctccggcggccggagggtacgtaatcgatcgccggccgccacagcaggatgagcaggatgggcggcaaggactgcgtgccccccgtcgccatggtgctcgtgcagctgggcttcgccgtcatgaacatcgtgtcgaagctggcgctggacgcgggcatgagcccctacgtgctcatcgcctaccgcaacctcatcgccgccgccgtcatctcccccatcgcctacttgcttgagagaagaagcggggcgacgatcacaaagaaggtgctcctgcagatcttctgctcctccatcttcggggcaacgctgaaccaggtgctgttcgtcgtggggctcaagtccaccagcgcgaccgtggcgtgcgcgctcaccaacacgctgccggcgctgaccttcgtgatggcggcggcgctcaagatggagccggtgcggccgggcacggcggcggggcaggccaagctggtgggcacggcggtgtgcgtgggcggatccatgctcatacccttctacaagggccccgtcctcagggtgtgggcgtccccgatccactggcgcttcgcggagcacgcgtcgccccccgccgccgccgccgcggcaggcgcccacacgggccccgccgcggtgctcggggacgtcctcgtcatcgccagctgcgtcgcctgggccgtctggttcattctccacaccaagatctcccaggggttctccgcgccctacaccagcaccgccatcatgtgcctcatggcgggcgtgcagtgcgcgggcgtcagcgccgccctggaccggagcctcgccgtctggaagctcgggttcgacatcaggctctactccgtgctctacatcgggatcgttggctccggggccgggttcacgctcatgtcgtggtgcatccaggtgcgcggcccgctgtacgtgtccatgttcagcccgctgctgctcgtcatcgtcgccgtcgtcggctgggccatcctcggcgacaagatacgcctgggaagtgctatcggctccgtgctcatcgttgccgggctatacatggtgctctggggcaaaggaagggagatggacagaccgggcctcgacaacgacaaaggcgacgaggagaccgccgccgcattgggccttgcggtcgcaagcagcaagggtggtgcggtcgtcgtaagcagccgtgtcgacgccgtcagcagcctgccggtgttctccacaacaactagccccaagaggcagcaactcattcacggatgaaatagctagtgggtcggagttggaggaactggccggggcgaagacggcggcgaagattggattggaggggcataactacagacttgtgcacggttggttgcattgcagttgcatgcagcagcgtcagagtcgtgtggtctgttacaaagaggaagcaaacaaacaggagtgtgatgtggctgtactagtgcctagtggaagctggaagggttgcttgctaccttggatgatttcgtgctactgtcgttgggcttctctgtgtgcgctgcacttcacttgaatgatctgatttggttcctccaaaaagtctcaccataccattaattatcttcatcttcatgacattaagtacagtttctctttt

SEQ ID NO: 72298 - DNA, 2207 bp, Zea Mays
cgtggccaacttgttcattaggtcccttcccttccgttccgtgcccactctcttgctctatataacatgccgcccggcagcacctcttctcacgtctggaacagagaaagatcatatagagagttaaacagcgggataccagcgaattatcaaccctgattccatggagagagttgcatcaagctgcaccagcatcctaacacaaaggaggccttactctgtggccgcggccatggcgaaggaagccgcacggagggccgacgggaacaaggctgcggctgcggctgcggtgaccatgaccaagcgcgtgatgggcaaaaaggaagtcaacaccgctgccgctgcggcggagcagaagaaggcatggctgccgaaccctgtgaccggctactatcgcccagcgggtagccccagggaggtggacgcggcggagctgtgcgccaagctgctgactggttaatcaaacagttattttgtcgagctcgactgctcgatcatggggtgtctgtctatctagtttgtattgctttaagatccgtgctccttgatagccgggctccttccttggcctagagcatgaggccatgagggtgctgttgtataaggaaaaaaattctgtggataccacctccaaacagccgacggtggagcccctcacacgcataacgcgcaggcccacgtagcagcagtcggaacacttttctcctcacggcacgttccgtcatttggctagctgctccgtctccactaccaaacaaatcatcggctcgaactatgtggtaactcggcttgcagcgatagacttccaaatttactcaccgcgtcgctgagaacaaaagacatgaacgaggagacgcaggcatacataatttggcacatacagaaatcccttgatgcgcaggatcagcaacatataaaatttggcgcagcagcatgcaaccaattatatattgtacgatacacaatgtattgaatttatttgagtaaaagaaaactgctactacatggttgtatcatttgctccggtgtcaaattgtaattttcgagcagccgaagcatcttgatcaagaccaagcaaaagacttgtatattctccttgcacaatgattggaaagttgatcacgttattggtagaagtgtttggtaatgccacattaccaccactattgtccccaatgttccttgtttcttctccaacagcatctgaaatagcagctattaaaagacatgatgctaataaaaaattcagtcattgcaacaataaaccaataactttttcttgatgacttttctttttcttccttgtattcttttcaacaacattctttgcctgttacttttgggtccttttactacatgaggaactctaaatgatatcacactattctctatacatatatcatggtcattcaaaccaacgaaagaatctttattttctcgcatcttgtttagtgaatcatcagccatcgattctaaattttccaatgccctctccaaatcatctagaagtggttctgatgttgcacacttcaatgcaagagatgttgctattcgagatatacgagcagcacgtgccttcaaattttcatttggccttcctttttttctcaacataatgccctctttttgcatattttgtccacctgttaagtatatattgagatggtaaaataaaaacatcattcatattgaatactttgaaggcatgcttgcacaatatacctgaaagaaattgaagatagtggtcagcaatataatgtactacaaccaaaattataatttgatgaatatacatacctatagattcaaactttctgcaagagcacgtaatggtcatatctgcaatgttcaatatagttgttgctccataatctgaatgcatatgtgtaaccgtaaatgttgatatagacccctcagtctgtaacagtttacaggaatactcaaactgttttttaaattctgtttcgaactctgcatacatcctcctagtatatgattctaaggcggacttcaacaatggtaattctaggacatgaataactggtactattgggggcctttttcttcgccgaaggtcctctgagcaaaaataccttcggtaggacgatatgcaagcagacacaacactaaggtatatgccgaagctataatccagggagcttcggcatgatgatacgccttgagacgaagggcaacaccgacttaaa

SEQ ID NO: 72299 - DNA, 3531 bp, Zea Mays
gaaaatttaccgaaagcctctacaaggtatattaacatgtttcagacaccttttgcacttagaaacattttacaatggcatgaatgtaacaactaaagcacctataggactcacttcactaggcttacgccaatatataacaaaataattctccactatattagaaagaagaaaagaaatgtaagaaaaatagaggataacacctaaatttggtgtatattagaaaagaaattttatacccaaaatcaggatgttacaccttccttgctcttcctctccgacatggagcaatttaatgtggtatccaacctccctcacgtctaccataccttgtttcgttggtgcgctccagcacttctcaaatcaactacgtacatatagttgattctaagtttttacgtggacaactcatggaagtccacataattaaacacatagtgtgggttcaagggatagtccatttgcattcttaatccctattttctaagttagttgtatacaatctaactaataacgtctaaatactttatctccttttaagtatcattgtggtatttgaaagcatctaggccctcatttggtttcagtgattaataattgtgactaacttattttgcaaaaataagttaagttagattacaataatgtaagatgattgtgcttatatgatattcatgcctttatcgataaattttaatgattggttttcgaaggatggccgagaaggttaagaatcagttagttttaaatgccattagagttattggatatttagaattgtgatagattctttattttcctttagttgtaatataaagatggttattgttggggtcttcttctccgccgaaggtcctctaggaaaaaacaccttcggtaagacagtacaaaggcagatacaacatgaagatataagatgaagctacgatcgaaagagcttcggcttggtgtcatgctaaagacgaaggacgataccggcttaaagaggaaaatactgtatagcccttggtagtctgtattatgatcataattagttatcaaggacatggatgtaatttcatacgggctgcgtcccgcgcctataaatagatgaacagtaccccgtactgttcacgctgtactgtaatcactctcgcgtctctcacattttcaccttctgtcgaaccgaaggtatcaataaagcataaatattactagaccattaagcgcccatacgggcgccctacagtatttgacgttaacaggaggctgctataatacaagtgatgttgcacatgcagaacctcaaacactttgaaacataaacaggtagaataaaacctagtgttcaatacaactaagctaatttttgaggttaacagaaaagtaatgaacactgaaacttcaggggaggaagacacataggctttcctaatttgtgaagtgatccaaacatgagtaatgcaaaacaaaataaagtgcagcaataaaattggtttcaaaaagaaaatcatgcatagatagtgaagcaattcttgccaatcataaagatggtgttgatagtcagtatacatagctaagggtctgagacatcaagacaaagcagcaacttcctgatagcattcacacaagtttggcataaatcagatcaaactaataacagaatgtacaagacccaaacaattaaactctatagtaactgtcgtcaagtatatacgtctggtaggatagcaaagaaaaaataaatgcacacttctcattaaacattatataataaacagaaaaatttagcacacaatggacattatataataaatggtaaagtgaaaaatatcattggaaagtaaagctgaaaccacaagacgaaaaccaaaacacaccacccattcctaagtaccaacaaattttgttttaaaaaacgaggaagtggccgtaggtgagaactgagaagtgattttgtttatgttaaatcacattggccaatctagtaaatctttccttgaattatctatgtgcatattcaaataaaagcactacatgcatgtaagatatttgttaagagaataataacccaaaaagatttaaggtttagtgtgtattgattatcaaagcgtaccaaaaaggatagcatccaaacttctgtcaggcagacagctagacaatcgtatatattaggatcgatttggcagttagaataacttcattcctgaactccataataccttattctgaatctttacttagcccttggatagcgacttcctgaccaccaatcaaggcctccccaaatctgggatagtgcacgaattgagcaacagcatttcggccttcgccgccggctgcaatagcccgagcgccagctagtggatctccttgatggagaacgtcgcgctgcggcatccctcttgcatggagaaccaatggaacttgcattggagatggaactcaagtggtcaatgtaaagctgaaaccacaagacgaaaaccaagacaaacaacctattcctgagtaccaacaaattttgttttttttaaaaaaagaggaagtgaccataggtgagaagtgattttgcttatgttaaatcacgttggccaatatagcaaatctttccttgaattatctgtgtgcatattcaaataaaagcactacatgcatgtaagatatttgttaagagaataataacccaaaaagatttaaggtttagtgtgtattgattaccaaagcgtaccgaaaaggatagcatccaaacttctgtcaggcagacagctagacaatcatatatattaggatcgatttggcagttagaataacttcattcctgaactccataataccttattctgaatctttactttggatagcgacttcctgaccaccaatcaaggcctccccaaatctgggatagtgcacgaattgagcaacaacatttaggccttcgccgccggctgcaacagcccgagcgccagctagtggatctccttgatggagaacgtcgcgctgcggcatccctcttgcatggagaaccaatggaacttgcattggagatggaactcaagtggtcaatgtaaagctgaaaccacaaaacgaaaaccaagacacacaacccattcctgagtaccaacaaattttgtttttttaaaaaaagaggaagtgaccataggtgagaagtgattttgcttatgttaaatcacgttggctaatatagcaaatctttccttgaattatctgtgtgcatattcaaataaaagaactacatgcatgtaaggtatttgttaagagaataataacccaaaaagatttaaggtttagtgtgtattgattaccaaagcgtaccgaaaaggatagcatccaaacttctgtcaggcagacaactagacaatcatatatattaggatcgatttggcagttagaataacttcattcctgaactgcataataccttattctgaatctttacttagcccttggatagcgacttcctgaccaccaatcaaggcctccccaaatctaggatagtgcacgaattgagcagcaacattttgaccttcgccg

SEQ ID NO: 72300 - DNA, 3144 bp, Zea Mays
attagataaggattagctaataaaaagaagatattatctctagttagttggataaggattagaagagatctcatagctcttattcttagatcagataaacatcagctaggatataaatacttgtaagagatcatctatagaattaagcttccctaagggagctaggagttggaatcaatctctcttacccgcacagcctaggtcagccacggcacccagtatcgccgcccccatctccctcgcttagctgttcatccttagcctagggagatccctagtaggatccgcaatcctaccaattagataagttacacacaacaaactgtaagatcaaataacttatagatcgttatggatttcctcacttccaattgagggcaaattgttctggtgaaaatacaacaatttgtgaaaagcactgaacacagcattcataatcctgtttctgacatgcactccacaccaaagggtcggagtaagctcaagttgcctcagggcgtgttgttttccttcagccattatagcctggaaaaacatatttaaacagagaagatgagagtgacagcagacatgtccaaggcaagaacaagcttggtaaaaacattatcattaactatggtgcataactaaaccatacagatgcgatgaagaatatctcggtagtcggtatggaaaagtgtatactcttcaattgcagaatgcagatgcacactaaggtatacaattttttggttgcagactacttactgaagtagatattgaacattcagtatctgtaacatatgacctagagaatttagcataagccatttaccactggtgtttcctcctcgacttcgtcgtctaaggcaccaccaggtgaagtcaacccaggacacattatgtttgcgccagatagaacaaatttgatagcacctctatccacttggaactttttcatgatatcaggatctgatcaaatgcaagcacagttttcatactagttaatatgctccaacaaatcaattttaacaatgacacagcccgaatagatgtatgacaaactgaaaaaggatgatccctaaatttgtttcgcacatcatgctatacatcttgaaaaatagggtgcatagatagaaaatttggaaggaagaaattacactgatgaagaagacgcagggttggcatgtaaggaccatcacgtatattgaaaaatagaggaacattattcaccactacaagattaagatgattttggctgcaggaagaaaggaataaactgttatcagtgaacttcatagaacacacaagtatgtttaatctgtttaatattatttcaccaaaacagtacaaatacgttttaagagaaaaaaattcaaaacaatttcaggtaagcaacattatgacaaaaaaaaacataatgtctggcagcaaacatgccaaacaagaaaaaaactactaaccatttaacaacaatcataggtgacttttttgggagcaagtcatctagcaaaggttcaaggctggggtactgcaatggagttaattttagtaagctaggcagaagattctgtaattgaaagggaaaatgaatagaaatccaagtagatttctttgtaatgacaaaacctcatcagcgatactttgccgaatctttcgttgtacagaagccttaacttgattctgtccagatatatcttctgaagagaacctggagatgtaaaatatcaaaagactaagtccatgttaaaactgacaaagattggcaacaaacgataaaaaagcctcgcctagatgattgtaagtcgcctggtcgatccatgggaccaaccaggcgactaatcaagattaagcgacgaccagggcgactagtcggtccctggttgtcctagaccttttagactagtggttatacttcagcaaacagcctacttgaagcctacaataatctaaaccaaatcatcatccaaatggaagcctgcatcagcaacttcagcagatccaaattcatcatcattgtcctcatccatttcatctgttgcatcacctttagactattgggttgtgtccctttgtcgctttctagaccaagaatatggctagaaactgcagcagcacgaggcaagttacagccccttagaccctctgctgcaccaacaacttcatccacattggcccaagtaatatcagcaaaaaccctaaatgtttggcgaccaggaactacaagtcggacgactaatcgccctaatcggcgactagtcggacgattaggacgactagacaagctaatcgagtcatccggctaatcgagtataaacaggcgactagcccgattaatcgggcttagtcggacgacttgcaatcactggcctagagttcaaccactttgcagtccatgatccgttttgtatctgatagtcataaggtaatcaacaatgttttatatcatgattttaaaccagaaaaaaatacatgtataatttccaagttaagatcactactcatgggtcaactaataataatgtcatatctgctgattgttcttgatggaaacttccaccattcaagaaaccatcaatgtcatatgcttacaacaatctagaatgaattctagtatagagcacagaagacacaagtcagttacttcacttacttagtataatcatacattattaatggttctggtaaaatataaacaatccagaaaagaagtgacattacaacagcaatttagcactcttgttgatcaaactcaaacactaatgaggccacacttctaatttgagtccttaattaaactacagtgtaaattggttcttgtgaaatttacctgcagtcttgtcaccagtgatgttataaaacatgacatactacaagcatcttaattcttaatagagatgtagggaaattatacctgcactaatcctaaaagatgttaaaaaatcttggaaaaaaatttggctggccaaattatgataccgccaatatggaaacaaaccaggcaagccttgacattaaagctaataacttttagaaaattcaaaatgcacatataaaatatcacagtcaagattttcacaaagtatatagttcagtgaagctattgcactaataaatacactaaaaatcattttgagaagtaaacaacttcttagtgaaagggtt

SEQ ID NO: 72301 - DNA, 2222 bp, Zea Mays
attagataaggattagctaataaaaagaagatattatctctagttagttggataaggattagaagagatctcatagctcttattcttagatcagataaacatcagctaggatataaatacttgtaagagatcatctatagaattaagcttccctaagggagctaggagttggaatcaatctctcttacccgcacagcctaggtcagccacggcacccagtatcgccgcccccatctccctcgcttagctgttcatccttagcctagggagatccctagtaggatccgcaatcctaccaattagataagttacacacaacaaactgtaagatcaaataacttatagatcgttatggatttcctcacttccaattgagggcaaattgttctggtgaaaatacaacaatttgtgaaaagcactgaacacagcattcataatcctgtttctgacatgcactccacaccaaagggtcggagtaagctcaagttgcctcagggcgtgttgttttccttcagccattatagcctggaaaaacatatttaaacagagaagatgagagtgacagcagacatgtccaaggcaagaacaagcttggtaaaaacattatcattaactatggtgcataactaaaccatacagatgcgatgaagaatatctcggtagtcggtatggaaaagtgtatactcttcaattgcagaatgcagatgcacactaaggatgtgacctcttttaaggttaccaaacaagttttgaagaagttcttttatgttgggttcctaaggagaactcaaaatgagtttgacctcaaggtaaagaaaatcaggagcgacaatggatctgaattcaagaatcttcaagtagagaagtttcttgagaaagaaggcatcaagcatgagttctctactccctacacaccaaagtaaaatggtgtagcagagtggaagaacaggacactcatcgatatggctagaacaatgcttagagagtacaagacatctgagcggttttggtcaaaagccgtaaatacagcttgccatgccataaactggctctatcttcatcgcctcctcaagaagacgtcttacgggcttctaaccagtaacaaacccaatgtttcatactttcgtgtatttgggagcaaatgctacattttggttaagaaaggtaggcatttaaaatttgctccaaagctgtagaagggtttttactaggttatgattcaaatacaaaggcatttagggtcttcaacaaatcgtcgggtttagttgaaatctctagtgacgttgtatttgatgagactaatggctctccaagagagcaagttgatcttgatgatgtagatgaggatgaaattccaacggtcccgttgagaactatggcaataggtgatgtgcgatcaagatcaaccatcctcctccacattggtgcaaccccaactcaagatgaggaacaggtatctcaagatgcaggcatgaatcaagggagagcacatgaagaaaaggataaagaggaagaagtacaacaggcacctccaactcaagtttgggtcaccattcaaaggaatcatctagtggatcagattctgggtgacatcagtaagggagtaaccactcgttcacatttagctaatttctatgaacattactcttttgtttcttctattaagtctttcagggtagaagaagccttgcaggattcagactgggtgttggccatgtaggaagagctcaataacttcaagagaaatgaagtatggagtctggtgccacgtctaaagcaaaatgttgtgggaaccaagtgggtgttccgcaacaagcaagatgagcacggggtggtgacaaggaacaaggctcgacttgtggtaaaaggttatgcccaagtcgcaggtttggattttgaggagacttttactcttgtagctaggctcgagtcaatacgcatattattggcctatgttgctcaccactcgtttaagttgtttcaaatggacgtgaagagcgccttccacaatggaccaatcaaggaggaagtgtacgtggaacaaccccctggctttgaggatgataggtatcccgatcatgtgtataagctctctaaggcactctatggacttaagcaagctccaagagcatggtatgaatgccttagagactttctcatttctaatgctttcaaggtcgggaaagtagatcctactctttttactaagacttataattgtg

SEQ ID NO: 72302 - DNA, 978 bp, Zea Mays
attccaattattttcacaaatgtacgggtaagctgagctcccagcacaggcacaacaaccgacgaccgtcacggcagtgtgggaactttcgccagatcggcctcctcgtcgcgagctcggaggggaggggagcacgccatcgtcgtcggagttgaagccgaagtagagccggctccgcgtcgtcgagtttaggtggcttctatataagaaggcctcacaagtgctatatctacattttgcattgaagagacgtgcatttcttgaagaattccatgagaaacaagaacaggtcaaagaatggcttcaaaatttggggataggggagcatgtgccagttgtacatgatgatgatgaagccgatgatgtgcatgttccttcacagcatgacgaaaactctgtcaaaaacaggaatgtcccttcaagtgctgttttacctgttattcgacctgcccttggccgtcagcaatcaatttctgatcgtgcaaaggctgccatgcaagaatacttgaaccatttcttgggaaacttggatattgtcaactcaagagaggtctgcaagtttttggaagtttcactgttatcatttctgccagaatatgggcctaagctaaaggaagattatgttacagcaaggcacttgccgaaaattgagatggacagtaaagagagatactgttcatcctgttgttttagtttttgcagtagtagctggcaaaaggtttgggctgtactgaagccaggattcttggctttacttcaagatccatttgatcctaagctcttggacataattattttcgatgtgtcaccttgcactgatagagatggagatgaccaaaccactctagcaaaggagataaaggaacgtaatccattgcattttggatttgaggtatttcgtttccatttatgacttgcttggtctagcatcttgacatatcactccaatcaaataactaatattagagtctctcccgt

SEQ ID NO: 72303 - DNA, 1630 bp, Zea Mays
gtcacggcagtgtgggaactttcgccagatcggcctcctcgtcgcgagctcggaggggaggggagcacgccatcgtcgtcggagttgaagccgaagtagagccggctccgcgtcgtcgaggtccgcttcgcgcgtggctgttcccgcgtcgtcgagacgcgcggtcgacgagcgccgcctccgcatgcttgagacgcgcggcccgacgaggcacgcggccgacgagcgccgcttccgcgtgctcgaggcgcgcggccgtggagctccgactcgcgcgcggctgttccagcgcggcctctcaacagtggctcaaaatttggcgtgcaaccttcgctcaaccaaacactagtctggcgtgcaacctttgctcaacggtgcctaaaaatttcaagatcattagggcgaggaaaaggcaaaagcaccccaaatttggcaggaagcacatcccacctgatcgtttacccttttcctgccacggcgcggcagtccagctcaccgcccctttccttcgttcctcgaaccgctcctccccttcggcttccgcttcgtgtctcgcccgcactcccaaacgccaaaacaaaccatccatataaatccccccgaggaatctatgaccggcgaggaggagcaggagcacggtggccacaggtacgtcaggatgcctccggagccgcccgagccggaggggttggccgccgcgtcgtcggcgtcgttccgcctgccggagtcggtgcgggtgttcgacgagctgccgcgggccaggatcgtccaggtctcgcgccctgacgccggggacatcacgcccatgctgctctcctacaccatcgaggtccactacaagcaggtggcttctatataagaaggcctcacaagtgctatatctacattttgcattgaagagacgtgcatttcttgaagaattccatgagaaacaagaacaggtcaaagaatggcttcaaaatttggggataggggagcatgtgccagttgtacatgatgatgatgaagccgatgatgtgcatgttccttcacagcatgacgaaaactctgtcaaaaacaggaatgtcccttcaagtgctgttttacctgttattcgacctgcccttggccgtcagcaatcaatttctgatcgtgcaaaggctgccatgcaagaatacttgaaccatttcttgggaaacttggatattgtcaactcaagagaggtctgcaagtttttggaagtttcactgttatcatttctgccagaatatgggcctaagctaaaggaagattatgttacagcaaggcacttgccgaaaattgagatggacagtaaagagagatactgttcatcctgttgttttagtttttgcagtagtagctggcaaaaggtttgggctgtactgaagccaggattcttggctttacttcaagatccatttgatcctaagctcttggacataattattttcgatgtgtcaccttgcactgatagagatggagatgaccaaaccactctagcaaaggagataaaggaacgtaatccattgcattttggatttgaggtatttcgtttccatttatgacttgcttggtctagcatcttgacatatcactccaatcaaataactaatattagagtctctcccgt

SEQ ID NO: 72304 - DNA, 2400 bp, Zea Mays
cttgattcgtatagcacctcacatccaaatatgcaacacatagataaggagaaggtgggaggcacaagaacgaggagatcaagttgcctctgtgcttgatgttggagaagttggtccccgagcagcatgtcgttgccagtggcctatggcgcgacgcagtggcctgtgggtggagggaggggggagccgaggtcagtgggtcgttagaagtgttggcccatggtcagcaggaacagctcaaatcgaaggaagcatccataatgcctatttttctcttattgaaaaggcagaacattttgtttacatcgagaatcagtttttcatttcaggtctttcaggggatgacacaattaagaatcgtgtattagaagcactatataggcgcatacttagagcagaaaaagagaaaaggcgcttccgggttattattgtcataccacttttacctggttttcagggtggcattgatgatggtggagctgcgtctgtgagggcaattatgcattggcaataccgaactatttgtagaggacctaattcaattcttaaaaatctgtatgatgtggttggctcgaaggcggatgattatatctcattttatgggcttagagcacatggaagatcagatgatgggggtcctctggtcaccaatcagatatatgtgcacagtaaattgatgattattgatgatcgcatggcattgattggctcagccaacataaatgatagaagcttgcttggatctagggattctgagattggtataattattgaagataaagaggttgtcagttctataatggatggaagaccttgggaagctggaaagttctccctcagcctacgactttctctatgggcagaacaccttggtcttcttccaggagaggttagttgcattatggatcctgtggatgattcagcgtacaaaaacatctggatggccactgctaaggtgagtgtagcggagatactttatgttgacccattatttatttgaagctattaagttagagattgaactgttttgttttgaactaaccactaaaccaggaaccatttgagtgactatctgtcactgcacctgtctatcgatgccgtaatttcattatctaatgattttttcattacatttttttacaataagattgatacatctgagtaccaaaacttatttggtcccccgggtcctctcaactgaacaaactgatatatgacaggagaataccgtgatctaccatcaagtattctcatgtgttcccaacgatcacatccattctaggtatcaatttcgccaaagttttgctcatcgtaaggagaaaattggccacacaaccatagacttgggtgttgccttagaaaacctggaaacgcaacaggagggagacctggcatgtgccaaaccaatggaacggttgcaggacgttcggggtcatattgtttgcttccctttggagttcatgtgccaagaggacttgagacctttcttcagtgagagcgagtattatacatctccacaagttttccattagggcttgttcggttatttcaatttcatgtggattggtgtgtattggagtgaattaggatgaattttgacttgctatggatttaaactgactcaataccatctaatccacatggattaatgttgaaacgaacaagcccttagtgtttattttcccgcttttggcgaaagtccgcccataggtacatgttatagggttattatacttgtatatgcctagatcgtgtctcgtgcctggatgaataggaaaaacaaaaacaaaggaacaaccatatccttgctagtttcgggtatataggatatgacggccaagatttgtacagatcgtttatcagagttagttcgggcagcagatgttgccctattagatgaattcttttatgcaaaataaaatgcacttaaagctgaatttgatgccttgtagtcttgtacattgagcattggcagattctgttgaaatttgttatctgatcattattgtggatgtggtactttggaagtttctgtgaggcagtgagggcacatttggtatattgttttatctaatgtaatcattgttttataggcaattaaatgtacatgctgagacgaattattggaatttcattcgttctaaattataggttgagttttgtcttaaataggttatcaatcaactaaggtcactggagtgtacttcatctgatccaaatcataatttagcctccgtttgttcctttagttcagagactaaagtttagtctctatcttttttggttttagagactaaactattcaaaacatattaaatgaattataagaagactaaattatcccttagtattctcccaccattaatgcaactgaaataaagaaggaacaaaaagtgaaat

SEQ ID NO: 72305 - DNA, 2148 bp, Zea Mays
cttgattcgtatagcacctcacatccaaatatgcaacacatagataaggagaaggtgggaggcacaagaacgaggagatcaagttgcctctgtgcttgatgttggagaagttggtccccgagcagcatgtcgttgccaggtcgttagaagtgttggcccatggtcagcaggaacagctcaaatcgaaggaagcatccataatgcctatttttctcttattgaaaaggcagaacattttgtttacatcgagaatcagtttttcatttcaggtctttcaggggatgacacaattaagaatcgtgtattagaagcactatataggcgcatacttagagcagaaaaagagaaaaggcgcttccgggttattattgtcataccacttttacctggttttcagggtggcattgatgatggtggagctgcgtctgtgagggcaattatgcattggcaataccgaactatttgtagaggacctaattcaattcttaaaaatctgtatgatgtggttggctcgaaggcggatgattatatctcattttatgggcttagagcacatggaagatcagatgatgggggtcctctggtcaccaatcagatatatgtgcacagtaaattgatgattattgatgatcgcatggcattgattggctcagccaacataaatgatagaagcttgcttggatctagggattctgagattggtataattattgaagataaagaggttgtcagttctataatggatggaagaccttgggaagctggaaagttctccctcagcctacgactttctctatgggcagaacaccttggtcttcttccaggagaggttagttgcattatggatcctgtggatgattcagcgtacaaaaacatctggatggccactgctaagattgatacatctgagtaccaaaacttatttggtcccccgggtcctctcaactgaacaaactgatatatgacaggagaataccgtgatctaccatcaagtattctcatgtgttcccaacgatcacatccattctaggtatcaatttcgccaaagttttgctcatcgtaaggagaaaattggccacacaaccatagacttgggtgttgccttagaaaacctggaaacgcaacaggagggagacctggcatgtgccaaaccaatggaacggttgcaggacgttcggggtcatattgtttgcttccctttggagttcatgtgccaagaggacttgagacctttcttcagtgagagcgagtattatacatctccacaagttttccattagggcttgttcggttatttcaatttcatgtggattggtgtgtattggagtgaattaggatgaattttgacttgctatggatttaaactgactcaataccatctaatccacatggattaatgttgaaacgaacaagcccttagtgtttattttcccgcttttggcgaaagtccgcccataggtacatgttatagggttattatacttgtatatgcctagatcgtgtctcgtgcctggatgaataggaaaaacaaaaacaaaggaacaaccatatccttgctagtttcgggtatataggatatgacggccaagatttgtacagatcgtttatcagagttagttcgggcagcagatgttgccctattagatgaattcttttatgcaaaataaaatgcacttaaagctgaatttgatgccttgtagtcttgtacattgagcattggcagattctgttgaaatttgttatctgatcattattgtggatgtggtactttggaagtttctgtgaggcagtgagggcacatttggtatattgttttatctaatgtaatcattgttttataggcaattaaatgtacatgctgagacgaattattggaatttcattcgttctaaattataggttgagttttgtcttaaataggttatcaatcaactaaggtcactggagtgtacttcatctgatccaaatcataatttagcctccgtttgttcctttagttcagagactaaagtttagtctctatcttttttggttttagagactaaactattcaaaacatattaaatgaattataagaagactaaattatcccttagtattctcccaccattaatgcaactgaaataaagaaggaacaaaaagtgaaat

SEQ ID NO: 72306 - DNA, 2321 bp, Zea Mays
cttgattcgtatagcacctcacatccaaatatgcaacacatagataaggagaaggtgggaggcacaagaacgaggagatcaagttgcctctgtgcttgatgttggagaagttggtccccgagcagcatgtcgttgccaggtcgttagaagtgttggcccatggtcagcaggaacagctcaaatcgaaggaagcatccataatgcctatttttctcttattgaaaaggcagaacattttgtttacatcgaggtctttcaggggatgacacaattaagaatcgtgtattagaagcactatataggcgcatacttagagcagaaaaagagaaaaggcgcttccgggttattattgtcataccacttttacctggttttcagggtggcattgatgatggtggagctgcgtctgtgagggcaattatgcattggcaataccgaactatttgtagaggacctaattcaattcttaaaaatctgtatgatgtggttggctcgaaggcggatgattatatctcattttatgggcttagagcacatggaagatcagatgatgggggtcctctggtcaccaatcagatatatgtgcacagtaaattgatgattattgatgatcgcatggcattgattggctcagccaacataaatgatagaagcttgcttggatctagggattctgagattggtataattattgaagataaagaggttgtcagttctataatggatggaagaccttgggaagctggaaagttctccctcagcctacgactttctctatgggcagaacaccttggtcttcttccaggagaggttagttgcattatggatcctgtggatgattcagcgtacaaaaacatctggatggccactgctaaggtgagtgtagcggagatactttatgttgacccattatttatttgaagctattaagttagagattgaactgttttgttttgaactaaccactaaaccaggaaccatttgagtgactatctgtcactgcacctgtctatcgatgccgtaatttcattatctaatgattttttcattacatttttttacaataagattgatacatctgagtaccaaaacttatttggtcccccgggtcctctcaactgaacaaactgatatatgacaggagaataccgtgatctaccatcaagtattctcatgtgttcccaacgatcacatccattctaggtatcaatttcgccaaagttttgctcatcgtaaggagaaaattggccacacaaccatagacttgggtgttgccttagaaaacctggaaacgcaacaggagggagacctggcatgtgccaaaccaatggaacggttgcaggacgttcggggtcatattgtttgcttccctttggagttcatgtgccaagaggacttgagacctttcttcagtgagagcgagtattatacatctccacaagttttccattagggcttgttcggttatttcaatttcatgtggattggtgtgtattggagtgaattaggatgaattttgacttgctatggatttaaactgactcaataccatctaatccacatggattaatgttgaaacgaacaagcccttagtgtttattttcccgcttttggcgaaagtccgcccataggtacatgttatagggttattatacttgtatatgcctagatcgtgtctcgtgcctggatgaataggaaaaacaaaaacaaaggaacaaccatatccttgctagtttcgggtatataggatatgacggccaagatttgtacagatcgtttatcagagttagttcgggcagcagatgttgccctattagatgaattcttttatgcaaaataaaatgcacttaaagctgaatttgatgccttgtagtcttgtacattgagcattggcagattctgttgaaatttgttatctgatcattattgtggatgtggtactttggaagtttctgtgaggcagtgagggcacatttggtatattgttttatctaatgtaatcattgttttataggcaattaaatgtacatgctgagacgaattattggaatttcattcgttctaaattataggttgagttttgtcttaaataggttatcaatcaactaaggtcactggagtgtacttcatctgatccaaatcataatttagcctccgtttgttcctttagttcagagactaaagtttagtctctatcttttttggttttagagactaaactattcaaaacatattaaatgaattataagaagactaaattatcccttagtattctcccaccattaatgcaactgaaataaagaaggaacaaaaagtgaaat

SEQ ID NO: 72307 - DNA, 2074 bp, Zea Mays
cttgattcgtatagcacctcacatccaaatatgcaacacatagataaggagaaggtgggaggcacaagaacgaggagatcaagttgcctctgtgcttgatgttggagaagttggtccccgagcagcatgtcgttgccaggtcgttagaagtgttggcccatggtcagcaggaacagctcaaatcgaaggaagcatccataatgcctatttttctcttattgaaaaggcagaacattttgtttacatcgaggtctttcaggggatgacacaattaagaatcgtgtattagaagcactatataggcgcatacttagagcagaaaaagagaaaaggcgcttccgggttattattgtcataccacttttacctggttttcagttaattgttttatttcagggtggcattgatgatggtggagctgcgtctgtgagggcaattatgcattggcaataccgaactatttgtagaggacctaattcaattcttaaaaatctgtatgatgtggttggctcgaaggcggatgattatatctcattttatgggcttagagcacatggaagatcagatgatgggggtcctctggtcaccaatcagatatatgtgcacagtaaattgatgattattgatgatcgcatggcattgattggctcagccaacataaatgatagaagcttgcttggatctagggattctgagattggtataattattgaagataaagaggttgtcagttctataatggatggaagaccttgggaagctggaaagttctccctcagcctacgactttctctatgggcagaacaccttggtcttcttccaggagaggttagttgcattatggatcctgtggatgattcagcgtacaaaaacatctggatggccactgctaaggagaataccgtgatctaccatcaagtattctcatgtgttcccaacgatcacatccattctaggtatcaatttcgccaaagttttgctcatcgtaaggagaaaattggccacacaaccatagacttgggtgttgccttagaaaacctggaaacgcaacaggagggagacctggcatgtgccaaaccaatggaacggttgcaggacgttcggggtcatattgtttgcttccctttggagttcatgtgccaagaggacttgagacctttcttcagtgagagcgagtattatacatctccacaagttttccattagggcttgttcggttatttcaatttcatgtggattggtgtgtattggagtgaattaggatgaattttgacttgctatggatttaaactgactcaataccatctaatccacatggattaatgttgaaacgaacaagcccttagtgtttattttcccgcttttggcgaaagtccgcccataggtacatgttatagggttattatacttgtatatgcctagatcgtgtctcgtgcctggatgaataggaaaaacaaaaacaaaggaacaaccatatccttgctagtttcgggtatataggatatgacggccaagatttgtacagatcgtttatcagagttagttcgggcagcagatgttgccctattagatgaattcttttatgcaaaataaaatgcacttaaagctgaatttgatgccttgtagtcttgtacattgagcattggcagattctgttgaaatttgttatctgatcattattgtggatgtggtactttggaagtttctgtgaggcagtgagggcacatttggtatattgttttatctaatgtaatcattgttttataggcaattaaatgtacatgctgagacgaattattggaatttcattcgttctaaattataggttgagttttgtcttaaataggttatcaatcaactaaggtcactggagtgtacttcatctgatccaaatcataatttagcctccgtttgttcctttagttcagagactaaagtttagtctctatcttttttggttttagagactaaactattcaaaacatattaaatgaattataagaagactaaattatcccttagtattctcccaccattaatgcaactgaaataaagaaggaacaaaaagtgaaat

SEQ ID NO: 72308 - DNA, 2075 bp, Zea Mays
cttgattcgtatagcacctcacatccaaatatgcaacacatagataaggagaaggtgggaggcacaagaacgaggagatcaagttgcctctgtgcttgatgttggagaagttggtccccgagcagcatgtcgttgccaggtcgttagaagtgttggcccatggtcagcaggaacagctcaaatcgaaggaagcatccataatgcctatttttctcttattgaaaaggcagaacattttgtttacatcgagaatcagtttttcatttcaggtctttcaggggatgacacaattaagaatcgtgtattagaagcactatataggcgcatacttagagcagaaaaagagaaaaggcgcttccgggttattattgtcataccacttttacctggttttcagggtggcattgatgatggtggagctgcgtctgtgagggcaattatgcattggcaataccgaactatttgtagaggacctaattcaattcttaaaaatctgtatgatgtggttggctcgaaggcggatgattatatctcattttatgggcttagagcacatggaagatcagatgatgggggtcctctggtcaccaatcagatatatgtgcacagtaaattgatgattattgatgatcgcatggcattgattggctcagccaacataaatgatagaagcttgcttggatctagggattctgagattggtataattattgaagataaagaggttgtcagttctataatggatggaagaccttgggaagctggaaagttctccctcagcctacgactttctctatgggcagaacaccttggtcttcttccaggagaggttagttgcattatggatcctgtggatgattcagcgtacaaaaacatctggatggccactgctaaggagaataccgtgatctaccatcaagtattctcatgtgttcccaacgatcacatccattctaggtatcaatttcgccaaagttttgctcatcgtaaggagaaaattggccacacaaccatagacttgggtgttgccttagaaaacctggaaacgcaacaggagggagacctggcatgtgccaaaccaatggaacggttgcaggacgttcggggtcatattgtttgcttccctttggagttcatgtgccaagaggacttgagacctttcttcagtgagagcgagtattatacatctccacaagttttccattagggcttgttcggttatttcaatttcatgtggattggtgtgtattggagtgaattaggatgaattttgacttgctatggatttaaactgactcaataccatctaatccacatggattaatgttgaaacgaacaagcccttagtgtttattttcccgcttttggcgaaagtccgcccataggtacatgttatagggttattatacttgtatatgcctagatcgtgtctcgtgcctggatgaataggaaaaacaaaaacaaaggaacaaccatatccttgctagtttcgggtatataggatatgacggccaagatttgtacagatcgtttatcagagttagttcgggcagcagatgttgccctattagatgaattcttttatgcaaaataaaatgcacttaaagctgaatttgatgccttgtagtcttgtacattgagcattggcagattctgttgaaatttgttatctgatcattattgtggatgtggtactttggaagtttctgtgaggcagtgagggcacatttggtatattgttttatctaatgtaatcattgttttataggcaattaaatgtacatgctgagacgaattattggaatttcattcgttctaaattataggttgagttttgtcttaaataggttatcaatcaactaaggtcactggagtgtacttcatctgatccaaatcataatttagcctccgtttgttcctttagttcagagactaaagtttagtctctatcttttttggttttagagactaaactattcaaaacatattaaatgaattataagaagactaaattatcccttagtattctcccaccattaatgcaactgaaataaagaaggaacaaaaagtgaaat

SEQ ID NO: 72309 - DNA, 1189 bp, Zea Mays
agatgacaggagaataccgtgatctaccatcaagtattctcatgtgttcccaacgatcacatccattctaggtatcaatttcgccaaagttttgctcatcgtaaggagaaaattggccacacaaccatagacttgggtgttgccttagaaaacctggaaacgcaacaggagggagacctggcatgtgccaaaccaatggaacggttgcaggacgttcggggtcatattgtttgcttccctttggagttcatgtgccaagaggacttgagacctttcttcagtgagagcgagtattatacatctccacaagttttccattagggcttgttcggttatttcaatttcatgtggattggtgtgtattggagtgaattaggatgaattttgacttgctatggatttaaactgactcaataccatctaatccacatggattaatgttgaaacgaacaagcccttagtgtttattttcccgcttttggcgaaagtccgcccataggtacatgttatagggttattatacttgtatatgcctagatcgtgtctcgtgcctggatgaataggaaaaacaaaaacaaaggaacaaccatatccttgctagtttcgggtatataggatatgacggccaagatttgtacagatcgtttatcagagttagttcgggcagcagatgttgccctattagatgaattcttttatgcaaaataaaatgcacttaaagctgaatttgatgccttgtagtcttgtacattgagcattggcagattctgttgaaatttgttatctgatcattattgtggatgtggtactttggaagtttctgtgaggcagtgagggcacatttggtatattgttttatctaatgtaatcattgttttataggcaattaaatgtacatgctgagacgaattattggaatttcattcgttctaaattataggttgagttttgtcttaaataggttatcaatcaactaaggtcactggagtgtacttcatctgatccaaatcataatttagcctccgtttgttcctttagttcagagactaaagtttagtctctatcttttttggttttagagactaaactattcaaaacatattaaatgaattataagaagactaaattatcccttagtattctcccaccattaatgcaactgaaataaagaaggaacaaaaagtgaaat

SEQ ID NO: 72310 - DNA, 2925 bp, Zea Mays
tcgccatcagccttatccaaatatccaggacgctacctcctcacagctctacgctcggcctccttcgtgtccgtgagctctcacttgcgtctccttcctagccatctcactggtcgcgcgcgcgagctcctctgcagccgctcgacgcccatgcttccgcccagctcgccggccatcaccttcctggccgcgcgcgctttctccctgcgcaggacgccgctgaccttgctccagcccagacgtcgtcatctccgacctccgaccctaatacctacagcacccagctcgtcccctccccagccgcatctcctaacgctcggccttcctctgcgtgagcgcgcagaactgtgcctgtcgtatgctcgtctctgccgagcaccgtctgccccagcgtcaccggcctccctgtgccggcgtcgtgttctggtggccgagcatcgtcaccagcgctccttccttaacttcggcagcgcatgctcttctccaagccgacgctccggcagtggcgtgctcggcagactcgcgccctcccggtagctcgcgtgatgttaaatccggtggccgatctcgcctccaccggtaacttcacttcgcaactcacctattgttgtggtgctcctatgccacgacacttatgccggtgcatcgtccgtgccttgtgtttgtgctggcacgctagctgatcacgtatgtggaggacaagagccgggtcgaccccaagatgatgtaacgaatcggttactccacaaggtgatgctggtggatcaacctgaaggtggacatgctgaacaagtgccaacacaaaaggctggtcatcaagtggtcgtcgtctaacaaacactaacctagtgttattccaggcaagccccggtgcatgcaaccccttccttgtgttttaaataatttttatacactttaagtctagcgaaatgtgcattagatttataggagttgcttggaaaccctttgatgcattgcctaccttgaaatccatccctttatagatacttctgatgaagtatcaaaatatgatttacaaaaatgcttagccttgcctagaggtaaatcttgcggatagaggctgtcctttacgctaatgcctagctcaggggttatcctgaggaaggatggcttctgcctgcaagaatattttcattgggagcagtggtgggatcttactgcaaagttccctataatgctcttttcatccaaaggaacacaaacaatcctaagggtggaagtacttaaatcgagacttgggttaggaacaggtgatgttctacccaggttgattaaggattatagtgaatgtaggcttgatgaccgaggaccttttaactggtcacatgccttatcatgggtaagcgcctcgggcagactaataccagaataagataacacgcaatgggagtggagagatagcgagagtagcgtgtaccctccgtggcaagaggctggacggtggtgtatctgtgctctcggttggcgtgaacctgatctggtcttaagaaccccggtggcgagttgacatatgcaagggttaagtgctacatatgtcgtgtgattggagatccccagctgggtattaatcgattcatgatcgccgttacttctcggatatgaagacttggtcattgacttgcaatctaagtcatggatggaatcataatgagcaaaaatcgtgttgtatggattaatgtgatgatgaaattagactagatgcaaacaaggtctattaatacttaatctagcattaaaatgttgaaagtaaggatccactcatagtaagcttttctgcaaacagagtccttgattcttgataagccttaccttgaatccttttaaaaccagcatacccttgagagtctcttctttagtcgggtaagtcttgctgagtacttgcgtacttagggttttacccattgttgctgcaggttacgagtcacttgattgtgattggtgttaagcgccggtgggcacgaccttctataaatctaagtacttcttctatacttcttattgaggatggtcacttaagctagcatatatttcaaacttataaacaatttataataattcaaagttatttctttgaatcacttttgtaatcactctgatcatgtacattgtaaaacttgatgtaacatgtaaaatttggtaataagatttccgctgcaaaattgttggtgtgtgatttgtgtttacttaatcccgcggttctggttgtaagtggtttatccgaggttgttggggcactcagacagatcctgttaagttatctggtgcacatgcatagccgtctaaggtctttgagacaagggcatgtgcatgtgggcccaataacttgggaggttctgccatacccttggttgtgattgcctctgtcttcactttgactgggattgtgtattgttctaagatgccttgggtggagccttcctccgaagcccctggtcatctcagaatatctataagcttgctcccttctttctcggaaatcgttgtcggctctgatgtactcatccatcttctggagaagcttctccaaggtttgtgggggctttctggcaaaatactgtgttgttggtcctggacaaagccccttgatcatggcttcaatgacaatcttatttggcaccgttggtgcctgagctctgagacacagaaaccttcggacgtatgcctgcagatactcctcatggtcttgtgtgcactgaaataagtcttgagcagtcaccaactttgtctaaaacccctgaaagctgatgactaacatatccttgaacttcttccatgatgtgattgttcttagcctaagagaaaatatcaggtttgagcaacacttctgactgccatgacgaaggattttgtcatgacaacattgttgccaccatatgatgatatggttgtttcgtagctcatgag

SEQ ID NO: 72311 - DNA, 1870 bp, Zea Mays
gtgagtgttttgcttggtgtgtatagtttgctgtttcgtgatgtttgcattagatttgattaatctagagaagcgtgattattgcgcttggtcgtatgtcgataactagtgtttgctgatgaagtgttatagtgcctcatcattaagtacttaattttatattgtggagcatcataatatcttgtgttactcttccttgttctcaatcatgtgcatcatgcatttcattaggcacgctagctgatcacgtatgtggaggacaagagccgggtcgaccccaagatgatgtaacgaatcggttactccacaaggtgatgctggtggatcaacctgaaggtggacatgctgaacaagtgccaacacaaaaggctggtcatcaagtggtcgtcgtctaacaaacactaacctagtgttattccaggcaagccccggtgcatgcaaccccttccttgtgttttaaataatttttatacactttaagtctagcgaaatgtgcattagatttataggagttgcttggaaaccctttgatgcattgcctaccttgaaatccatccctttatagatacttctgatgaagtatcaaaatatgatttacaaaaatgcttagccttgcctagaggtaaatcttgcggatagaggctgtcctttacgctaatgcctagctcaggggttatcctgaggaaggatggcttctgcctgcaagaatattttcattgggagcagtggtgggatcttactgcaaagttccctataatgctcttttcatccaaaggaacacaaacaatcctaagggtggaagtacttaaatcgagacttgggttaggaacaggtgatgttctacccaggttgattaaggattatagtgaatgtaggcttgatgaccgaggaccttttaactggtcacatgccttatcatgggtaagcgcctcgggcagactaataccagaataagataacacgcaatgggagtggagagatagcgagagtagcgtgtaccctccgtggcaagaggctggacggtggtgtatctgtgctctcggttggcgtgaacctgatctggtcttaagaaccccggtggcgagttgacatatgcaagggttaagtgctacatatgtcgtgtgattggagatccccagctgggtattaatcgattcatgatcgccgttacttctcggatatgaagacttggtcattgacttgcaatctaagtcatggatggaatcataatgagcaaaaatcgtgttgtatggattaatgtgatgatgaaattagactagatgcaaacaaggtctattaatacttaatctagcattaaaatgttgaaagtaaggatccactcatagtaagcttttctgcaaacagagtccttgattcttgataagccttaccttgaatccttttaaaaccagcatacccttgagagtctcttctttagtcgggtaagtcttgctgagtacttgcgtacttagggttttacccattgttgctgcaggttacgagtcacttgattgtgattggtgttaagcgccggtgggcacgaccttctataaatctaagtacttcttctatacttcttattgaggatggtcacttaagctagcatatatttcaaacttataaacaatttataataattcaaagttatttctttgaatcacttttgtaatcactctgatcatgtacattgtaaaacttgatgtaacatgtaaaatttggtaataagatttccgctgcaaaattgttggtgtgtgatttgtgtttacttaatcccgcggttctggttgtaagtggtttatccgaggttgttggggcactcagacagatcctgttaagttatctggtgcacatgcatagccgtctaaggtct

SEQ ID NO: 72312 - DNA, 484 bp, Zea Mays
gtcgtgctcgtctccggtgctcgcttcggtcgctgatgctgtcaagcccgtcgttttcccggccctgtgctcgcgcggctttctgcttgccagcgcgccctctcgactcgctcggccttaatccctattgcgtcgtcgacctcgccgcgacttagttcgtccatcgtgctggtcgttgacccctactgtgcttattagctcggatcctgccccagcttgtcgtcgcgtcgttcacagtcgaatcgtcaaaaccgtcatccccagctagatccccacctcaccagctcgctccaaacacgatctcattgtcgtcccgcacgtcagcaagaagaaagaagcgaggaatcctcttttcgactctgactcccccagcagcatggtgttcaccaagtgcgcgacaaaaagctcggacatcctgctggactcaagttcggttcgtcaaaattattgacttgagaaaaagatctgctgcaattgattaccg

SEQ ID NO: 72313 - DNA, 1078 bp, Zea Mays
cacctctgaatcaagaagcaactaggcatggacgaccgcacctacaagggcggcatcaaggcgtactggaagcgccggggctactaccgcaagggcggcatcaaggcgtactggaagcgccggggctactaccgcatggacggcgacgccgcgcggcgccgccagccgctccccaccgtggagctcggaggtggcgtcgcccaggcccaggcccaggcccagccgccgacgggggatggctcgggccggcgccggcgccgcgggtggcgcgtgcgccgcggccagctggggcggcggctgctccgcgcgctgtcccctcgccggtggctcatgcggctccgcgacgcgtacgtgtccgccatgctgcggctggcctcctcccccgccgtcgggtacggcgccggcgcgcccttctgcgccacggcgacccacggcgcggcggcggcggcggccttcgcgcggccggcgcagctcaaggagtacgacgagaaggtgctggtggagatctacaggtccatactcgcgcgcggcgggcctctcgccggcgcgcctgccgccgccacgctgcggctaccgacggctgtttgagcttgagcggcagaagagacgtgtgttcttcttgcttatttttattcttatgtgtcgcgacttgtactgagttgtaacttgcgtgcgccccacaagctagcgtttcttcttcgttcccaattcgatatcatcaagtcttatgttatgggcttggagtccaaagtctggtgcatattttttgcaccgcgggggaaaaaaaacgggctctgtctagtttgtctgctatactagtgcgagtgcatctatagtgaaaatgtttctattgatgaagaagaacaaaaaaaatgcttggcatctctactttgttaacaaggcaagatttagatcccgtttgacaggctatggctcttttaaaattaacttcggcttcagctcctttaaaagagcagctcctcctcaagagccgatattttttttacatatcattcggcaaaacagctcttgccgttttttttttgtttggtacatacatacgtcaccggtctcaatc

SEQ ID NO: 72314 - DNA, 7497 bp, Zea Mays
cggctcccccagcaacatccgcctccgaactccgaatcaactacgcccccgacgagcgattgagcgcgagtcaaaaaaaggaccgccaaggaagcgagcgcggaatcaggcgagatccccttcgcctacgacgccagtaggctcgagaatcgcgtccagctcgaggccgaccgagagcgcgtgcaggcagctgctgggcctgcagttccaccacacgtccggcgacctctactacggcgacgcgtacctggggctgatgggcggcgggcgccgcgacgggctggcggaggcggtggcggtgcgccactcaacttcgtcaacagcgtggaggtcgacctggagaccggcgacgtctacttcaccgacagcaacaccacgtactagcggaggtacatacgatcccacgccacaactagagagtccaactccgcctcctactccacgtcgtgcgcggtgcgccgacgccgccactatcgctgacgccgaacgctgcatgtcctcctccccgctagcgcctctgaagccgagtccaactcatgtcgtgcgccgccgccactacggcgccgaccccagctctgcggtttctacgctatggctgcttctctgttttggtctattgatcagaacttcagaagaatattatctcttggagtaccataattgcagggcattaacagaacaaaatatatcatgtgggtgtcggtttgtttactgaaatggttgcttcaggcataaaactaaactctactaccctagcaagcatacttgctagctttttagagctgaggttattgaggtatgaaaaaaattcattgcttctccttaagaaatggaccggaacacagtgattttgtagtcagtgcactaggggatcagaaattttgtttttgaattcaagccgaagaatgatttggtaattttgaattcaatgatcagaggatatgctgtgaatgaggatttagagtctacattaggcctattaagggcactgctgaaagagacttagacttgatcatgtgactgttgttttagttcttcctctatgcaatcaaaactcgaggctcctccaggttaaggaactacatgattattccattaggcataacataagttcatgttgctcagttactaacgcacttataaatatctactgcaagtgtggctgcctagaaatagccagcaagatttttcttctgatgaccgagagaaatgtttttacatataccactctgatttgttctctaggaaagcatggccatgcagaacatgcattcgttctttttgtcctaatgaagagggatgtagtttctccagataaagtgacttcttagctctgttatcatgttgtagcaatgaagactttactagattgataatgtatgcgttccattgtcattcttgatatatgatttccctaattatgttgattacctatgctgcatagcagttctccatttatatttactatttttgaattgttgaattgtatatccgcaactaaaattctgccacttgcctctatgttcatagcacaccttatctgtttgaaaattgttgtttcttatgagtgcaacaactattgtacatttttggtccagttacttacgattagcagatttcttactagcagaggcagcatttttttgccattttctttaatttgtgacttgcgatatgtctgtagcacattgagctgttgtttgcaaaaacacaagggacaaacactatcacgctctaagttatcctgactagcactatgaatggaaacatcttccacattcattacatgctatatttatacctctaccaccaagacaaacacatcacttgtttttcacgatttttgagccatcgttacctgcatcagtgagatcttgcaatatccaaagcttctcttcactgtagatgaccgaatcatgcttcaatcttgatgcaataccaccaagaagatcaatagaaaagcaccgaacattagtgtccttagatttcaatccagcattgtgaaggagcaacacagagagaacctcaaggatagaagcagcagctggatgctccagcaagtttagtatcgttaggaaatcctgaacaagattatctattatttctttggtttccgacatatcttgagatttagcagcagtaactatagaaggagacaaagggatagtatttcacaatgcaatttttaccctatatatttgattcatatcagtttttgttaattccgtagcaacacatgggcactgtacgataatataatgcaacattttcgtgcacgaagccgtttcatgcgtcgcccgatccgtgcattcatgtgtcatccgctcgcatccgccccacacgcgacacaagatgcatgcttgttgtccaggtgcctagatggagtggactgtcgaacgcgcgagccaccatattcggcgatggttaccctttgccagatgaacaataggtttcttgtttactgtcttttgttgttagatacttcaatcaggtaggtagttagtgctccgtttatactggcatttcttgtcatatgatagtcacttcgggcttctgaatgctactatgaaactgttttttggtagtgaattttaatcatcttaaaataaatattcttactttgatttgggaagatttgtgttgacctatgaataagactttgactggaggtgcaattcactgtgcgcttccctgctatacagctgacatctgttttctgcctttcttttaccttctggcataagtcaattgttgccaaggcgcagaaataaattttattaggtatatcttgtttatgatcagatctcacggcttcggtggtgcctcaagtgtatgtcaggtagtagccctaagatttcatcagcattcttagcagtaattgctatagtatcaaatgggattgtggtacgagttgctcgattactaactgttgctatagagtgtgaagctaagtaggtaataacaaaaggggttaaggtttatgtgtggtgcttactgtatttgtttttattattttcttgtgctttatacatgtactgtcattcttttactctgatgttcttttactgcaaagttcgacacaatatatttttatatgaaagactgaagattacttagtattgttttctatttctgttatcctctttgcagatctatattaggatgatgaaaacagtgctacttgatgtgaagtccaccaatactatagatcagattaagtctaagatcggtgctttagaggggattgacaatagccctcaagcgctcttttttgctagaattatggtagcagtcaggtttcagatttctatgaattcggtgaataaaatgagcttattggcgttgtcaatctttttaaatttcctgaaattatgataaaagtatatagggtacctattcaaacaatatggctgttaactacatactatttttataagttacattgtattatgtagcagataaaaaggagaatatcttgtgtagttgttttcctaaattataataggcagtggttgtagctaaaatattattatcttgatataaagactactaaattatcacttttatgagaacaatgtgattatctggacagttcccttcaagttataaagtgtggtagcataattgcatttcagggaatcagtgcaaagcttgcagctgattctggtcggagaatggaccgttccctcctccctcctcccgccccttcccctcccgccccttcccctgccctccccgacggcgagtcccctgcccttcccggcgccatcctcccccacccatctctggcggccgccgtgcagccggcagtgcccttctccaccagccgcacgtcgtcccttaccccaagggcggcggccaccctccaggcgtcgggacgtcttcttcttcaccaggatctcgttcgctcgtcccactcttctggtcgcggcaaggctctcaggtggagagactccagcccttcgtcggattcgttggatgttgggagcccttcttcgttcaaggatatcctgctcgcgggaacggtctcggcctcagtctcggtgacgtctggggacatagtttcccatggcgcccaggctaggaccttgcaggcctccgtgcagaattcctctggtgatggtggacggtttgtccgtcggtcttccccactgcgctctttggttcagcccatgcgtcagaagcctctggtggatcgtgatggtttcacacttgtggagagtcgccgcacacagaagcagagacgccgcctggagaagtcgtttggtattcaagctctggagacctttaaaggacggtgcttcaagtgcctctcacctcatcaccgggttgccctctgccgttccatcatccgctgcctcctttgccatgcacctgggcatacatcctacacttgtccgcgtcgcctcccaccggtctgctcgcgcatggctggacgtctgcgtgctcctgttcatcggctgcctcctgtccatgcggcgcagtgctctgttgatgctgccgaggggccactcccagatgtgagtcgtggtagacggcgtcgcctggagtccgacatcgctgttgacgctggtgatggtgtctgcacggagccacattttgctcctacccggatcatcccatggtctccaagtttcaaccagaggactgaagtgcttgatcgtgccattgttctcacggtaactgtggccattaatgaagcagttgaggaagctattttggacagctttgcgcggcgactggcgcttgttcatgactcgctgtctatgtgtcgactgggtcctgcatgtcttcttcttattcttccaagtttagaaatggcggaccgtgcttttgatgggggcagaattgtgaatttatcccccacaactaaaatccatgttatgcggtggagcagaacccttaactcatctgcggcggcgtctctgcctttccaagttgagattgatgtgtctggcatccctgcacatgcttgggagttggaaactgtgcatgctctcctcaatgagtggtgctggattgctgatcttcacccagattgtgagcgtcagcgtgaggtgttcaaggttaccgcctggtgctccagcccgggctccatccccaaggagtttaaacttgaaattgttgatccggtcacaaccgatggtggcatgctgcgtcgttcattggtctaccctatccgggtgtcggtgaaggtccttgatcgaccggacatgttgcagtccctacagccgtcacctcctccggcggaggatgatcccgatcagggcaggcggcggaggcgacgtcgatctaggaggtcgtcttttggtattaatgctcccggaaaaggttcgactacagcggtcttgcctcgggtgtcggttcatcagcgacttgggccgcgcgtgcaagcctgtgggaaggaaggtgtcagggtgcctcgcctggcggtccataaacggctaggccctctggggatatttaacgctgataaaggtgcagtcaagaagatgaagcgagtttggattcccaagagaaagttggagtcatctgtgtctgtttggagtcctaagacatcgtctgctcttgtgtctccactcccggttgcggttgatgatgcatttttggaagctactagttctactgtcgttactgaagatactttggttggctctccagaggttattccagtggatggtggaatctgttcggaagctgctattatttctgatgctccagcccggtttcccatggttgaatctgttctgcaggacgtaaatgtcctctccgagggagtgggtcttcccttggttgaatctgatttccagaacattcaccttatggagtcttccttatcaaggaagcatcttatgtcaccaagtctgttagtttattccaggaaaagacatcaaaagctacagctgattgacagtattgatgagaatggcaatgtcggggctgctgcagatgctataatttctccagcttcggcgactggtttggctgctgatgggacatatcacgttggtcagggcccagtcattatcggggttgtggcagatgctattgtgtctccagccacggcaataacttttacaagttctgaacctatttcgagtttggttgagcctactgcggctgtggcagacattctgatgtctccagctggggtggctcccagtcttcttccttctccttctggcgagcaggagacttcccagtctttgcagagagaagagttcattaaatctgttactcggcaaccttctaaattgcttcctgctcctccagtcatcttgaagaagaaggacaacaaattgccctccagatcggtgccacgtcgcagccgcagagttgctggtgtaggcgttgaatttaatgcctctgaccttgacagacgtgctatcaagaaaatcatgaaggcagttggtataattgctgataatgtggggattgaccagagggctcaagaggagtatgctgatcttttcaagacatctttgtctgatattcatgtaaaagcccttgcagccttgtttggctggcaggttcctgaccaattgtagggtctaggattggatctgctttgtttttccttttgttgttctcatcgcccttgtgtcaatgaatccggaacgtgttctgatatggaatgtaagaggattaaattcctcggctaggcaagactcagtccgttctttagttacttcctcaaaaattgatatcatttgcttacaagaaactaaattggatgtcgttaccagaggggtcctcctatcagccttaggctccgagtttcttaattttatcgagctacctgctgttggcgccagtggtgggattttggtggcttggaaacaagatgtggttgtcacaggcacgcaatatatccggaataatagcgtctcagtacaatttctcaatggaaatgggagcccctggtggcttacttgtgtttatggaccgcagggaaataatgataagatcctattcctgcaggaactcagaaatttgagggggctgtgtcttggaccatggatgattgctggtgattttaatttgatctataaagctgaagataagaataccccacacttcaaccggggtatgatgggaagatttcgcaatctgatcaacgaccttgctctgagcgatcttcctctgaatggtagaaaatacatgtggtccaatcagcaggctaatcctaccttagtgaagttggacagggttttatgtaccttggattgggaggaaatgtttccgaattctctgcttcaaagtctggcctccaatgactctgatcattgtccccttcttttgggtttgagggataacatttcgggtaggcgcaggttccattttgaagctttttggcccaagattgatggttttttggaggttgttcagttggcatggcattctgtccctgtttcgaactgtcctttttccactctgaatcttaagttgaaagctgctgctaaagggctgcatgaatggagtgctaaaaaagttgga

SEQ ID NO: 72315 - DNA, 7260 bp, Zea Mays
cggctcccccagcaacatccgcctccgaactccgaatcaactacgcccccgacgagcgattgagcgcgagtcaaaaaaaggaccgccaaggaagcgagcgcggaatcaggcgagatccccttcgcctacgacgccagtaggctcgagaatcgcgtccagctcgaggccgaccgagagcgcgtgcaggcagctgctgggcctgcagttccaccacacgtccggcgacctctactacggcgacgcgtacctggggctgatgggcggcgggcgccgcgacgggctggcggaggcggtggcggtgcgccactcaacttcgtcaacagcgtggaggtcgacctggagaccggcgacgtctacttcaccgacagcaacaccacgtactagcggaggtacatacgatcccacgccacaactagagagtccaactccgcctcctactccacgtcgtgcgcggtgcgccgacgccgccactatcgctgacgccgaacgctgcatgtcctcctccccgctagcgcctctgaagccgagtccaactcatgtcgtgcgccgccgccactacggcgccgaccccagctctgcggtttctacgctatggctgcttctctgttttggtctattgatcagaacttcagaagaatattatctcttggagtaccataattgcagggcattaacagaacaaaatatatcatgtgggtgtcggtttgtttactgaaatggttgcttcaggcataaaactaaactctactaccctagcaagcatacttgctagctttttagagctgaggttattgaggtatgaaaaaaattcattgcttctccttaagaaatggaccggaacacagtgattttgtagtcagtgcactaggggatcagaaattttgtttttgaattcaagccgaagaatgatttggtaattttgaattcaatgatcagaggatatgctgtgaatgaggatttagagtctacattaggcctattaagggcactgctgaaagagacttagacttgatcatgtgactgttgttttagttcttcctctatgcaatcaaaactcgaggctcctccaggttaaggaactacatgattattccattaggcataacataagttcatgttgctcagttactaacgcacttataaatatctactgcaagtgtggctgcctagaaatagccagcaagatttttcttctgatgaccgagagaaatgtttttacatataccactctgatttgttctctaggaaagcatggccatgcagaacatgcattcgttctttttgtcctaatgaagagggatgtagtttctccagataaagtgacttcttagctctgttatcatgttgtagcaatgaagactttactagattgataatgtatgcgttccattgtcattcttgatatatgatttccctaattatgttgattacctatgctgcatagcagttctccatttatatttactatttttgaattgttgaattgtatatccgcaactaaaattctgccacttgcctctatgttcatagcacaccttatctgtttgaaaattgttgtttcttatgagtgcaacaactattgtacatttttggtccagttacttacgattagcagatttcttactagcagaggcagcatttttttgccattttctttaatttgtgacttgcgatatgtctgtagcacattgagctgttgtttgcaaaaacacaagggacaaacactatcacgctctaagttatcctgactagcactatgaatggaaacatcttccacattcattacatgctatatttatacctctaccaccaagacaaacacatcacttgtttttcacgatttttgagccatcgttacctgcatcagtgagatcttgcaatatccaaagcttctcttcactgtagatgaccgaatcatgcttcaatcttgatgcaataccaccaagaagatcaatagaaaagcaccgaacattagtgtccttagatttcaatccagcattgtgaaggagcaacacagagagaacctcaaggatagaagcagcagctggatgctccagcaagtttagtatcgttaggaaatcctgaacaagattatctattatttctttggtttccgacatatcttgagatttagcagcagtaactatagaaggagacaaagggatagtatttcacaatgcaatttttaccctatatatttgattcatatcagtttttgttaattccgtagcaacacatgggcactgtacgataatataatgcaacattttcgtgcacgaagccgtttcatgcgtcgcccgatccgtgcattcatgtgtcatccgctcgcatccgccccacacgcgacacaagatgcatgcttgttgtccaggtgcctagatggagtggactgtcgaacgcgcgagccaccatattcggcgatggttaccctttgccagatgaacaataggtttcttgtttactgtcttttgttgttagatacttcaatcaggtaggtagttagtgctccgtttatactggcatttcttgtcatatgatagtcacttcgggcttctgaatgctactatgaaactgttttttggtagtgaattttaatcatcttaaaataaatattcttactttgatttgggaagatttgtgttgacctatgaataagactttgactggaggtgcaattcactgtgcgcttccctgctatacagctgacatctgttttctgcctttcttttaccttctggcataagtcaattgttgccaaggcgcagaaataaattttattaggtatatcttgtttatgatcagatctcacggcttcggtggtgcctcaagtgtatgtcaggtagtagccctaagatttcatcagcattcttagcagtaattgctatagtatcaaatgggattgtggtacgagttgctcgattactaactgttgctatagagtgtgaagctaagtaggtaataacaaaaggggttaaggtttatgtgtggtgcttactgtatttgtttttattattttcttgtgctttatacatgtactgtcattcttttactctgatgttcttttactgcaaagttcgacacaatatatttttatatgaaagactgaagattacttagtattgttttctatttctgttatcctctttgcagatctatattaggatgatgaaaacagtgctacttgatgtgaagtccaccaatactatagatcagattaagtctaagatcggtgctttagaggggattgacaatagccctcaagcgctcttttttgctagaattatggtagcagtcaggtttcagatttctatgaattcggtgaataaaatgagcttattggcgttgtcaatctttttaaatttcctgaaattatgataaaagtatatagggtacctattcaaacaatatggctgttaactacatactatttttataagttacattgtattatgtagcagataaaaaggagaatatcttgtgtagttgttttcctaaattataataggcagtggttgtagctaaaatattattatcttgatataaagactactaaattatcacttttatgagaacaatgtgattatctggacagttcccttcaagttataaagtgtggtagcataattgcatttcagggaatcagtgcaaagcttgcagctgattctggtcggagaatggaccgttccctcctccctcctcccgccccttcccctcccgccccttcccctgccctccccgacggcgagtcccctgcccttcccggcgccatcctcccccacccatctctggcggccgccgtgcagccggcagtgcccttctccaccagccgcacgtcgtcccttaccccaagggcggcggccaccctccaggcgtcgggacgtcttcttcttcaccaggatctcgttcgctcgtcccactcttctggtcgcggcaaggctctcaggtggagagactccagcccttcgtcggattcgttggatgttgggagcccttcttcgttcaaggatatcctgctcgcgggaacggtctcggcctcagtctcggtgacgtctggggacatagtttcccatggcgcccaggctaggaccttgcaggcctccgtgcagaattcctctggtgatggtggacggtttgtccgtcggtcttccccactgcgctctttggttcagcccatgcgtcagaagcctctggtggatcgtgatggtttcacacttgtggagagtcgccgcacacagaagcagagacgccgcctggagaagtcgtttggtattcaagctctggagacctttaaaggacggtgcttcaagtgcctctcacctcatcaccgggttgccctctgccgttccatcatccgctgcctcctttgccatgcacctgggcatacatcctacacttgtccgcgtcgcctcccaccggtctgctcgcgcatggctggacgtctgcgtgctcctgttcatcggctgcctcctgtccatgcggcgcagtgctctgttgatgctgccgaggggccactcccagatgtgagtcgtggtagacggcgtcgcctggagtccgacatcgctgttgacgctggtgatggtgtctgcacggagccacattttgctcctacccggatcatcccatggtctccaagtttcaaccagaggactgaagtgcttgatcgtgccattgttctcacggtaactgtggccattaatgaagcagttgaggaagctattttggacagctttgcgcggcgactggcgcttgttcatgactcgctgtctatgtgtcgactgggtcctgcatgtcttcttcttattcttccaagtttagaaatggcggaccgtgcttttgatgggggcagaattgtgaatttatcccccacaactaaaatccatgttatgcggtggagcagaacccttaactcatctgcggcggcgtctctgcctttccaagttgagattgatgtgtctggcatccctgcacatgcttgggagttggaaactgtgcatgctctcctcaatgagtggtgctggattgctgatcttcacccagattgtgagcgtcagcgtgaggtgttcaaggttaccgcctggtgctccagcccgggctccatccccaaggagtttaaacttgaaattgttgatccggtcacaaccgatggtggcatgctgcgtcgttcattggtctaccctatccgggtgtcggtgaaggtccttgatcgaccggacatgttgcagtccctacagccgtcacctcctccggcggaggatgatcccgatcagggcaggcggcggaggcgacgtcgatctaggaggtcgtcttttggtattaatgctcccggaaaaggttcgactacagcggtcttgcctcgggtgtcggttcatcagcgacttgggccgcgcgtgcaagcctgtgggaaggaaggtgtcagggtgcctcgcctggcggtccataaacggctaggccctctggggatatttaacgctgataaaggtgcagtcaagaagatgaagcgagtttggattcccaagagaaagttggagtcatctgtgtctgtttggagtcctaagacatcgtctgctcttgtgtctccactcccggttgcggttgatgatgcatttttggaagctactagttctactgtcgttactgaagatactttggttggctctccagaggttattccagtggatggtggaatctgttcggaagctgctattatttctgatgctccagcccggtttcccatggttgaatctgttctgcaggacgtaaatgtcctctccgagggagtgggtcttcccttggttgaatctgatttccagaacattcaccttatggagtcttccttatcaaggaagcatcttatgtcaccaagtctgttagtttattccaggaaaagacatcaaaagctacagctgattgacagtattgatgagaatggcaatgtcggggctgctgcagatgctataatttctccagcttcggcgactggtttggctgctgatgggacatatcacgttggtcagggcccagtcattatcggggttgtggcagatgctattgtgtctccagccacggcaataacttttacaagttctgaacctatttcgagtttggttgagcctactgcggctgtggcagacattctgatgtctccagctggggtggctcccagtcttcttccttctccttctggcgagcaggagacttcccagtctttgcagagagaagagttcattaaatctgttactcggcaaccttctaaattgcttcctgctcctccagtcatcttgaagaagaaggacaacaaattgccctccagatcggtgccacgtcgcagccgcagagttgctggtgtaggcgttgaatttaatgcctctgaccttgacagacgtgctatcaagaaaatcatgaaggcagttggtataattgctgataatgtggggattgaccagagggctcaagaggagtatgctgatcttttcaagacatctttgtctgatattcatgtaaaagcccttgcagccttgtttggctggcagatgtttgagagggagattggtcatcttagtgcattgttcctgaccatggaggaaggcttcctcgccctcgtgtcaagcctgtgggagtcccagtcgaacatcaccacggctgggacgtgctgcctcgtcagtgtcatgcacgacaagacccttttcatcgctaacctcggtgactctggggcccttctcggcaagaaggtgggtcgcgctgaatagattaccgcagaacagttatccagtgagcacaacaccaatcaggagcctatcaggcaggagctcatgaggcaacacccagatgatgctcagtttgttgcagatgtatttcaacctagacgatttggcatcaaggctgtagcttgattgcaaagaaaaagaggaaaacaattttggaataaaataactcaaatgcacacccggtgattgttttggagctgcacaggatttgaatggacatcttcaggatgttaaggtaggttggctctgaagtagtgcatcctcagatgtgtcatttgtgcagaactgctctctgattatgtagtggaaaaatgcttgtggtcaatagttggtagttgccaaaactgacaattatggtagggttgagatggacagaaagaacgcagatgtaacaagccagccttgggaaacaaagataacctttctcatattgcctcttatattaactcgacattctctaatattcatgcacgcaacgtcatgctgcggagctgag

SEQ ID NO: 72316 - DNA, 5363 bp, Zea Mays
cccccagcaacatccgcctccgaactccgaatcaactacgcccccgacgagcgattgagcgcgagtcaaaaaaaggaccgccaaggaagcgagcgcggaatcaggcgagatccccttcgcctacgacgccagtaggctcgagaatcgcgtccagctcgaggccgaccgagagcgcgtgcaggcagctgctgggcctgcagttccaccacacgtccggcgacctctactacggcgacgcgtacctggggctgatgggcggcgggcgccgcgacgggctggcggaggcggtggcggtgcgccactcaacttcgtcaacagcgtggaggtcgacctggagaccggcgacgtctacttcaccgacagcaacaccacgtactagcggagccgtttcatgcgtcgcccgatccgtgcattcatgtgtcatccgctcgcatccgccccacacgcgacacaagatgcatgcttgttgtccaggtgcctagatggagtggactgtcgaacgcgcgagccaccatattcggcgatggttaccctttgccagatgaacaataggtttcttgtttactgtcttttgttgttagatacttcaatcaggtaggtagttagtgctccgtttatactggcatttcttgtcatatgatagtcacttcgggcttctgaatgctactatgaaactgttttttggtagtgaattttaatcatcttaaaataaatattcttactttgatttgggaagatttgtgttgacctatgaataagactttgactggaggtgcaattcactgtgcgcttccctgctatacagctgacatctgttttctgcctttcttttaccttctggcataagtcaattgttgccaaggcgcagaaataaattttattaggtatatcttgtttatgatcagatctcacggcttcggtggtgcctcaagtgtatgtcaggtagtagccctaagatttcatcagcattcttagcagtaattgctatagtatcaaatgggattgtggtacgagttgctcgattactaactgttgctatagagtgtgaagctaagtaggtaataacaaaaggggttaaggtttatgtgtggtgcttactgtatttgtttttattattttcttgtgctttatacatgtactgtcattcttttactctgatgttcttttactgcaaagttcgacacaatatatttttatatgaaagactgaagattacttagtattgttttctatttctgttatcctctttgcagatctatattaggatgatgaaaacagtgctacttgatgtgaagtccaccaatactatagatcagattaagtctaagatcggtgctttagaggggattgacaatagccctcaagcgctcttttttgctagaattatggtagcagtcaggtttcagatttctatgaattcggtgaataaaatgagcttattggcgttgtcaatctttttaaatttcctgaaattatgataaaagtatatagggtacctattcaaacaatatggctgttaactacatactatttttataagttacattgtattatgtagcagataaaaaggagaatatcttgtgtagttgttttcctaaattataataggcagtggttgtagctaaaatattattatcttgatataaagactactaaattatcacttttatgagaacaatgtgattatctggacagttcccttcaagttataaagtgtggtagcataattgcatttcagggaatcagtgcaaagcttgcagctgattctggtcggagaatggaccgttccctcctccctcctcccgccccttcccctcccgccccttcccctgccctccccgacggcgagtcccctgcccttcccggcgccatcctcccccacccatctctggcggccgccgtgcagccggcagtgcccttctccaccagccgcacgtcgtcccttaccccaagggcggcggccaccctccaggcgtcgggacgtcttcttcttcaccaggatctcgttcgctcgtcccactcttctggtcgcggcaaggctctcaggtggagagactccagcccttcgtcggattcgttggatgttgggagcccttcttcgttcaaggatatcctgctcgcgggaacggtctcggcctcagtctcggtgacgtctggggacatagtttcccatggcgcccaggctaggaccttgcaggcctccgtgcagaattcctctggtgatggtggacggtttgtccgtcggtcttccccactgcgctctttggttcagcccatgcgtcagaagcctctggtggatcgtgatggtttcacacttgtggagagtcgccgcacacagaagcagagacgccgcctggagaagtcgtttggtattcaagctctggagacctttaaaggacggtgcttcaagtgcctctcacctcatcaccgggttgccctctgccgttccatcatccgctgcctcctttgccatgcacctgggcatacatcctacacttgtccgcgtcgcctcccaccggtctgctcgcgcatggctggacgtctgcgtgctcctgttcatcggctgcctcctgtccatgcggcgcagtgctctgttgatgctgccgaggggccactcccagatgtgagtcgtggtagacggcgtcgcctggagtccgacatcgctgttgacgctggtgatggtgtctgcacggagccacattttgctcctacccggatcatcccatggtctccaagtttcaaccagaggactgaagtgcttgatcgtgccattgttctcacggtaactgtggccattaatgaagcagttgaggaagctattttggacagctttgcgcggcgactggcgcttgttcatgactcgctgtctatgtgtcgactgggtcctgcatgtcttcttcttattcttccaagtttagaaatggcggaccgtgcttttgatgggggcagaattgtgaatttatcccccacaactaaaatccatgttatgcggtggagcagaacccttaactcatctgcggcggcgtctctgcctttccaagttgagattgatgtgtctggcatccctgcacatgcttgggagttggaaactgtgcatgctctcctcaatgagtggtgctggattgctgatcttcacccagattgtgagcgtcagcgtgaggtgttcaaggttaccgcctggtgctccagcccgggctccatccccaaggagtttaaacttgaaattgttgatccggtcacaaccgatggtggcatgctgcgtcgttcattggtctaccctatccgggtgtcggtgaaggtccttgatcgaccggacatgttgcagtccctacagccgtcacctcctccggcggaggatgatcccgatcagggcaggcggcggaggcgacgtcgatctaggaggtcgtcttttggtattaatgctcccggaaaaggttcgactacagcggtcttgcctcgggtgtcggttcatcagcgacttgggccgcgcgtgcaagcctgtgggaaggaaggtgtcagggtgcctcgcctggcggtccataaacggctaggccctctggggatatttaacgctgataaaggtgcagtcaagaagatgaagcgagtttggattcccaagagaaagttggagtcatctgtgtctgtttggagtcctaagacatcgtctgctcttgtgtctccactcccggttgcggttgatgatgcatttttggaagctactagttctactgtcgttactgaagatactttggttggctctccagaggttattccagtggatggtggaatctgttcggaagctgctattatttctgatgctccagcccggtttcccatggttgaatctgttctgcaggacgtaaatgtcctctccgagggagtgggtcttcccttggttgaatctgatttccagaacattcaccttatggagtcttccttatcaaggaagcatcttatgtcaccaagtctgttagtttattccaggaaaagacatcaaaagctacagctgattgacagtattgatgagaatggcaatgtcggggctgctgcagatgctataatttctccagcttcggcgactggtttggctgctgatgggacatatcacgttggtcagggcccagtcattatcggggttgtggcagatgctattgtgtctccagccacggcaataacttttacaagttctgaacctatttcgagtttggttgagcctactgcggctgtggcagacattctgatgtctccagctggggtggctcccagtcttcttccttctccttctggcgagcaggagacttcccagtctttgcagagagaagagttcattaaatctgttactcggcaaccttctaaattgcttcctgctcctccagtcatcttgaagaagaaggacaacaaattgccctccagatcggtgccacgtcgcagccgcagagttgctggtgtaggcgttgaatttaatgcctctgaccttgacagacgtgctatcaagaaaatcatgaaggcagttggtataattgctgataatgtggggattgaccagagggctcaagaggagtatgctgatcttttcaagacatctttgtctgatattcatgtaaaagcccttgcagccttgtttggctggcagatgtttgagagggagattggtcatcttagtgcattgttcctgaccatggaggaaggcttcctcgccctcgtgtcaagcctgtgggagtcccagtcgaacatcaccacggctgggacgtgctgcctcgtcagtgtcatgcacgacaagacccttttcatcgctaacctcggtgactctggggcccttctcggcaagaaggtgggtcgcgctgaatagattaccgcagaacagttatccagtgagcacaacaccaatcaggagcctatcaggcaggagctcatgaggcaacacccagatgatgctcagtttgttgcagatgtatttcaacctagacgatttggcatcaaggctgtagcttgattgcaaagaaaaagaggaaaacaattttggaataaaataactcaaatgcacacccggtgattgttttggagctgcacaggatttgaatggacatcttcaggatgttaaggtaggttggctctgaagtagtgcatcctcagatgtgtcatttgtgcagaactgctctctgattatgtagtggaaaaatgcttgtggtcaatagttggtagttgccaaaactgacaattatggtagggttgagatggacagaaagaacgcagatgtaacaagccagccttgggaaacaaagataacctttctcatattgcctcttatattaactcgacattctctaatattcatgcacgcaacgtcatgctgcggagctgag

SEQ ID NO: 72317 - DNA, 999 bp, Zea Mays
ccttatctgtatctgggggtcctttttggactttttttcccttcttaatatattttcgcgcagctctcctgcgctttcgagaaaaaaaataattgcatttcagcaggtgttacttcataaattgttcagtaggaaacaactggctcatcaatcatcaggaatgttctggagcttaccagatatctatttaaaatagttgattcaccaaattttcttttcaatgatgtatatcagcagatgtttgagagggagattggtcatcttagtgcattgttcctgaccatggaggaaggcttcctcgccctcgtgtcaagcctgtgggagtcccagtcgaacatcaccacggctgggacgtgctgcctcgtcagtgtcatgcacgacaagacccttttcatcgctaacctcggtgactctggggcccttctcggcaagaaggatgttaagaccagcgacgtcgccgaggagcaacagcagcaacagcaggcggtggatccgctggcgcggcagtcgtccatcatgtcgctgacgctggaggagctgcagaactcgttgtgcgagccgggccgcaacttcgggtccatgaacatggacgagttcatggccaacatatggaacgccgaggagttccaggccgccacggccggctggaacaaggagggcgtgtatcgggagccggtgcccgtggcgacgacgacggacacaggtgaaaacggaggaggaggaggaggagggaggggactggttctgcaggggtcgttcgcgctgtcgtcgccgctgtcccggaagacggtggaggaggtctcagccgagatcagccagggcccaacggacttccaggccagcgcggcgtcgcagcccgtgggggaggcgaggcgaggtgtgggtggcccattgactcacgcatctgcgaggtggaggcgggtgtcttgtggggccagcatgtcagttagagataggcgggggcatggccacgccagggcacccacgctccactcttaa

SEQ ID NO: 72318 - DNA, 1928 bp, Zea Mays
aaggataaaaatgacatgagttcccgttttgctcccgagttctctctcacgtccatccctctctctcgtctcgttctttagcagggccggctggagcgcccactcctccctccagcccggccccagccgcgccgccgcgccggtcgtagacccaacgcccgccgcccagcccagcgcgccctccggccgtgaggcggagaggatcgggcgggcctcggggcgagcgccacgcgtagacggcggttgaggagcctgagaaaacaacggtcctccttcaagatcctgatccctacgcgcaggcgtaggagattgtattccgtctgattaatcggcggagagcaagcgggtgttgcggctgcgcgagcatggcgggcgaggaggctgcggagggcagcggaaccaggaggcacatggatctaaacctgtatctcggcctccctccattgccgcggcctccagtctggctggacccgacgttgatgcccaacttgaccggtgctgcgccagaatcctcaataactggaccgatggtgaagaggacactgatgctcctgagccggggccagtggatggtgccaatgtctctaggtcgcagcttgtggtagctgccacaggattggaaggggatgatgatcttcctctagtaaggtttgtgcgccctagccagatggttgttgctggtggaatggagacggtgaacacaagtatacttcagcagtccattcaaagggctgctgcaattgaggccaggactcctgaactccgctttcagagggtgatacagattagccagcagcatagaattgtgaggccagcatcagtgaaccgcagtcaaggggcagctagtacagatgcggataggcttgtctgggcaatccagcgcactcataactctttagaagcaacaaggcggcaaaaactagatgacaacaacttgtgtggaaacggttctgctaagaaggatgagtcctgtgactgcaactccagctttgagtgcaatatctgtcttgacccagctaaacagcctgtggttacaccctgcggtcacctcttctgttggccatgcttgtaccagtggcttcatgcacattcaccccactctgagtgccctgtatgcaagggtgaggtgctagaactgaatgtcactccgatatatggaagaggcggtgaagaagggaattccaccaaccctgacttcccacctaggccacgagcaaacagaagggagagcctgaggcaacagctgcaaatgacagacacaagaggaattgcaacagtggtgaggcagttgatacaaaaccagggtataattagcgttctcccaagcccaacagggatcgagatgtcggtggttcctgcaggccggcaaagggctagggctcggagacagcaaaggcaggataataatgcatcatcttccatacacgttgtagcgcagaatatgggcaatgttgcccctgagagcagcaaccaaatccagttgtcacattctaacggtgacaatgctgcacagatggttcttgcagctcctcagcagtcatcatctgtcgaacagctgtcaacttctagcaccacagctgttatattgggcgagcctgggtcaagtaggcggtcaaggccttcggagtctccaaccataagaagaacgaggaggaggccacagtaggtactcgagtgttgtcactcccttcagtaaaatctacagaccatgccccagtgatagttattaccatgattatctccaataacatctcaaggttaataatgtagaaatgtatatgccatcactggtttctgcctttctcttacattccatgtatcatctattatgcaaaacgagtcgaaatatcagttccagtatctatgataatcttgacctttgtatactgggaatatattttctgatttagcctctgtttctggtatga

SEQ ID NO: 72319 - DNA, 1286 bp, Zea Mays
ctccccgccatcaacgctgatctgccatcagcgccgatccggggatccgaggccgccatcaacgcgcacctcctccccacgacatcgcatggaatgttgccgcgacgccgatccgccccacccaccgctcatcaaggaaggtttccgtggatccccccaccctcctccccctctgctccgcgattatagggatccgaggccaccatcaacgtgcacctccccccccacgacgttgcatggaaggttgccgcgacgccgatccgccccacccaccactcgttaaggaaggtaatcgcggatcccccaccctcctccccctctgctccgtgattacggggatccgatgccgccatcaacacgcaccagctccccacgaagtcgcatggaaggttgttgtgacgccgatccgccccacccaccgcccgtcatggaaggttgccgcggatcccccaccctcctccccctctgctccgcgattacggggatccgaggccaccatcaacgcgcacctcccccacgacgttgatggcgcgcgcgttgagggtgtggagaggaggtattgcaacagcgccatcaacgctctcctacccctctactccgcgatcccctccattgttgccgctcaccttccttcgacgacgctgcatcgacctcggcaacctctgcacacctataaggaacaaatggggaggcgaccagttgagttgcagatacaaccactgatccctctgtcgacatttgctgctctcaaccactggtcacctacatctctccccccttaagaattcggcgctccttgatccaaaatccaaagacttatttaatcaacagattcctagagaggagatcggcttacttggcaacagtgtgaccggactaaaatgtgttttatcttgttacgttatagatttggataattatgtatcgaataaacatgctcacaaatttttgtgacttgccattattgttatgtgttaaaaattgtacctttactcgtcatacatacaatatccctgttgtcaacccttgtcatacattctggtttgcttaatgcaaatggctgtatgtgaacctgtttgttcgaatattctgtgaaccttggtgtgtttgagaactatgtgtaccgtgtatactgtgtgacaacaacaaataggtttctatgtgtactgaacagattgctgtgtaaaatgtgtgcaaattgatacctgtacacaatagacaaacgatgtgtcttaaaacttatatattgaacttaattgtggttgtgcatagagtactgtgtgaaa

SEQ ID NO: 72320 - DNA, 813 bp, Zea Mays
ctccccgccatcaacgctgatctgccatcagcgccgatccggggatccgaggccgccatcaacgcgcacctcctccccacgacatcgcatggaatgttgccgcgacgccgatccgccccacccaccgctcatcaaggaaggtttccgtggatccccccaccctcctccccctctgctccgcgattatagggatccgaggccaccatcaacgtgcacctccccccccacgacgttgcatggaaggttgccgcgacgccgatccgccccacccaccactcgttaaggaaggtaatcgcggatcccccaccctcctccccctctgctccgtgattacggggatccgatgccgccatcaacacgcaccagctccccacgaagtcgcatggaaggttgttgtgacgccgatccgccccacccaccgcccgtcatggaaggttgccgcggatcccccaccctcctccccctctgctccgcgattacggggatccgaggccaccatcaacgcgcacctcccccacgacgttgatggcgcgcgcgttgagggtgtggagaggaggtattgcaacagcgccatcaacgctctcctacccctctactccgcgatcccctccattgttgccgctcaccttccttcgacgacgctgcatcgacctcggcaacctctgcacacctataaggaacaaatggggaggcgaccagttgagttgcagatacaaccactgatccctctgtcgacatttgctgctctcaaccactggtcacctacatctctccccccttaagaagacattaatatgaagacatgtgagacgg

SEQ ID NO: 72321 - DNA, 527 bp, Zea Mays
cctgacgttgctcatgaatgggtgagcggggtcgcttcgggatccggaagagatggccaagtcgaagaaccacacggcgcacaaccagtcgtacaaggcgcacaagaacggcatcaagaagcccaagcgccaccggcagacctccaccaaggggatggaccccaagttcctgaggaacctgaggtattcaaggaagggcaacaagaagagtggtgaggctgaggagtaggaaggaaagcatggttgtgtttcctatgttttagctcagttgtaaggtggaacttaggaccttttgctgccgaaatgtttttatgataatcatgttttgaagagttacggtttactttcattatttcctttgcccttggtaactaaaattagttgtttcgattgcgtctgggtttcattggaggctaacctgtttgggaggcggtttaatgttttatcttgtggtcgagtgagcattagagcatgtacaacttagagcttgatcggttttcatggtattatcatgcaatggaatgttt

SEQ ID NO: 72322 - DNA, 2078 bp, Zea Mays
ctcggtcgccagtattcatagctgggggtagggcgggcgacccgccgcgactgggagaaccttggacatgagttgaaaggccctatcttttcatgtccatgtccatctcccgagtgaaagcgagcgagcgagcgaccgattgattgacgtgtgatgcctcactagctggagagcgctctctcctttgtggcaaatctcatcagcaacagagacggctggtgtgacaccttgtgaaaacgcccgctcgctcgctcagtcgctccgtctctctctccctccctccatatctccctttgccacctgctgtctccctcctcatctctctccagtcgagtcggcagtctctaccactctgcttcctttcccctcctcttcttctccagaaagcagaggcatggagcggcagaggaaggcaatgtggctgtaccccaaggtggtcggcttcaacccgccggagaggtggggccactccgcctgcttcttcgaaggggtcgtctacgtctttgggtttcctgtcaagggcgcgtcgcctggcgtcagagcaggtcatgcggctttgagtgttgggtccaagatctatattatcggaggagttggtgacaagcaatactacagcgacgtctgggttctcgatgtcgccaaccgttcgtggagtcagctcgaggtgagcgggcagcgaccgcagggaaggttttcccacaccgcagtagtcatgaacaatgacattgcaatctatggaggatgcggcgaagacgagcgtcccctgaacgagcttctcattctgcaattgggctccgagcatccgaacggccgttacaacatttcgacgtgcaaggttctgagcaaccaatggagccaagagaggaggaagtttctccaatcagagactaaagatacaggtgcgagcaacggagaaacggtgcagaaacgtcgagaggcagaaattgagcagaggaatccgttcctgcgtggcctagagaacagccgtgcgaaacgaaggaaaaccgatgaagctcgcccgagcgaggcggccgagtcagagcagcaggaggagcactcgctgactctctcccagcactcctcgccgtcgcagtcagaccaagagcagaacggcggcggagctcacaagctctcgccctcgcccaacgcgtcggtctcagcgctgcaaccgttcgctcgcctcaaggctaacgacggcgctccgagtgctcctgggcgcggaggcggcggcgtgtcttcgaggccggctctgaagacggaccagttcctccgcaccgtcgcgccacagcatcatcggcaggaagtgcagttcctttcctccgaccataagaagcctcagccccggccggctcctggaccaccccttattggcgcagaggtccatgggacgatcgatggagctttcgattccgggtacctcatgacggccgtcgtgaatgggcagctcttcagaggcgttctgtttgctccgggacctggggttacggctccgagaccgacggtgcaccatcagatcctgacgagctcggccatgcctccccagcagcggccactgctcgcgcacgccatccctgtccacgcccggccggtgccgcaggcgacggggttcgtgctgccgaactgtgtccaccgcgcgcggcaagggttcccggcaaaggcagtcaagtccgagccggagcgaggcggcagcgacctgcacgatgttgtgctcaccctgggagggcctggagggggcaagtgagcccctcaagaacggtggtccaggtcgtcctggcctactgctgtttacctttgggaattgctttgtaaattagtcatctggtcgagtggaaataagtgtagcggcttttctgtgatcttttcaagggtcattttagggttcttcgatctgtgactttacatatatgaatatagtgttagcttgatctgtcattttagctagttttgttatcaacaagttggtgttgggagcttccttgcacacttgtgagtgtttgtattttctgatgctcatgtggggggtccacctcggtctcctgattctcgtcgggatatttatagttcttaccggacagcgc

SEQ ID NO: 72323 - DNA, 2307 bp, Zea Mays
gaagcttaatacttactggtagctgcgaactagttcatcaggaagaagacgcatgctggtggtggtttgagctatgaccccgcctctaccggctgagggtagattattttggacaaaagggatgctgcggcggcctgcacttcagcgacgtggtgacgctggacgtggagacgatggcgtggagcgcgctggccacgacggggcagcggccgggcacgcgggacagccacggcgccgcgctggtgggccaccggatgctcgtgttcgggggcaccaacggcggcaagaaggtgaacgagctgcacgtgctggacctgcgcaccagggagtggagccgcccgcagtgcaggggggcggcgccgtcgccgcgggagagccacagcgtcaccgtcgtcgggggcgaccgcctcgtggtcttcggcgggagcggggagggggagggcaactacctcagcgacgtgcacgtgctggacgtgcccaccatgacgtggtccacgccggaggccatcaggggcggcgcccccgcgcccagggacagccacagcgccgtcgccgtcggcgccaggctcttcgtcttcggcggggactgcggcgaccgctaccacggcggggtggacgtgctcgacgtcgacaccatggcgtggtcaaggtttcctgtcaagggcgcgtcgcctggcgtcagagcaggtcatgcggctttgagtgttgggtccaagatctatattatcggaggagttggtgacaagcaatactacagcgacgtctgggttctcgatgtcgccaaccgttcgtggagtcagctcgaggtgagcgggcagcgaccgcagggaaggttttcccacaccgcagtagtcatgaacaatgacattgcaatctatggaggatgcggcgaagacgagcgtcccctgaacgagcttctcattctgcaattgggctccgagcatccgaacggccgttacaacatttcgacgtgcaaggttctgagcaaccaatggagccaagagaggaggaagtttctccaatcagagactgtaagctagctcaattcgcctcgagcagttcttaccttaacctgctacgcaaacactagtgtgactcataagacagcaacatggcagaaagatacaggtgcgagcaacggagaaacggtgcagaaacgtcgagaggcagaaattgagcagaggaatccgttcctgcgtggcctagagaacagccgtgcgaaacgaaggaaaaccgatgaagctcgcccgagcgaggcggccgagtcagagcagcaggaggagcactcgctgactctctcccagcactcctcgccgtcgcagtcagaccaagagcagaacggcggcggagctcacaagctctcgccctcgcccaacgcgtcggtctcagcgctgcaaccgttcgctcgcctcaaggctaacgacggcgctccgagtgctcctgggcgcggaggcggcggcgtgtcttcgaggccggctctgaagacggaccagttcctccgcaccgtcgcgccacagcatcatcggcaggaagtgcagttcctttcctccgaccataagaagcctcagccccggccggctcctggaccaccccttattggcgcagaggtccatgggacgatcgatggagctttcgattccgggtacctcatgacggccgtcgtgaatgggcagctcttcagaggcgttctgtttgctccgggacctggggttacggctccgagaccgacggtgcaccatcagatcctgacgagctcggccatgcctccccagcagcggccactgctcgcgcacgccatccctgtccacgcccggccggtgccgcaggcgacggggttcgtgctgccgaactgtgtccaccgcgcgcggcaagggttcccggcaaaggcagtcaagtccgagccggagcgaggcggcagcgacctgcacgatgttgtgctcaccctgggagggcctggagggggcaagtgagcccctcaagaacggtggtccaggtcgtcctggcctactgctgtttacctttgggaattgctttgtaaattagtcatctggtcgagtggaaataagtgtagcggcttttctgtgatcttttcaagggtcattttagggttcttcgatctgtgactttacatatatgaatatagtgttagcttgatctgtcattttagctagttttgttatcaacaagttggtgttgggagcttccttgcacacttgtgagtgtttgtattttctgatgctcatgtggggggtccacctcggtctcctgattctcgtcgggatatttatagttcttaccggacagcgc

SEQ ID NO: 72324 - DNA, 4140 bp, Zea Mays
cagcggtccaagcgagtgctaggctgttagcaaatatcaaactccactgctaccactaatacacatcgcccccgcacatatcgatctcgtcgtcgtctcccccggtggcatgctccgctcccgctagatccgatctattatctatggatccccgccgtctccccatccttctctccctcctgcttgccttcttctccgccgttgtcgcctctgacgagatccacggatgcggcggcgtcgtcgaggcgagctctggcttggccaagtcgaggaaggcatcggattccaagctcgattactccgacatcacggttgagctctgcactgttgatggtttggttaaagaaagcacacagtgtgctcctaatggatactattttatccccgtctatgataagggttcgttcatggtcagagtgaaggggcccaagggatggtcatggaagcccgaaactgttcctgtcatcattgatcacaatgggtgcaatggaaatgcggatataaatttccagttcactgggtttatgatatccggtaaagtagtgggagctgttggtggtaagagctgctcaaaacggggaggacctgctggtgtgaaaattgaactgatgacagattctgatgagttgattgcatctgctttgacgtcatcatcaggagaatattcatttacaaacataattccagggcgttacatattacgtgcttctcatcctgattatgaaattgagttgagaggctcaccagagattgacctgcgatttggaaatgccgtggcagatgatgtcttctttgtatctggttatgacatttatggcactgtggttgcacagggaaatccaatagtgggagtccacctatatttgtattcaaatgatgtaacgaaggtcccttgcccacaaggtttcagtgatgcacccaaggaaggtgcactttgccatgcaatatctggtgctgatgggaagttcacatttagatcactaccttgtggtagctatgagttgttgccatactacaagggagagaacaccgtatttgatatttcaccatcttcactttctgtttctgttgagcatagtcatttgacgattccccaaaaattccaggtcactggattttctgttggagggcgtgttatcgatggttatggtgctggtgtggagagtgccaatgttatagttgatgggcagttgagagccataacagatagtcttggatactatagactcgatcaggttacatccaagaagtatactataactgccgagaaggatcattataagttcaaccgtttggaggattttatgattttaccaaatttggcaagtattgatgatatcagatcagttagatatgatgtatgtggtattgttcgaacagttactctgaattcaaaagcaatggttactttaacacatggaccagaaaatgtaaagccacagcggaaattagtgggtgaaaatggacatttttgctttgaggttcctgctggtgaataccagttatctgcattacctgtagattccgaacgctcttctagtcttatgttttcaccgggatctattagcgtcaatgtaaatagcccgttgcttgatctggaattctctcagtcacaagtcaatgttcatggtaaagtctcatgcaaacagcaatgcagccagaacattctggtctcacttgttagattggctggcggagttgaacaggaaaagaagacaactacattggaacaagataatgttaattttgtgtttaagaaagtatttcctggaaaatatcgtgtagaggtgaagaattctttacccgagggcttagctaaggatgattggtgctgggaccagagtatcttgaatatagatgttggtactgatgatgtgagagacattgtgtttgtacaaaaaggctattggattgagctagtttcaactcatgatactaatgcttatattcagcagccagattcttctagacttgatttgttgataaagaaaggatcacaaagaatttgtgttgaaacttcagggcaacatgagattcatttaactaatccttgtatttcctttgggacctcgtctgttttgtttgatacagctaatttaatgccgatccatatcaatgcaaagaagtatcttgtaaaaggtgaaatccatgtggacatgagctccattcaggaaaacattgattccaaggacatagtcgtggatatcttgaagagtgatggcagtttcatagaaaagatatccacatcacttgttcttggaaaggacaatcaaaatgacttcactgcctttgagtactctatttgggctgaccttggggaggacttcatctttgtcccccatgattctagcattggaaggaacaaagtcctattttatccagcaagacagcagtattcagtttctatgaatggatgccaagatactgttcctctaatcactgcaagaactggtctatatcttgaaggatcagtgttacctgcaacttctgatgttgacatcaagattctagcagctggaaagagcaactatgcccatctgaacaaaggggatgtagcaacagaggcaaagacagattctgaaggatcattttttgcaggtcctttgtatgatgacatagtatataaagttgaagcttcaaaggatggttaccatctcaaacaaactggcccatacaccttttcttgtcagaagcttggtcagatattagtgcggatttatggtgaaaattcagagcttttaccttcagtattattatcattgagtggcgagaaagggtacagaaataactcaattagtagttctggtggaaccttcacctttgacaacttatttcctggaagtttctatctccgaccacttctaaaggaatataaatttaatccgtcagcagtagctattgatcttaattctggagagtctagggaggctgaatttcgtgcaaccagagtggcttacaggtttttatgaggaagctaccacggattcttttggtagatttcgtcttagaggacttgtgcctggatcgacttactctataagagtggctgcaaaagataatcttcagtttgcagcagttgagcgtgcttcacctgaatatttgtcagttaatgttggtcatgaagacatgactggtattgattttgtggtttttgaacgccccgaagtaacaatcttgagtggccatgtggaaggagatggcattgatacgttacatccgcatctctctgttgaaatcagatcagcaacagactcttctagagtagaagctgtacttcctcttcctctttcatactactttgaagtccgagatttgcccaagggcaagcatcttgttcagcttcgatctggccttccatcacatacacataggtttgaatcggagttagtcgaagtagatctggaaaaggatccccaaatccatgttggtcccctcaaatataaaactgaggagcgtcatcaaaagcaggaactgaccccagcaccagtttttccgcttattgttggagtttctgtggttgcactggtgatcagtatgccaaggttaaatgacttataccagagcgctgtagggatgacttctctgggttcagggatggcaccgaccaaaaaggagccacgcaagaatatattaagaaagagagtgtaaatggcagattagcttagccttaggggtcgagaaatgagacatgacaaattgagcaatttcaagagtggaatagcttctggtttccccctcgggtaattttgccgacgaaaaggaatgccagttttgttgtacgatagcactatgcacagtttttgaagccttagattgtgccgttttgcagttttagactataaagaaagagttgctgcatcatgaatgaactttctcaccagtcagcatgcacgatcgaataggttaatctgagcggtccaggactaagtagaatagacaagtttgttgtggcacgttgtttgcccctctttttgattgtacaacgaccaagtaaagcgtgcgcaatgacttctctatgacttacggatctggttcgccctttagcatatgtggtctagcgtggagcgtttataatataaatttaaatagtttttaaaattatttttaatgtaaataataaataaatatgatttatctaag

SEQ ID NO: 72325 - DNA, 4088 bp, Zea Mays
cagcggtccaagcgagtgctaggctgttagcaaatatcaaactccactgctaccactaatacacatcgcccccgcacatatcgatctcgtcgtcgtctcccccggtggcatgctccgctcccgctagatccgatctattatctatggatccccgccgtctccccatccttctctccctcctgcttgccttcttctccgccgttgtcgcctctgacgagatccacggatgcggcggcgtcgtcgaggcgagctctggcttggccaagtcgaggaaggcatcggattccaagctcgattactccgacatcacggttgagctctgcactgttgatggtttggttaaagaaagcacacagtgtgctcctaatggatactattttatccccgtctatgataagggttcgttcatggtcagagtgaaggggcccaagggatggtcatggaagcccgaaactgttcctgtcatcattgatcacaatgggtgcaatggaaatgcggatataaatttccagttcactgggtttatgatatccggtaaagtagtgggagctgttggtggtaagagctgctcaaaacggggaggacctgctggtgtgaaaattgaactgatgacagattctgatgagttgattgcatctgctttgacgtcatcatcaggagaatattcatttacaaacataattccagggcgttacatattacgtgcttctcatcctgattatgaaattgagttgagaggctcaccagagattgacctgcgatttggaaatgccgtggcagatgatgtcttctttgtatctggttatgacatttatggcactgtggttgcacagggaaatccaatagtgggagtccacctatatttgtattcaaatgatgtaacgaaggtcccttgcccacaaggtttcagtgatgcacccaaggaaggtgcactttgccatgcaatatctggtgctgatgggaagttcacatttagatcactaccttgtggtagctatgagttgttgccatactacaagggagagaacaccgtatttgatatttcaccatcttcactttctgtttctgttgagcatagtcatttgacgattccccaaaaattccaggttacatccaagaagtatactataactgccgagaaggatcattataagttcaaccgtttggaggattttatgattttaccaaatttggcaagtattgatgatatcagatcagttagatatgatgtatgtggtattgttcgaacagttactctgaattcaaaagcaatggttactttaacacatggaccagaaaatgtaaagccacagcggaaattagtgggtgaaaatggacatttttgctttgaggttcctgctggtgaataccagttatctgcattacctgtagattccgaacgctcttctagtcttatgttttcaccgggatctattagcgtcaatgtaaatagcccgttgcttgatctggaattctctcagtcacaagtcaatgttcatggtaaagtctcatgcaaacagcaatgcagccagaacattctggtctcacttgttagattggctggcggagttgaacaggaaaagaagacaactacattggaacaagataatgttaattttgtgtttaagaaagtatttcctggaaaatatcgtgtagaggtgaagaattctttacccgagggcttagctaaggatgattggtgctgggaccagagtatcttgaatatagatgttggtactgatgatgtgagagacattgtgtttgtacaaaaaggctattggattgagctagtttcaactcatgatactaatgcttatattcagcagccagattcttctagacttgatttgttgataaagaaaggatcacaaagaatttgtgttgaaacttcagggcaacatgagattcatttaactaatccttgtatttcctttgggacctcgtctgttttgtttgatacagctaatttaatgccgatccatatcaatgcaaagaagtatcttgtaaaaggtgaaatccatgtggacatgagctccattcaggaaaacattgattccaaggacatagtcgtggatatcttgaagagtgatggcagtttcatagaaaagatatccacatcacttgttcttggaaaggacaatcaaaatgacttcactgcctttgagtactctatttgggctgaccttggggaggacttcatctttgtcccccatgattctagcattggaaggaacaaagtcctattttatccagcaagacagcagtattcagtttctatgaatggatgccaagatactgttcctctaatcactgcaagaactggtctatatcttgaaggatcagtgttacctgcaacttctgatgttgacatcaagattctagcagctggaaagagcaactatgcccatctgaacaaaggggatgtagcaacagaggcaaagacagattctgaaggatcattttttgcaggtcctttgtatgatgacatagtatataaagttgaagcttcaaaggatggttaccatctcaaacaaactggcccatacaccttttcttgtcagaagcttggtcagatattagtgcggatttatggtgaaaattcagagcttttaccttcagtattattatcattgagtggcgagaaagggtacagaaataactcaattagtagttctggtggaaccttcacctttgacaacttatttcctggaagtttctatctccgaccacttctaaaggaatataaatttaatccgtcagcagtagctattgatcttaattctggagagtctagggaggctgaatttcgtgcaaccagagtggcttacagtgccatgggttctgtaacactattaactggccaaccaaaggagggtgtttttgttgaagcaagatctgaatccacaggtttttatgaggaagctaccacggattcttttggtagatttcgtcttagaggacttgtgcctggatcgacttactctataagagtggctgcaaaagataatcttcagtttgcagcagttgagcgtgcttcacctgaatatttgtcagttaatgttggtcatgaagacatgactggtattgattttgtggtttttgaacgccccgaagtaacaatcttgagtggccatgtggaaggagatggcattgatacgttacatccgcatctctctgttgaaatcagatcagcaacagactcttctagagtagaagctgtacttcctcttcctctttcatactactttgaagtccgagatttgcccaagggcaagcatcttgttcagcttcgatctggccttccatcacatacacataggtttgaatcggagttagtcgaagtagatctggaaaaggatccccaaatccatgttggtcccctcaaatataaaactgaggagcgtcatcaaaagcaggaactgaccccagcaccagtttttccgcttattgttggagtttctgtggttgcactggtgatcagtatgccaaggttaaatgacttataccagagcgctgtagggatgacttctctgggttcagggatggcaccgaccaaaaaggagccacgcaagaatatattaagaaagagagtgtaaatggcagattagcttagccttaggggtcgagaaatgagacatgacaaattgagcaatttcaagagtggaatagcttctggtttccccctcgggtaattttgccgacgaaaaggaatgccagttttgttgtacgatagcactatgcacagtttttgaagccttagattgtgccgttttgcagttttagactataaagaaagagttgctgcatcatgaatgaactttctcaccagtcagcatgcacgatcgaataggttaatctgagcggtccaggactaagtagaatagacaagtttgttgtggcacgttgtttgcccctctttttgattgtacaacgaccaagtaaagcgtgcgcaatgacttctctatgacttacggatctggttcgccctttagcatatgtggtctagcgtggagcgtttataatataaatttaaatagtttttaaaattatttttaatgtaaataataaataaatatgatttatctaag

SEQ ID NO: 72326 - DNA, 4212 bp, Zea Mays
agcggtccaagcgagtgctaggctgttagcaaatatcaaactccactgctaccactaatacacatcgcccccgcacatatcgatctcgtcgtcgtctcccccggtggcatgctccgctcccgctagatccgatctattatctatggatccccgccgtctccccatccttctctccctcctgcttgccttcttctccgccgttgtcgcctctgacgagatccacggatgcggcggcgtcgtcgaggcgagctctggcttggccaagtcgaggaaggcatcggattccaagctcgattactccgacatcacggttgagctctgcactgttgatggtttggttaaagaaagcacacagtgtgctcctaatggatactattttatccccgtctatgataagggttcgttcatggtcagagtgaaggggcccaagggatggtcatggaagcccgaaactgttcctgtcatcattgatcacaatgggtgcaatggaaatgcggatataaatttccagttcactgggtttatgatatccggtaaagtagtgggagctgttggtggtaagagctgctcaaaacggggaggacctgctggtgtgaaaattgaactgatgacagattctgatgagttgattgcatctgctttgacgtcatcatcaggagaatattcatttacaaacataattccagggcgttacatattacgtgcttctcatcctgattatgaaattgagttgagaggctcaccagagattgacctgcgatttggaaatgccgtggcagatgatgtcttctttgtatctggttatgacatttatggcactgtggttgcacagggaaatccaatagtgggagtccacctatatttgtattcaaatgatgtaacgaaggtcccttgcccacaaggtttcagtgatgcacccaaggaaggtgcactttgccatgcaatatctggtgctgatgggaagttcacatttagatcactaccttgtgctatgagttgttgccatactacaagggagagaacaccgtatttgatatttcaccatcttcactttctgtttctgttgagcatagtcatttgacgattccccaaaaattccaggtcactggattttctgttggagggcgtgttatcgatggttatggtgctggtgtggagagtgccaatgttatagttgatgggcagttgagagccataacagatagtcttggatactatagactcgatcaggttacatccaagaagtatactataactgccgagaaggatcattataagttcaaccgtttggaggattttatgattttaccaaatttggcaagtattgatgatatcagatcagttagatatgatgtatgtggtattgttcgaacagttactctgaattcaaaagcaatggttactttaacacatggaccagaaaatgtaaagccacagcggaaattagtgggtgaaaatggacatttttgctttgaggttcctgctggtgaataccagttatctgcattacctgtagattccgaacgctcttctagtcttatgttttcaccgggatctattagcgtcaatgtaaatagcccgttgcttgatctggaattctctcagtcacaagtcaatgttcatggtaaagtctcatgcaaacagcaatgcagccagaacattctggtctcacttgttagattggctggcggagttgaacaggaaaagaagacaactacattggaacaagataatgttaattttgtgtttaagaaagtatttcctggaaaatatcgtgtagaggtgaagaattctttacccgagggcttagctaaggatgattggtgctgggaccagagtatcttgaatatagatgttggtactgatgatgtgagagacattgtgtttgtacaaaaaggctattggattgagctagtttcaactcatgatactaatgcttatattcagcagccagattcttctagacttgatttgttgataaagaaaggatcacaaagaatttgtgttgaaacttcagggcaacatgagattcatttaactaatccttgtatttcctttgggacctcgtctgttttgtttgatacagctaatttaatgccgatccatatcaatgcaaagaagtatcttgtaaaaggtgaaatccatgtggacatgagctccattcaggaaaacattgattccaaggacatagtcgtggatatcttgaagagtgatggcagtttcatagaaaagatatccacatcacttgttcttggaaaggacaatcaaaatgacttcactgcctttgagtactctatttgggctgaccttggggaggacttcatctttgtcccccatgattctagcattggaaggaacaaagtcctattttatccagcaagacagcagtattcagtttctatgaatggatgccaagatactgttcctctaatcactgcaagaactggtctatatcttgaaggatcagtgttacctgcaacttctgatgttgacatcaagattctagcagctggaaagagcaactatgcccatctgaacaaaggggatgtagcaacagaggcaaagacagattctgaaggatcattttttgcaggtcctttgtatgatgacatagtatataaagttgaagcttcaaaggatggttaccatctcaaacaaactggcccatacaccttttcttgtcagaagcttggtcagatattagtgcggatttatggtgaaaattcagagcttttaccttcagtattattatcattgagtggcgagaaagggtacagaaataactcaattagtagttctggtggaaccttcacctttgacaacttatttcctggaagtttctatctccgaccacttctaaaggaatataaatttaatccgtcagcagtagctattgatcttaattctggagagtctagggaggctgaatttcgtgcaaccagagtggcttacagtgccatgggttctgtaacactattaactggccaaccaaaggagggtgtttttgttgaagcaagatctgaatccacaggtttttatgaggaagctaccacggattcttttggtagatttcgtcttagaggacttgtgcctggatcgacttactctataagagtggctgcaaaagataatcttcagtttgcagcagttgagcgtgcttcacctgaatatttgtcagttaatgttggtcatgaagacatgactggtattgattttgtggtttttgaacgccccgaagtaacaatcttgagtggccatgtggaaggagatggcattgatacgttacatccgcatctctctgttgaaatcagatcagcaacagactcttctagagtagaagctgtacttcctcttcctctttcatactactttgaagtccgagatttgcccaagggcaagcatcttgttcagcttcgatctggccttccatcacatacacataggtttgaatcggagttagtcgaagtagatctggaaaaggatccccaaatccatgttggtcccctcaaatataaaactgaggagcgtcatcaaaagcaggaactgaccccagcaccagtttttccgcttattgttggagtttctgtggttgcactggtgatcagtatgccaaggttaaatgacttataccagagcgctgtagggatgacttctctgggttcagggatggcaccgaccaaaaaggagccacgcaagaatatattaagaaagagagtgtaaatggcagattagcttagccttaggggtcgagaaatgagacatgacaaattgagcaatttcaagagtggaatagcttctggtttccccctcgggtaattttgccgacgaaaaggaatgccagttttgttgtacgatagcactatgcacagtttttgaagccttagattgtgccgttttgcagttttagactataaagaaagagttgctgcatcatgaatgaactttctcaccagtcagcatgcacgatcgaataggttaatctgagcggtccaggactaagtagaatagacaagtttgttgtggcacgttgtttgcccctctttttgattgtacaacgaccaagtaaagcgtgcgcaatgacttctctatgacttacggatctggttcgccctttagcatatgtggtctagcgtggagcgtttataatataaatttaaatagtttttaaaattatttttaatgtaaataataaataaatatgatttatctaag

SEQ ID NO: 72327 - DNA, 4108 bp, Zea Mays
tcgcccccgcacatatcgatctcgtcgtcgtctcccccggtggcatgctccgctcccgctagatccgatctattatctatggatccccgccgtctccccatccttctctccctcctgcttgccttcttctccgccgttgtcgcctctgacgagatccacggatgcggcggcgtcgtcgaggcgagctctggcttggccaagtcgaggaaggcatcggattccaagctcgattactccgacatcacggttgagctctgcactgttgatggtttggttaaagaaagcacacagtgtgctcctaatggatactattttatccccgtctatgataagggttcgttcatggtcagagtgaaggggcccaagggatggtcatggaagcccgaaactgttcctgtcatcattgatcacaatgggtgcaatggaaatgcggatataaatttccagttcactgggtttatgatatccggtaaagtagtgggagctgttggtggtaagagctgctcaaaacggggaggacctgctggtgtgaaaattgaactgatgacagattctgatgagttgattgcatctgctttgacgtcatcatcaggagaatattcatttacaaacataattccagggcgttacatattacgtgcttctcatcctgattatgaaattgagttgagaggctcaccagagattgacctgcgatttggaaatgccgtggcagatgatgtcttctttgtatctggttatgacatttatggcactgtggttgcacagggaaatccaatagtgggagtccacctatatttgtattcaaatgatgtaacgaaggtcccttgcccacaaggtttcagtgatgcacccaaggaaggtgcactttgccatgcaatatctggtgctgatgggaagttcacatttagatcactaccttgtggtagctatgagttgttgccatactacaagggagagaacaccgtatttgatatttcaccatcttcactttctgtttctgttgagcatagtcatttgacgattccccaaaaattccaggtcactggattttctgttggagggcgtgttatcgatggttatggtgctggtgtggagagtgccaatgttatagttgatgggcagttgagagccataacagatagtcttggatactatagactcgatcaggttacatccaagaagtatactataactgccgagaaggatcattataagttcaaccgtttggaggattttatgattttaccaaatttggcaagtattgatgatatcagatcagttagatatgatgtatgtggtattgttcgaacagttactctgaattcaaaagcaatggttactttaacacatggaccagaaaatgtaaagccacagcggaaattagtgggtgaaaatggacatttttgctttgaggttcctgctggtgaataccagttatctgcattacctgtagattccgaacgctcttctagtcttatgttttcaccgggatctattagcgtcaatgtaaatagcccgttgcttgatctggaattctctcagtcacaagtcaatgttcatggtaaagtctcatgcaaacagcaatgcagccagaacattctggtctcacttgttagattggctggcggagttgaacaggaaaagaagacaactacattggaacaagataatgttaattttgtgtttaagaaagtatttcctggaaaatatcgtgtagaggtgaagaattctttacccgagggcttagctaaggatgattggtgctgggaccagagtatcttgaatatagatgttggtactgatgatgtgagagacattgtgtttgtacaaaaaggctattggattgagctagtttcaactcatgatactaatgcttatattcagcagccagattcttctagacttgatttgttgataaagaaaggatcacaaagaatttgtgttgaaacttcagggcaacatgagattcatttaactaatccttgtatttcctttgggacctcgtctgttttgtttgatacagctaatttaatgccgatccatatcaatgcaaagaagtatcttgtaaaaggtgaaatccatgtggacatgagctccattcaggaaaacattgattccaaggacatagtcgtggatatcttgaagagtgatggcagtttcatagaaaagatatccacatcacttgttcttggaaaggacaatcaaaatgacttcactgcctttgagtactctatttgggctgaccttggggaggacttcatctttgtcccccatgattctagcattggaaggaacaaagtcctattttatccagcaagacagcagtattcagtttctatgaatggatgccaagatactgttcctctaatcactgcaagaactggtctatatcttgaaggatcagtgttacctgcaacttctgatgttgacatcaagattctagcagctggaaagagcaactatgcccatctgaacaaaggggatgtagcaacagaggcaaagacagattctgaaggatcattttttgcaggatggttaccatctcaaacaaactggcccatacaccttttcttgtcagaagcttggtcagatattagtgcggatttatggtgaaaattcagagcttttaccttcagtattattatcattgagtggcgagaaagggtacagaaataactcaattagtagttctggtggaaccttcacctttgacaacttatttcctggaagtttctatctccgaccacttctaaaggaatataaatttaatccgtcagcagtagctattgatcttaattctggagagtctagggaggctgaatttcgtgcaaccagagtggcttacagtgccatgggttctgtaacactattaactggccaaccaaaggagggtgtttttgttgaagcaagatctgaatccacaggtttttatgaggaagctaccacggattcttttggtagatttcgtcttagaggacttgtgcctggatcgacttactctataagagtggctgcaaaagataatcttcagtttgcagcagttgagcgtgcttcacctgaatatttgtcagttaatgttggtcatgaagacatgactggtattgattttgtggtttttgaacgccccgaagtaacaatcttgagtggccatgtggaaggagatggcattgatacgttacatccgcatctctctgttgaaatcagatcagcaacagactcttctagagtagaagctgtacttcctcttcctctttcatactactttgaagtccgagatttgcccaagggcaagcatcttgttcagcttcgatctggccttccatcacatacacataggtttgaatcggagttagtcgaagtagatctggaaaaggatccccaaatccatgttggtcccctcaaatataaaactgaggagcgtcatcaaaagcaggaactgaccccagcaccagtttttccgcttattgttggagtttctgtggttgcactggtgatcagtatgccaaggttaaatgacttataccagagcgctgtagggatgacttctctgggttcagggatggcaccgaccaaaaaggagccacgcaagaatatattaagaaagagagtgtaaatggcagattagcttagccttaggggtcgagaaatgagacatgacaaattgagcaatttcaagagtggaatagcttctggtttccccctcgggtaattttgccgacgaaaaggaatgccagttttgttgtacgatagcactatgcacagtttttgaagccttagattgtgccgttttgcagttttagactataaagaaagagttgctgcatcatgaatgaactttctcaccagtcagcatgcacgatcgaataggttaatctgagcggtccaggactaagtagaatagacaagtttgttgtggcacgttgtttgcccctctttttgattgtacaacgaccaagtaaagcgtgcgcaatgacttctctatgacttacggatctggttcgccctttagcatatgtggtctagcgtggagcgtttataatataaatttaaatagtttttaaaattatttttaatgtaaataataaataaatatgatttatctaag

SEQ ID NO: 72328 - DNA, 3516 bp, Zea Mays
cttttattgataatcactaacgctacaaccatatgattgcatggaaatccaatagtgggagtccacctatatttgtattcaaatgatgtaacgaaggtcccttgcccacaaggtttcagtgatgcacccaaggaaggtgcactttgccatgcaatatctggtgctgatgggaagttcacatttagatcactaccttgtggtagctatgagttgttgccatactacaagggagagaacaccgtatttgatatttcaccatcttcactttctgtttctgttgagcatagtcatttgacgattccccaaaaattccaggtcactggattttctgttggagggcgtgttatcgatggttatggtgctggtgtggagagtgccaatgttatagttgatgggcagttgagagccataacagatagtcttggatactatagactcgatcaggttacatccaagaagtatactataactgccgagaaggatcattataagttcaaccgtttggaggattttatgattttaccaaatttggcaagtattgatgatatcagatcagttagatatgatgtatgtggtattgttcgaacagttactctgaattcaaaagcaatggttactttaacacatggaccagaaaatgtaaagccacagcggaaattagtgggtgaaaatggacatttttgctttgaggttcctgctggtgaataccagttatctgcattacctgtagattccgaacgctcttctagtcttatgttttcaccgggatctattagcgtcaatgtaaatagcccgttgcttgatctggaattctctcagtcacaagtcaatgttcatggtaaagtctcatgcaaacagcaatgcagccagaacattctggtctcacttgttagattggctggcggagttgaacaggaaaagaagacaactacattggaacaagataatgttaattttgtgtttaagaaagtatttcctggaaaatatcgtgtagaggtgaagaattctttacccgagggcttagctaaggatgattggtgctgggaccagagtatcttgaatatagatgttggtactgatgatgtgagagacattgtgtttgtacaaaaaggctattggattgagctagtttcaactcatgatactaatgcttatattcagcagccagattcttctagacttgatttgttgataaagaaaggatcacaaagaatttgtgttgaaacttcagggcaacatgagattcatttaactaatccttgtatttcctttgggacctcgtctgttttgtttgatacagctaatttaatgccgatccatatcaatgcaaagaagtatcttgtaaaaggtgaaatccatgtggacatgagctccattcaggaaaacattgattccaaggacatagtcgtggatatcttgaagagtgatggcagtttcatagaaaagatatccacatcacttgttcttggaaaggacaatcaaaatgacttcactgcctttgagtactctatttgggctgaccttggggaggacttcatctttgtcccccatgattctagcattggaaggaacaaagtcctattttatccagcaagacagcagtattcagtttctatgaatggatgccaagatactgttcctctaatcactgcaagaactggtctatatcttgaaggatcagtgttacctgcaacttctgatgttgacatcaagattctagcagctggaaagagcaactatgcccatctgaacaaaggggatgtagcaacagaggcaaagacagattctgaaggatcattttttgcaggtcctttgtatgatgacatagtatataaagttgaagcttcaaaggatggttaccatctcaaacaaactggcccatacaccttttcttgtcagaagcttggtcagatattagtgcggatttatggtgaaaattcagagcttttaccttcagtattattatcattgagtggcgagaaagggtacagaaataactcaattagtagttctggtggaaccttcacctttgacaacttatttcctggaagtttctatctccgaccacttctaaaggaatataaatttaatccgtcagcagtagctattgatcttaattctggagagtctagggaggctgaatttcgtgcaaccagagtggcttacagtgccatgggttctgtaacactattaactggccaaccaaaggagggtgtttttgttgaagcaagatctgaatccacaggtttttatgaggaagctaccacggattcttttggtagatttcgtcttagaggacttgtgcctggatcgacttactctataagagtggctgcaaaagataatcttcagtttgcagcagttgagcgtgcttcacctgaatatttgtcagttaatgttggtcatgaagacatgactggtattgattttgtggtttttgaacgccccgaagtaacaatcttgagtggccatgtggaaggagatggcattgatacgttacatccgcatctctctgttgaaatcagatcagcaacagactcttctagagtagaagctgtacttcctcttcctctttcatactactttgaagtccgagatttgcccaagggcaagcatcttgttcagcttcgatctggccttccatcacatacacataggtttgaatcggagttagtcgaagtagatctggaaaaggatccccaaatccatgttggtcccctcaaatataaaactgaggagcgtcatcaaaagcaggaactgaccccagcaccagtttttccgcttattgttggagtttctgtggttgcactggtgatcagtatgccaaggtttgctgctatctcacagtgaatctcatggtgcaacctttggtaactatgggttagtaactattttctgtaatgttttgatctgtgcaggttaaatgacttataccagagcgctgtagggatgacttctctgggttcagggatggcaccgaccaaaaaggagccacgcaagaatatattaagaaagagagtgtaaatggcagattagcttagccttaggggtcgagaaatgagacatgacaaattgagcaatttcaagagtggaatagcttctggtttccccctcgggtaattttgccgacgaaaaggaatgccagttttgttgtacgatagcactatgcacagtttttgaagccttagattgtgccgttttgcagttttagactataaagaaagagttgctgcatcatgaatgaactttctcaccagtcagcatgcacgatcgaataggttaatctgagcggtccaggactaagtagaatagacaagtttgttgtggcacgttgtttgcccctctttttgattgtacaacgaccaagtaaagcgtgcgcaatgacttctctatgacttacggatctggttcgccctttagcatatgtggtctagcgtggagcgtttataatataaatttaaatagtttttaaaattatttttaatgtaaataataaataaatatgatttatctaag

SEQ ID NO: 72329 - DNA, 3144 bp, Zea Mays
atgacctttgccatgggtcttatcctcacgtcacctccatcacttcttgggacgtgcatataccttgctgacagaagtgtccacatcaccattcaaatgggaaagggttcataattgtgttttagccatcacttgctccctcaaattcaacaaaaaaccaaggttacatccaagaagtatactataactgccgagaaggatcattataagttcaaccgtttggaggattttatgattttaccaaatttggcaagtattgatgatatcagatcagttagatatgatgtatgtggtattgttcgaacagttactctgaattcaaaagcaatggttactttaacacatggaccagaaaatgtaaagccacagcggaaattagtgggtgaaaatggacatttttgctttgaggttcctgctggtgaataccagttatctgcattacctgtagattccgaacgctcttctagtcttatgttttcaccgggatctattagcgtcaatgtaaatagcccgttgcttgatctggaattctctcagtcacaagtcaatgttcatggtaaagtctcatgcaaacagcaatgcagccagaacattctggtctcacttgttagattggctggcggagttgaacaggaaaagaagacaactacattggaacaagataatgttaattttgtgtttaagaaagtatttcctggaaaatatcgtgtagaggtgaagaattctttacccgagggcttagctaaggatgattggtgctgggaccagagtatcttgaatatagatgttggtactgatgatgtgagagacattgtgtttgtacaaaaaggctattggattgagctagtttcaactcatgatactaatgcttatattcagcagccagattcttctagacttgatttgttgataaagaaaggatcacaaagaatttgtgttgaaacttcagggcaacatgagattcatttaactaatccttgtatttcctttgggacctcgtctgttttgtttgatacagctaatttaatgccgatccatatcaatgcaaagaagtatcttgtaaaaggtgaaatccatgtggacatgagctccattcaggaaaacattgattccaaggacatagtcgtggatatcttgaagagtgatggcagtttcatagaaaagatatccacatcacttgttcttggaaaggacaatcaaaatgacttcactgcctttgagtactctatttgggctgaccttggggaggacttcatctttgtcccccatgattctagcattggaaggaacaaagtcctattttatccagcaagacagcagtattcagtttctatgaatggatgccaagatactgttcctctaatcactgcaagaactggtctatatcttgaaggatcagtgttacctgcaacttctgatgttgacatcaagattctagcagctggaaagagcaactatgcccatctgaacaaaggggatgtagcaacagaggcaaagacagattctgaaggatcattttttgcaggtcctttgtatgatgacatagtatataaagttgaagcttcaaaggatggttaccatctcaaacaaactggcccatacaccttttcttgtcagaagcttggtcagatattagtgcggatttatggtgaaaattcagagcttttaccttcagtattattatcattgagtggcgagaaagggtacagaaataactcaattagtagttctggtggaaccttcacctttgacaacttatttcctggaagtttctatctccgaccacttctaaaggaatataaatttaatccgtcagcagtagctattgatcttaattctggagagtctagggaggctgaatttcgtgcaaccagagtggcttacagtgccatgggttctgtaacactattaactggccaaccaaaggagggtgtttttgttgaagcaagatctgaatccacaggtttttatgaggaagctaccacggattcttttggtagatttcgtcttagaggacttgtgcctggatcgacttactctataagagtggctgcaaaagataatcttcagtttgcagcagttgagcgtgcttcacctgaatatttgtcagttaatgttggtcatgaagacatgactggtattgattttgtggtttttgaacgccccgaagtaacaatcttgagtggccatgtggaaggagatggcattgatacgttacatccgcatctctctgttgaaatcagatcagcaacagactcttctagagtagaagctgtacttcctcttcctctttcatactactttgaagtccgagatttgcccaagggcaagcatcttgttcagcttcgatctggccttccatcacatacacataggtttgaatcggagttagtcgaagtagatctggaaaaggatccccaaatccatgttggtcccctcaaatataaaactgaggagcgtcatcaaaagcaggaactgaccccagcaccagtttttccgcttattgttggagtttctgtggttgcactggtgatcagtatgccaaggttaaatgacttataccagagcgctgtagggatgacttctctgggttcagggatggcaccgaccaaaaaggagccacgcaagaatatattaagaaagagagtgtaaatggcagattagcttagccttaggggtcgagaaatgagacatgacaaattgagcaatttcaagagtggaatagcttctggtttccccctcgggtaattttgccgacgaaaaggaatgccagttttgttgtacgatagcactatgcacagtttttgaagccttagattgtgccgttttgcagttttagactataaagaaagagttgctgcatcatgaatgaactttctcaccagtcagcatgcacgatcgaataggttaatctgagcggtccaggactaagtagaatagacaagtttgttgtggcacgttgtttgcccctctttttgattgtacaacgaccaagtaaagcgtgcgcaatgacttctctatgacttacggatctggttcgccctttagcatatgtggtctagcgtggagcgtttataatataaatttaaatagtttttaaaattatttttaatgtaaataataaataaatatgatttatctaag

SEQ ID NO: 72330 - DNA, 1705 bp, Zea Mays
  misc_feature (1)..(2): n is a, c, g, or t
nnaagctttacaggcctggatctgttggttttgtgtctaaatcgggtggcatgtcaaatgagatgtacagcaccattgccagagtgacagatggtatttatgaaggaattgcaattggaggggatgttttccctggatcaactctgtcagaccacattctgcgttttaataacataccacaggttaaaatgatggttgttcttggggagcttggtggaaaagacgagtattcacttgtggaagcattgaaacaaggaaaggtccagaaaccagttgttgcatgggttagtgggacatgtgcacgtctattcaaatcagaagtgcagtttggccatgctggtgccaagagtggtggtgagttagaatcagcacaagctaagaatcaggcactaaaggaagctggtgcaattgtgcctacttcatatgaagctcttgaaagtgcaattaaggaaacatttgacaaactgtttgaggaaggaaaaatttctcctgttactgaaattacaccgcctctcattcctgaggaccttaaaactgcaatcaagagtgggaaggtccgagctcctacccacatcatctccactatttctgatgacagaggcgatgaaccatgctatgctggtgtccctatgtctacaattattgaacagggttatggagttggtgatgttatttctcttttgtggttcaagcgcagccttcctcgctattgcactcagtttattgagatatgcgtcatgctttgtgctgaccatggtccctgtgtatctggtgctcataactctatagttactgctagggccggaaaggaccttgtttccagcttggtgtctggattattgacgattggtccccgtttcggtggagcaattgatgatgcagcccgatacttcaaagatgcatgtgataggagcctcacgccatacgagtttgttgaaggcatgaaaaagaagggaatccgtgtgcctgggattggtcacaggattaagagcagagacaacagggataagcgtgtgcagcttctacagaaatatgctcacacacatttcccttcagtcaagtacatggaatacgctgttcaggagatcgatgagattgtggagatcggttatctcaatgggctctttgtgcttgcacgatcaattggcctgatcgggcataccttcgaccagaagaggctcaagcagccactctaccgtcacccatgggaggatgtactttacaccaagtgagaaagccattctttgcaaggcataataaagtattattatcgcctagagcttccagttgcctgtacacttcattaaatcgagcacttgcaaaaaagaaagccagagagagaggaagacgaacatcactagtcagcactagattgtgtgttttatgttgagttgcaaattcaggtcctgatttttgtcctgccatgaaccgttaggcgatattgtattggaaaggatgcttcctttattgtttcacgatatatggcctcagaatagaaatttccattaaaaatgaactctgatttgttcgtcgataaagtgcatttgtacagacacgcattacgaaactaggcattttcaatagcatattaatccagaaaaggatacaagttggtgacaacaaaaagatacacgtgtgaacttagtaagattttatgatgaatgtgagcatagtactgggaaatgtgacatgaaaccaaacaaaa

SEQ ID NO: 72331 - DNA, 1755 bp, Zea Mays
  misc_feature (1)..(2): n is a, c, g, or t
nnaagctttacaggcctggatctgttggttttgtgtctaaatcgggtggcatgtcaaatgagatgtacagcaccattgccagagtgacagatggtatttatgaaggaattgcaattggaggggatgttttccctggatcaactctgtcagaccacattctgcgttttaataacataccacaggttaaaatgatggttgttcttggggagcttggtggaaaagacgagtattcacttgtggaagcattgaaacaaggaaaggtccagaaaccagttgttgcatgggttagtgggacatgtgcacgtctattcaaatcagaagtgcagtttggccatgctggtgccaagagtggtggtgagttagaatcagcacaagctaagaatcaggcactaaaggaagctggtgcaattgtgcctacttcatatgaagctcttgaaagtgcaattaaggaaacatttgacaaactgtttgaggaaggaaaaatttctcctgttactgaaattacaccgcctctcattcctgaggaccttaaaactgcaatcaagagtgggaaggtccgagctcctacccacatcatctccactatttctgatgacagaggcgatgaaccatgctatgctggtgtccctatgtctacaattattgaacagggttatggagttggtgatgttatttctcttttgtggttcaagcgcagccttcctcgctattgcactcagtttattgagttactgctagggccggaaaggaccttgtttccagcttggtgtctggattattgacgattggtccccgtttcggtggagcaattgatgatgcagcccgatacttcaaagatgcatgtgataggagcctcacgccatacgagtttgttgaaggcatgaaaaagaagggaatccgtgtgcctgggattggtcacaggattaagagcagagacaacagggataagcgtgtgcagcttctacagaaatatgctcacacacatttcccttcagtcaagtacatggaatacgctgttcaggttgagacctacaccttgtcaaaagccaacaatttggttatgaatgtcgatggtgcgatcgggtcccttttcttggatcttctatctggaagtggaatgttcaccaaacaggagatcgatgagattgtggagatcggttatctcaatgggctctttgtgcttgcacgatcaattggcctgatcgggcataccttcgaccagaagaggctcaagcagccactctaccgtcacccatgggaggatgtactttacaccaagtgagaaagccattctttgcaaggcataataaagtattattatcgcctagagcttccagttgcctgtacacttcattaaatcgagcacttgcaaaaaagaaagccagagagagaggaagacgaacatcactagtcagcactagattgtgtgttttatgttgagttgcaaattcaggtcctgatttttgtcctgccatgaaccgttaggcgatattgtattggaaaggatgcttcctttattgtttcacgatatatggcctcagaatagaaatttccattaaaaatgaactctgatttgttcgtcgataaagtgcatttgtacagacacgcattacgaaactaggcattttcaatagcatattaatccagaaaaggatacaagttggtgacaacaaaaagatacacgtgtgaacttagtaagattttatgatgaatgtgagcatagtactgggaaatgtgacatgaaaccaaacaaaa

SEQ ID NO: 72332 - DNA, 1803 bp, Zea Mays
  misc_feature (1)..(1): n is a, c, g, or t
naagctttacaggcctggatctgttggttttgtgtctaaatcgggtggcatgtcaaatgagatgtacagcaccattgccagagtgacagatggtatttatgaaggaattgcaattggaggggatgttttccctggatcaactctgtcagaccacattctgcgttttaataacataccacaggttaaaatgatggttgttcttggggagcttggtggaaaagacgagtattcacttgtggaagcattgaaacaaggaaaggtccagaaaccagttgttgcatgggttagtgggacatgtgcacgtctattcaaatcagaagtgcagtttggccatgctggtgccaagagtggtggtgagttagaatcagcacaagctaagaatcaggcactaaaggaagctggtgcaattgtgcctacttcatatgaagctcttgaaagtgcaattaaggaaacatttgacaaactgtttgaggaaggaaaaatttctcctgttactgaaattacaccgcctctcattcctgaggaccttaaaactgcaatcaagagtgggaaggtccgagctcctacccacatcatctccactatttctgatgacagaggcgatgaaccatgctatgctggtgtccctatgtctacaattattgaacagggttatggagttggtgatgttatttctcttttgtggttcaagcgcagccttcctcgctattgcactcagtttattgagatatgcgtcatgctttgtgctgaccatggtccctgtgtatctggtgctcataactctatagttactgctagggccggaaaggaccttgtttccagcttggtgtctggattattgacgattggtccccgtttcggtggagcaattgatgatgcagcccgatacttcaaagatgcatgtgataggagcctcacgccatacgagtttgttgaaggcatgaaaaagaagggaatccgtgtgcctgggattggtcacagagacaacagggataagcgtgtgcagcttctacagaaatatgctcacacacatttcccttcagtcaagtacatggaatacgctgttcaggttgagacctacaccttgtcaaaagccaacaatttggttatgaatgtcgatggtgcgatcgggtcccttttcttggatcttctatctggaagtggaatgttcaccaaacaggagatcgatgagattgtggagatcggttatctcaatgggctctttgtgcttgcacgatcaattggcctgatcgggcataccttcgaccagaagaggctcaagcagccactctaccgtcacccatgggaggatgtactttacaccaagtgagaaagccattctttgcaaggcataataaagtattattatcgcctagagcttccagttgcctgtacacttcattaaatcgagcacttgcaaaaaagaaagccagagagagaggaagacgaacatcactagtcagcactagattgtgtgttttatgttgagttgcaaattcaggtcctgatttttgtcctgccatgaaccgttaggcgatattgtattggaaaggatgcttcctttattgtttcacgatatatggcctcagaatagaaatttccattaaaaatgaactctgatttgttcgtcgataaagtgcatttgtacagacacgcattacgaaactaggcattttcaatagcatattaatccagaaaaggatacaagttggtgacaacaaaaagatacacgtgtgaacttagtaagattttatgatgaatgtgagcatagtactgggaaatgtgacatgaaaccaaacaaaa

SEQ ID NO: 72333 - DNA, 1841 bp, Zea Mays
aagctttacaggcctggatctgttggttttgtgtctaaatcgggtggcatgtcaaatgagatgtacagcaccattgccagagtgacagatggtatttatgaaggaattgcaattggaggggatgttttccctggatcaactctgtcagaccacattctgcgttttaataacataccacaggttaaaatgatggttgttcttggggagcttggtggaaaagacgagtattcacttgtggaagcattgaaacaaggaaaggtccagaaaccagttgttgcatgggttagtgggacatgtgcacgtctattcaaatcagaagtgcagtttggccatgctggtgccaagagtggtggtgagttagaatcagcacaagctaagaatcaggcactaaaggaagctggtgcaattgtgcctacttcatatgaagctcttgaaagtgcaattaaggaaacatttgacaaactggttctgaggctcaaatatatttggcagtttgaggaaggaaaaatttctcctgttactgaaattacaccgcctctcattcctgaggaccttaaaactgcaatcaagagtgggaaggtccgagctcctacccacatcatctccactatttctgatgacagaggcgatgaaccatgctatgctggtgtccctatgtctacaattattgaacagggttatggagttggtgatgttatttctcttttgtggttcaagcgcagccttcctcgctattgcactcagtttattgagatatgcgtcatgctttgtgctgaccatggtccctgtgtatctggtgctcataactctatagttactgctagggccggaaaggaccttgtttccagcttggtgtctggattattgacgattggtccccgtttcggtggagcaattgatgatgcagcccgatacttcaaagatgcatgtgataggagcctcacgccatacgagtttgttgaaggcatgaaaaagaagggaatccgtgtgcctgggattggtcacaggattaagagcagagacaacagggataagcgtgtgcagcttctacagaaatatgctcacacacatttcccttcagtcaagtacatggaatacgctgttcaggttgagacctacaccttgtcaaaagccaacaatttggttatgaatgtcgatggtgcgatcgggtcccttttcttggatcttctatctggaagtggaatgttcaccaaacaggagatcgatgagattgtggagatcggttatctcaatgggctctttgtgcttgcacgatcaattggcctgatcgggcataccttcgaccagaagaggctcaagcagccactctaccgtcacccatgggaggatgtactttacaccaagtgagaaagccattctttgcaaggcataataaagtattattatcgcctagagcttccagttgcctgtacacttcattaaatcgagcacttgcaaaaaagaaagccagagagagaggaagacgaacatcactagtcagcactagattgtgtgttttatgttgagttgcaaattcaggtcctgatttttgtcctgccatgaaccgttaggcgatattgtattggaaaggatgcttcctttattgtttcacgatatatggcctcagaatagaaatttccattaaaaatgaactctgatttgttcgtcgataaagtgcatttgtacagacacgcattacgaaactaggcattttcaatagcatattaatccagaaaaggatacaagttggtgacaacaaaaagatacacgtgtgaacttagtaagattttatgatgaatgtgagcatagtactgggaaatgtgacatgaaaccaaacaaaa

SEQ ID NO: 72334 - DNA, 1403 bp, Zea Mays
ctaaactcgagcttggtcgcttggccatgcactgtccctgcgccgcagttgactccgtttgtctcgcggtctcgcccccgtctcgctctccgacgactggtgtgccgccgccgtcctgtgccaggtgctaaggccttcgtcagtatcttcgccggcgacgagcacccaccagctccttgatttctagaaagaaaggaggggttgttttcctacatcttgatcatttggagatttttctgtcattctaatggaggtaaaggaagtatgtgtccaagatatgttggttgacctggagaaaggcaagtgcttgctacccatagaggacaatagtgggatgaaggttaattcaatagctgggcatgcaagtacaatgcggcccagctcatgggatgatcttgtagcactgaaggatgataagagtcaccacatatgttgtttctcttcacaccgtcaagattcatctgttaaaagtggagagcctatgaaagctgaaggggagatcaaggttgggattttggataagtcaactgctgataaggaaaataaaaaatggtataagaagccgccacgacctccaagatcacagactacttcaccattagaccctgctgatcagaagctcatcagtgcactatcggagcttgcggtgttaaagaaggctaggattgagcgtatgaaggcattgaagaagatgaagaattccaaaccagcatcttccattgggaacttggtggctttgatcattaccgtcatcttatgtttcttcatactttggcaagtatttttatgtaatatttgatatttctcaatggacaggcttgctgatgaaataaaacactgtaagtcgttagactacttcagccccgagtgatcatgtcagaaataagactgcctaaaactcaccgccttcaattatacagggtttttctcaaggcacgggtaatactggagtggctacgatgatggaaatccatggtgagatcaggagtgtcactgaataattagattgctgggcttcgttcgtcatagtcgcgtcgtggcgagtcccctctgattttgcatatgctccacggaatcaccgttgtccggtttgctccccaggccctgtacagtgtaaacttctgaaagttgaaattgccctttgcagaatactggtgttgtaaattatcactggttgattggtgatattttgtaactgttttttttaacaagggctgttattttgttgaagccatttaggaagagaaaactattgcttttttagtgacatcgtggagttaatttgcttggatgaattttaagaaactagtgcaactggttaggtatctgtatattgctacggtttctataaatcacataggtagatcttatttagatgagatagtttcagacatgtttcaaac

SEQ ID NO: 72335 - DNA, 1357 bp, Zea Mays
tggccatgcactgtccctgcgccgcagttgactccgtttgtctcgcggtctcgcccccgtctcgctctccgacgactggtgtgccgccgccgtcctgtgccaggtgctaaggccttcgtcagtatcttcgccggcgacgagcacccaccagctccttgatttctagaaagaaaggaggggttgttttcctacatcttgatcatttggagatttttctgtcattctaatggaggtaaaggaagtatgtgtccaagatatgttggttgacctggagaaaggcaagtgcttgctacccatagaggacaatagtgggatgaaggttaattcaatagctgggcatgcaagtacaatgcggcccagctcatgggatgatcttgtagcactgaaggatgataagagtcaccacatatgttgtttctcttcacaccgtcaagattcatctgttaaaagtggagagcctatgaaagctgaaggggagatcaaggttgggattttggataagtcaactgctgataaggaaaataaaaaatggtataagaagccgccacgacctccaagatcacagactacttcaccattagaccctgctgatcagaagctcatcagtgcactatcggagcttgcggtgttaaagaaggctaggattgagcgtatgaaggcattgaagaagatgaagaattccaaaccagcatcttccattgggaacttggtggctttgatcattaccgtcatcttatgtttcttcatactttggcaaggcttgctgatgaaataaaacactggtttttctcaaggcacggggtgagcataagcttccataggccatctatatcatcagtcagaatgcatggtggtcttatctccatccagttctacattaagaatgtcacaacttaatactggagtggctacgatgatggaaatccatggtgagatcaggagtgtcactgaataattagattgctgggcttcgttcgtcatagtcgcgtcgtggcgagtcccctctgattttgcatatgctccacggaatcaccgttgtccggtttgctccccaggccctgtacagtgtaaacttctgaaagttgaaattgccctttgcagaatactggtgttgtaaattatcactggttgattggtgatattttgtaactgttttttttaacaagggctgttattttgttgaagccatttaggaagagaaaactattgcttttttagtgacatcgtggagttaatttgcttggatgaattttaagaaactagtgcaactggttaggtatctgtatattgctacggtttctataaatcacataggtagatcttatttagatgagatagtttcagacatgtttcaaac

SEQ ID NO: 72336 - DNA, 1336 bp, Zea Mays
gccatgcactgtccctgcgccgcagttgactccgtttgtctcgcggtctcgcccccgtctcgctctccgacgactggtgtgccgccgccgtcctgtgccaggtgctaaggccttcgtcagtatcttcgccggcgacgagcacccaccagctccttgatttctagaaagaaaggaggggttgttttcctacatcttgatcatttggagatttttctgtcattctaatggaggtaaaggaagtatgtgtccaagatatgttggttgacctggagaaaggcaagtgcttgctacccatagaggacaatagtgggatgaaggttaattcaatagctgggcatgcaagtacaatgcggcccagctcatgggatgatcttgtagcactgaaggatgataagagtcaccacatatgttgtttctcttcacaccgtcaagattcatctgttaaaagtggagagcctatgaaagctgaaggggagatcaaggttgggattttggataagtcaactgctgataaggaaaataaaaaatggtataagaagccgccacgacctccaagatcacagactacttcaccattagaccctgctgatcagaagctcatcagtgcactatcggagcttgcggtgttaaagaaggctaggattgagcgtatgaaggcattgaagaagatgaagaattccaaaccagcatcttccattgggaacttggtggctttgatcattaccgtcatcttatgtttcttcatactttggcaaggcttgctgatgaaataaaacactgtaagtcgttagactacttcagccccgagtgatcatgtcagaaataagactgcctaaaactcaccgccttcaattatacagggtttttctcaagtaatactggagtggctacgatgatggaaatccatggtgagatcaggagtgtcactgaataattagattgctgggcttcgttcgtcatagtcgcgtcgtggcgagtcccctctgattttgcatatgctccacggaatcaccgttgtccggtttgctccccaggccctgtacagtgtaaacttctgaaagttgaaattgccctttgcagaatactggtgttgtaaattatcactggttgattggtgatattttgtaactgttttttttaacaagggctgttattttgttgaagccatttaggaagagaaaactattgcttttttagtgacatcgtggagttaatttgcttggatgaattttaagaaactagtgcaactggttaggtatctgtatattgctacggtttctataaatcacataggtagatcttatttagatgagatagtttcagacatgtttcaaac

SEQ ID NO: 72337 - DNA, 1219 bp, Zea Mays
gccatgcactgtccctgcgccgcagttgactccgtttgtctcgcggtctcgcccccgtctcgctctccgacgactggtgtgccgccgccgtcctgtgccaggtgctaaggccttcgtcagtatcttcgccggcgacgagcacccaccagctccttgatttctagaaagaaaggaggggttgttttcctacatcttgatcatttggagatttttctgtcattctaatggaggtaaaggaagtatgtgtccaagatatgttggttgacctggagaaaggcaagtgcttgctacccatagaggacaatagtgggatgaaggttaattcaatagctgggcatgcaagtacaatgcggcccagctcatgggatgatcttgtagcactgaaggatgataagagtcaccacatatgttgtttctcttcacaccgtcaagattcatctgttaaaagtggagagcctatgaaagctgaaggggagatcaaggttgggattttggataagtcaactgctgataaggaaaataaaaaatggtataagaagccgccacgacctccaagatcacagactacttcaccattagaccctgctgatcagaagctcatcagtgcactatcggagcttgcggtgttaaagaaggctaggattgagcgtatgaaggcattgaagaagatgaagaattccaaaccagcatcttccattgggaacttggtggctttgatcattaccgtcatcttatgtttcttcatactttggcaagtaatactggagtggctacgatgatggaaatccatggtgagatcaggagtgtcactgaataattagattgctgggcttcgttcgtcatagtcgcgtcgtggcgagtcccctctgattttgcatatgctccacggaatcaccgttgtccggtttgctccccaggccctgtacagtgtaaacttctgaaagttgaaattgccctttgcagaatactggtgttgtaaattatcactggttgattggtgatattttgtaactgttttttttaacaagggctgttattttgttgaagccatttaggaagagaaaactattgcttttttagtgacatcgtggagttaatttgcttggatgaattttaagaaactagtgcaactggttaggtatctgtatattgctacggtttctataaatcacataggtagatcttatttagatgagatagtttcagacatgtttcaaac

SEQ ID NO: 72338 - DNA, 1362 bp, Zea Mays
gccatgcactgtccctgcgccgcagttgactccgtttgtctcgcggtctcgcccccgtctcgctctccgacgactggtgtgccgccgccgtcctgtgccaggtgctaaggccttcgtcagtatcttcgccggcgacgagcacccaccagctccttgatttctagaaagaaaggaggggttgttttcctacatcttgatcatttggagatttttctgtcattctaatggaggtaaaggaagtatgtgtccaagatatgttggttgacctggagaaaggcaagtgcttgctacccatagaggacaatagtgggatgaaggttaattcaatagctgggcatgcaagtacaatgcggcccagctcatgggatgatcttgtagcactgaaggatgataagagtcaccacatatgttgtttctcttcacaccgtcaagattcatctgttaaaagtggagagcctatgaaagctgaaggggagatcaaggttgggattttggataagtcaactgctgataaggaaaataaaaaatggtataagaagccgccacgacctccaagatcacagactacttcaccattagaccctgctgatcagaagctcatcagtgcactatcggagcttgcggtgttaaagaaggctaggattgagcgtatgaaggcattgaagaagatgaagaattccaaaccagcatcttccattgggaacttggtggctttgatcattaccgtcatcttatgtttcttcatactttggcaagggtttttctcaaggcacggggtgagcataagcttccataggccatctatatcatcagtcagaatgcatggtggtcttatctccatccagttctacattaagaatgtcacaactgttagcccccacagttcctctgcagctcaataatactggagtggctacgatgatggaaatccatggtgagatcaggagtgtcactgaataattagattgctgggcttcgttcgtcatagtcgcgtcgtggcgagtcccctctgattttgcatatgctccacggaatcaccgttgtccggtttgctccccaggccctgtacagtgtaaacttctgaaagttgaaattgccctttgcagaatactggtgttgtaaattatcactggttgattggtgatattttgtaactgttttttttaacaagggctgttattttgttgaagccatttaggaagagaaaactattgcttttttagtgacatcgtggagttaatttgcttggatgaattttaagaaactagtgcaactggttaggtatctgtatattgctacggtttctataaatcacataggtagatcttatttagatgagatagtttcagacatgtttcaaac

SEQ ID NO: 72339 - DNA, 2235 bp, Zea Mays
agccgcagcagtacccgcgcgggcccactccccctctcaccggttccacgcccagcgccagcgccagcgcgggcgcggctataaatggcgagccccagcagccccgagaccccgtgccacacatccatccccgttcgcctcttctcctccctcctgccgggtccttaataaagagcagcagcgcaaggtgagccgccagcttgccccgtacgtaccctgctgcttcttctccctcgttggaccgttcgttcgtcgtccttctcccgaggttcgtgcgtggttcgccttcgcccttcgggagatgctgcgaaccttaggcctttccttgctgcggacggggtaactgatacccatgttttgctgctggtggccgcaacgggatggcggatccgagtgtggggttcggtgatcagccggtttctctagatctgggatctccaaaatgtgttttttaatttatcgtgtctcagtcggcagtggagattttttttaaataatggtctgtcggcgtgatgtcgtttgcttgagggaagggagggttctctgattttgagatctgacggcactatttgttggccatccaattcgaacggtttctggttgtctgaattggtttgaacaaaattgcagaggttggtagagcgagcgagaagaaggcaatggcggcggagagcttcctgttcacctcggagtccgtgaacgaggggcacccagacaagctgtgcgaccaggtgtcggacgcggtgctggacgcctgcctggcgcaggaccccgacagcaaggtggcctgcgagacctgcaccaagacgaacatggtgatggtgttcggcgagatcaccaccaaggcgagcgtggactacgagaagatcgtgcgcgacacctgccgcgagatcgggttcacctccgacgacgtggggctcgacgccgaccgctgcaaggtgctggtgaacatcgagcagcagtcccccgacatcgcgcagggcgtgcacgggcacttcacgaagcggcccgaggagatcggcgccggcgaccagggccacatgttcgggtacgccaccgacgagacccccgagctgatgccgctgagccacgtgctggccaccaagctcggcgcgcgcctgacggaggtccgcaaggacggcacctgcgcctggctcaggcccgacggcaagacccaggtgacggtggagtacgtgaacgagggcggcgccatggtgcccgtccgcgtgcacaccgtgctcatctccacccagcacgacgagaccgtcaccaacgacgagatcgccgccgacctcaaggagcacgtcatcaagcccgtcatcccggagaggtacctggacgagaagaccatcttccacctcaacccgtcggggcgcttcgtcatcggcgggccccacggggacgccggcctcaccggccgcaagatcatcatcgacacctacggcggctggggagcccacggcgggggcgccttctccggcaaggaccccaccaaggtggaccgcagcggggcctacgtcgccaggcaggccgccaagagcatcgtggccagcggcctcgcccgccgctgcctcgtgcaggtgtcctacgccatcggcgtgccggagcccctgtccgtgttcgtcgactcctacggcaccgggaccatccccgacaaggagatcctaaagatcgtcaaggagaacttcgacttcaggccagggatgatcaccatcaacctcgacctcaagaagggcggcaacaggttcatcaagaccgccgcatacggccactttggccgtgacgacgccgacttcacctgggaggtggtcaagcccctaaagaaggcatccgcttaagaatgtattgggaagttcactggacatgaggttcatcttcgtctggctctgctgatacctgcaaggattgctgctgctgctgccgcccctggatgtgtgtttgatcagtgactggctgctctgctccatagaagatgaatgaagagagagatgcaaccaggattaatgcgctggtcttttatctttactactagtttggtctcgtccggtatcttatttttctttccccttttcgagtctgtactgaaactgctgagagatttgcagttttgatctatcatatcctttggtaatactgttcgtctcgagtgcgcactggtgcttgctctgtcgctcgtcgtcggtggcctttgaggaccatgaaaggtgaaaacaatgtttcatgtgacctttgggc

SEQ ID NO: 72340 - DNA, 3253 bp, Zea Mays
accagcttccctgcctggctgcatttgcaaacggtaggaacccagccggcctacccgcgccgtcgggccgcaagcatttctactaatctgctcttctcgtagacagaaaacccgcgagccccgagccccgaccaataggaagccgaggtccagccgtagtgacgtcgatttcgattaacccgagcggcgcaaatccggtgtcaccgaagcacatcttccatctccagcaattcttccttcctcctcgtcgcattccacgtccggatctcaaattgtcccatcccgtgctcctcctccccgatcccatccctccgctccagatccgcacgccgccaccggatccgcagccagcgcggccggcatggaggagacgccgccggggcagcgcccgcagccgccgccggcgcacgcgtctcctccgttcgcctcggcgcccttcacaccgccgccgcgcgtcttctctccaggcctcgccgccgcgcggggcacgcccagccccggctcggggcccggccacgcgctgccgcacctcagcacgccacccggcccgcccgtcttctcctcgccgctgcgccctgcggccgtgcccttccgcgccaccccggcctctccccaccccgtgtccttcgccgcttcggggggctactcctcgtcctcctccgccactgccgctaccaccgcctccctccccacctcatcagcgccgcactttctcaacggcgctgccacgcttcacggggaccatgcccctgcgccatcatcaatccagggagacggcctcgacagtccctatgtacagttctccgcaaacaaggttctgaagcagaagaagctgctcaatgcccctagcttggggttcggagctctggtttctccagggaaggaggtgtcacctggcccagaggttgtggagcgtgatccacgccgttgcctgaactgtggcgcctatgtgaacttgtactgtgatgtccagatcggctccgggcagtggcaatgcgtcatttgcaagaagctcaatggcagcgagggggaattcgttgtctccagcaagcaggacctgctccagtggccagagcttgcatccacgactgtggattatgtgcaggtggggaacaggcgtccaggctttgtcccagtgtctgacacgagggtgtccggccccatttttatcctcatagatgaatgcctcgatgaggcgcacctgcagcatcttcagggctccttgcatgcctttgtggattcgctccctcctaccgcaaagataggaataatcacctatgggagaactgtctcagtgtatgatttctcagagggggcagcagtgtcagcggatgtgctacctggaaacaagtcgcctacccatgagtctttgaaggccctaatctatgggacaggtgtttacctgtctcctatacatgcttcgctacctgttgcacacacaatattctcatctctgagaccctatcagctgagcgtgccagaagtgttaagggatcggtgtgttggagcagcagtagaggttgcccttggtattattcaagggccatcagtggagttgtctcgtggaatcatcaagagatctggtggaaactgtaggatcttggtgtgtgctggtggccctagcacctttggaccaggatcggtgcctcattcagctaaacatcccaactatgcttatctggagaagacagctatgaagtggatggagagtcttggtcatgaagcacagagacacagtactgttgttgatatcttttgtgctggacagtgtcctgtgagggtccctgttctgcaaccattggcaaagtgttctggaggtgtgctcttagctcatgatgactttggagaggcctttggggtcaatttgcaaagggcatcaactagagcagctggttcccatggcttatttgagatcaggtgttcagataacatgtatgttactcaagttattggccctggtgaagaggcttctcctgattctcatgaaacgttcaaacatggtagttccttctgtatccagatgcatagtgttgaggaaacacagagtttttctgtgtctatggagacaaaggctgatatcaaaagtgattttgttttctttcagtttgctgtccattattccaatatatatcaaacagaaatcactcgggtgatcactatgaggctgcagactgatgatggtttgtctgcatatctggcaagtgtgcaggaggatgttgcggcagttatcattggtaaaagaactgtattgcgtgccaggactgcctctgatgctattgatatgaggctctcaattgatgaaagagtaaaggacatagctctaaaatttggtagtcaggctcccaaatcaaagctttaccgcttcccaaaagaactagcatcactcccagagtgcttgtttcatctgaaaaggggaccacttttaggtagcataatcggacatgaagatgaaagatccgtacttaggaatttgttcctgaatgcttcgtttgacctttcgctccgtatgttggcacctcggtgcataatgcatcgtgaaggtggtacatttgaggagctgccagcatatgatcttgtcatgcaatctaatgctgcagtggtactggaccatggaacagatattttcatttggttgggtgctgagctagcagcccaagaaggacaaagtgcagcagctttagcagcatgccgtactctggcagaagagctcagcgagaaacgttttccagctcccaggatactttcattcaaacaaggaagctctcaggctagatattttgtctcacgcctgatcccagctcacaaggaccctacatatgagcaggagtcaaggtttcctcaattgcggacactcactcctgagcaaagggctaggctaaagagcagcttcatccagttcgatgactatagtttttgcgagtggatgcgcagcctcaaattggtcccaccagaaccaagctaacacaactagtctggggggtacacttccgaacggtggatagcaacaaaatctatggcgtggcatctgatagagctttccctctaagatagatgtgatcttcatgaaccaaattatggcatcgccagatattcgtgagccgatcatacgtttggtttggtgggcagccatttaggggtagccgcagctctcagcctctcaccttcctgggaggatcaaggcctttgcagtataactctgccatttgcatgctagatcaattccattctgtttatgagcagatgtgaaaatgag

SEQ ID NO: 72341 - DNA, 3327 bp, Zea Mays
taggaacccagccggcctacccgcgccgtcgggccgcaagcatttctactaatctgctcttctcgtagacagaaaacccgcgagccccgagccccgaccaataggaagccgaggtccagccgtagtgacgtcgatttcgattaacccgagcggcgcaaatccggtgtcaccgaagcacatcttccatctccagcaattcttccttcctcctcgtcgcattccacgtccggatctcaaattgtcccatcccgtgctcctcctccccgatcccatccctccgctccagatccgcacgccgccaccggatccgcagccagcgcggccggcatggaggagacgccgccggggcagcgcccgcagccgccgccggcgcacgcgtctcctccgttcgcctcggcgcccttcacaccgccgccgcgcgtcttctctccaggcctcgccgccgcgcggggcacgcccagccccggctcggggcccggccacgcgctgccgcacctcagcacgccacccggcccgcccgtcttctcctcgccgctgcgccctgcggccgtgcccttccgcgccaccccggcctctccccaccccgtgtccttcgccgcttcggggggctactcctcgtcctcctccgccactgccgctaccaccgcctccctccccacctcatcagcgccgcactttctcaacggcgctgccacgcttcacggggaccatgcccctgcgccatcatcaatccagggagacggcctcgacagtccctatgtacagttctccgcaaacaaggttctgaagcagaagaagctgctcaatgcccctagcttggggttcggagctctggtttctccagggaaggaggtgtcacctggcccagaggttgtggagcgtgatccacgccgttgcctgaactgtggcgcctatgtgaacttgtactgtgatgtccagatcggctccgggcagtggcaatgcgtcatttgcaagaagctcaatggcagcgagggggaattcgttgtctccagcaagcaggacctgctccagtggccagagcttgcatccacgactgtggattatgtgcaggtggggaacaggcgtccaggctttgtcccagtgtctgacacgagggtgtccggccccatttttatcctcatagatgaatgcctcgatgaggcgcacctgcagcatcttcagggctccttgcatgcctttgtggattcgctccctcctaccgcaaagataggaataatcacctatgggagaactgtctcagtgtatgatttctcagagggggcagcagtgtcagcggatgtgctacctggaaacaagtcgcctacccatgagtctttgaaggccctaatctatgggacaggtgtttacctgtctcctatacatgcttcgctacctgttgcacacacaatattctcatctctgagaccctatcagctgagcgtgccagaagtgttaagggatcggtgtgttggagcagcagtagaggttgcccttggtattattcaagggccatcagtggagttgtctcgtggaatcatcaagagatctggtggaaactgtaggatcttggtgtgtgctggtggccctagcacctttggaccaggatcggtgcctcattcagctaaacatcccaactatgcttatctggagaagacagctatgaagtggatggagagtcttggtcatgaagcacagagacacagtactgttgttgatatcttttgtgctggacagtgtcctgtgagggtccctgttctgcaaccattggcaaagtgttctggaggtgtgctcttagctcatgatgactttggagaggcctttggggtcaatttgcaaagggcatcaactagagcagctggttcccatggcttatttgagatcaggtgttcagataacatgtatgttactcaagttattggccctggtgaagaggcttctcctgattctcatgaaacgttcaaacatggtagttccttctgtatccagatgcatagtgttgaggaaacacagagtttttctgtgtctatggagacaaaggctgatatcaaaagtgattttgttttctttcagtttgctgtccattattccaatatatatcaaacagaaatcactcgggtgatcactatgaggctgcagactgatgatggtttgtctgcatatctggcaagtgtgcaggaggatgttgcggcagttatcattggtaaaagaactgtattgcgtgccaggactgcctctgatgctattgatatgaggctctcaattgatgaaagagtaaaggacatagctctaaaatttggtagtcaggctcccaaatcaaagctttaccgcttcccaaaagaactagcatcactcccagagtgcttgtttcatctgaaaaggggaccacttttaggtagcataatcggacatgaagatgaaagatccgtacttaggaatttgttcctgaatgcttcgtttgacctttcgctccgtatgttggcacctcggtgcataatgcatcgtgaaggtggtacatttgaggagctgccagcatatgatcttgtcatgcaatctaatgctgcagtggtactggaccatggaacagatattttcatttggttgggtgctgagctagcagcccaagaaggacaaagtgcagcagctttagcagcatgccgtactctggcagaagagctcagcgagaaacgttttccagctcccaggatactttcattcaaacaaggaagctctcaggctagatattttgtctcacgcctgatcccagctcacaaggaccctacatatgagcaggagtcaaggtttcctcaattgcggacactcactcctgagcaaagggctaggctaaagagcagcttcatccagttcgatgactatagtttttgcgagtggatgcgcagcctcaaattggtcccaccagaaccaagctaacacaactagtctggggggtacacttccgaacggtggatagcaacaaaatctatggcgtggcatctgatagagctttccctctaagatagatgtgatcttcatgaaccaaattatggcatcgccagatattcgtgagccgatcatacgtttggtttggtgggcagccatttaggtggagaaatctacacaataagtttgtcaattgtcccaaatgttacatgtatacaacctttgtttgaagaggtctcactatattatttgaaattccttcatttctcaggggtagccgcagctctcagcctctcaccttcctgggaggatcaaggcctttgcagtataactctgccatttgcatgctagatcaattccattctgtttatgagcagatgtgaaaatgag

SEQ ID NO: 72342 - DNA, 862 bp, Zea Mays
gcacaaatgttacactgatttcaattatcacggatgtcactaacacaatacgacgcgtctactactcatttataacaaagtcatactctatgcgcaaggaggcctttcaacaaactttaaatggtgcattcctatgaccactatatttggcatacatacgcccatcaaaaatatatatacccagcataccaacctacgagttttaaatctattcgccacatcaaacaacgcaactcgtcggttctccaattctcgtaggcatccacgcatacaactcatcgacttgccgatcacaaacacacaagtactcagttctcctccacaaactttgcgtgcaacacatttgcacacatatgacctcacattaatcacatgacaccgacaaatttgcaaataaaacaagccacacggaatcaacctggacgaatcgagactagtcgcatgggctgtccgcttgtctcggcattttgtcgaatgagcaaggcgcgaagcgcgacgtcgacggcttgctgtgacaacacaagaatttaatggcttggtcattttgtcgggcgtaagaacaacgagtgcaacgaggagtctcatcgagggtcgatgttatcacgggtagggctgcacacatcacaatgcttggggaactcgagcagagggtggcctattgctatccatggagcagggcgttgaatggggaactcctgctcctgtgccttgggaaggagaagcaatggggggacagatgcatgggggagcagggatgaggtcaccgccttataggggaaaggccacgccatgggtgttgctgctgtcggggggaaccagagaggaggggtaaggtggcatgggggagtagtggtgggtggcg

SEQ ID NO: 72343 - DNA, 1370 bp, Zea Mays
ctagatttggcttgtgcgcattgcatgattgttgtattgtctgataggttgtttggaatggatgataaaaaatgatcgagtgcattcttcaggtgatatccatggacaatttgttgatctcttgaggctctttgatttgggtggttatcctccaacttcaacttatattttccttggagactatgtggatagaggcaaacaaagcttagaaaccatatgtctgcttctggcatacaagttgaagtaccctgataatatataccttttaaggggaaaccatgaagatgcaaaaattaacagagtttatggtttctatgatgaatgtaaaaggagattcaatgttcgactatggaagatattctgtgattgcttcaactgcttgcctatggcagcacttattgatgacaaaatattatgcatgcatggtggcctctcacctgaattgactagcttggatcaaataaaagatattgagaggcctaccgaaattccagactatggtcttctgtgcgatctcctttggtctgatcccagtcatgatacagaaggttggggggagagtgatagaggtgtttcttgcacttttggcgcagataagcttgttgaatttttggagaagaatgatcttgaccttgtgtgcagagctcatcaggtggtagaagatggctacgagttctttgcagagagaagactagtgaccatcttttcagctccaaactactgtggcgaatttgataatgcaggtgctctattgagcatagatgaaagcttgatgtgttcttttcagatcttgaaaccaaatgaaacaggtgcaccacattcaaggaaacctcttccaagcaaggcaccaaaaggagagaacgtctaatttgtatccagtgacctaatcacaatcgatgtcagctcgaagggggcgatctcgttgtctcggatccaccagggcatggcattagcgttctacacttgctgaatttgtgtggactcaatcggcagcgcttacattcttctgtacagcagcagtgtttctaacttggcatatcgtccgttctgatagtgacattgccacagctgcaatattttagtcgggtggacaaggcattttgttgggtacagtagctgttgttttgttagcctttttttggtaatgtttgtttggttgattgaacgctgtgagttttgtttgccgcgtatcttcgtcaggctcgggtatttacatcctgcaactgtgtaaatgattttgtctaacgaatgtctgttgacataaagattgctgcttacagtaacaaccacactaggtggcacaactgggcctgtatgtgtccgtcctccatggtcacgtgaatcctactcctttaaatcggcagtagttt

SEQ ID NO: 72344 - DNA, 3561 bp, Zea Mays
ccagcccagcccgcgcctattggcgccattgacttgagctcaaggtctttcctagtcatgttctggctgcgccgttacgttagatgctctgctctcagtcgtaatgtcacagggacgcacagagagagaaacagtcgaaccaagcttctgacgataaaagctcacacacaagcttccctctgtcgcagagacacgcaccgatctagagagaggagccaatgctgttgtgcttcgagccttgtgttgcgcatcggttgtagcgtcgtcgacgacctaacaagctcgttctgtcgcatcgggattcattcctcacgcgtgatcccgccagacgaaggaacagcaggggaaacacgatgacccttccatctcatagaagagaatcagatctggagatcaatggggcttcgcaagatacagtcggcgcaaagaaaactgcatgcaagacgacgcagcggcaaatattgcgatctgaaatagttagcacttttcttctcaagggtagtcgatttgcgtattcaattcaactctttgctttcggtgcatctgggtaggatctatttaaatttgaatgtctacgttggactttaaattaaaaatatgcggtgcccattgttttatatggacctgaccacctgacaggtagactttaggccccgttgcttcatttcaataattttgagtctattttagttttttctattcaaacaggtctagctgcacaagctctatctttaaaaaactgaaactagaggtcaacttcataaaatttttgaaactccttaaaaggtacttcaaaagcattgtttttatgcattctcgtgaggttgcaccaaaattacacatcatagtattggttacgtgacctgtcgattcatgtctttttctccacccgctaatcatgaagattaattaaaaaaaactcacacaaattcattgtattacagaagctagagtctatgtgcaagctaaacatattctttaaccctgtcttactaatttgttgaagttgttttacagtgaaattggaaaatcgaaactataatttttaaagtgaagtctttcaaacagggtctggccgtaatatgaagtttttttagtttctatctctctacatgaagcccacttggtcacatttagtgaagaaagtagcggtgggccgggttaggctcaagcactctcaaccgctcctaaggccatagagttttattaaaacctcccttaggcttatataatgtagcaatttagctgagtctctcataattttttttatttctaacaaacgtcaccggtcacactaagatatacgaagtagctgggaacgtactaaaatcatctccatcaagttttagtcaatttcgctaacgcgcatctaaattttttaatcgatttaaattttatgatgtgaacgcaggctttttatttttaggtctaaagcaataacatttcacttttattaggttatactgcatagatttggatttaaaagcaactggattggataatatttattttgtaccaggataagtttggacttgacctttttttggttggatattaattggattaaattatatggatttggattctaatccgttgtgagtagggatgaaaatcgaaaccgaatattccgtaatcggagtctcgtaacatatcgtttctgtagatataataccgttttaaaaactaccatatttaaaattttaattttaaatttctgtcaaaagtatcaagtagattaattataaaaccgtgttaaaaaactatcatatttaaaattttaattttaaatttctgttaaaagtatcgtaatcgctaataagtagattaattatgaaaccgtgtaaatttctgaccaagcaacaatcgttctcatagacgaagtcgtttcctgccattttcattcctagttgtgacagatctatatgcctgattttactgacacatgagtattgtacatatgtcgtgtgtaaaactcaacgagcttccggtgattagtcactgaccatctatcatcgtatgtgtacaggaaaaattgaagaaccgcgtccgagcattcaccggagcattcgtagttatgatttcccccgtgctccttgccatcgtgctcaagaaagtcagcttgactggcaccggcgggaggtatcaggggaggatacgactacgagcgctggaagcattcgtcgacctcgtccaaagaaggttcgcccacctcgcagccgtgactctgcagatgggcataatgcccttcctgtgcgtgatggtcgcggaagcgtgcgccagcttgccgccgctcagctacgtcgccccaaggctggtggccgcgtgcagagtgctggtgttcctctccaacttgctgctcatggccctgggctgcgggatcctcctcctcttccacagcaacgccctgctagtgctcactatctgctccgccatggcgctcggtgtcgctgccgtgcaaattcggtacctctgccgcggcgtcgccgatgccggggccgccgacgacgcggaggcggaggagtaccacagcaagctggagcagttgcttgagctgtcggccgggatgaccgtcatgatgttcctggtgctggaattcgtggcactggagagcctgctgaggaacactcgtcaggggcaggctgtcaaaagagggcagacgttcctcggcgtcgccttgctcgtcagcttcatggccagcacgctgggcgtctcgctcatgaacgtatggaccacgccccacgtcatcagcggctgcgtcgtcttgaccgccgagttcatgagggtcctgaatttctccttccatgctctgccgatcgccgcggtggtggtcttgatcacgctggatgtgcttccgcacgcgtggaagctggcagtgtggctgccgttcttccctctggtcatagtgctcctggtgctgctggcgcggtacagccgtgaggcgatgaaacagcaggagccagcagcaagaggaagagggaagcaaggaccagaagcaacgggcagcagcacagcatcggatccatcgtcatcaggtgaaaagaagcctgatgatccaaagccggcctcgttggagttgaccaaggtggcattcacgggcttcttggccgtggcagtacccagcgtcaccagtgcttctttctgcgtcccgtctgcattctttgtgttattcagtgcagcgaccgttctcctgggcctcttgtggaggctcctcacgcacgaggcggaaccaccttcgtgtgtcctccaagctgccaatcatgcttccttctccgcgcacatgtccattttcttggccgggattgcattctgggtcatggctgcctttgctcttcattaatgctcgacgtcatcctttcacagtttaacatcgtattcacggtctgctgtaccgtacgctttttttaatggtgtaacggagaatgtggaacagcctaccaatcgagcgcaaaattctttaattatttgtattttccatacaactttgttcttactatcatcaattgattagaagtcggcaatctcgtggaccatatgatggatattctatttttttaagcactg

SEQ ID NO: 72345 - DNA, 2011 bp, Zea Mays
ccagcccagcccgcgcctattggcgccattgacttgagctcaaggtctttcctagtcatgttctggctgcgccgttacgttagatgctctgctctcagtcgtaatgtcacagggacgcacagagagagaaacagtcgaaccaagcttctgacgataaaagctcacacacaagcttccctctgtcgcagagacacgcaccgatctagagagaggagccaatgctgttgtgcttcgagccttgtgttgcgcatcggttgtagcgtcgtcgacgacctaacaagctcgttctgtcgcatcgggattcattcctcacgcgtgatcccgccagacgaaggaacagcaggggaaacacgatgacccttccatctcatagaagagaatcagatctggagatcaatggggcttcgcaagatacagtcggcgcaaagaaaactgcatgcaagacgacgcagcggcaaatattgcgatctgaaatagaaaaattgaagaaccgcgtccgagcattcaccggagcattcgtagttatgatttcccccgtgctccttgccatcgtgctcaagaaagtcagcttgactggcaccggcgggaggtatcaggggaggatacgactacgagcgctggaagcattcgtcgacctcgtccaaagaaggttcgcccacctcgcagccgtgactctgcagatgggcataatgcccttcctgtgcgtgatggtcgcggaagcgtgcgccagcttgccgccgctcagctacgtcgccccaaggctggtggccgcgtgcagagtgctggtgttcctctccaacttgctgctcatggccctgggctgcgggatcctcctcctcttccacagcaacgccctgctagtgctcactatctgctccgccatggcgctcggtgtcgctgccgtgcaaattcggtacctctgccgcggcgtcgccgatgccggggccgccgacgacgcggaggcggaggagtaccacagcaagctggagcagttgcttgagctgtcggccgggatgaccgtcatgatgttcctggtgctggaattcgtggcactggagagcctgctgaggaacactcgtcaggggcaggctgtcaaaagagggcagacgttcctcggcgtcgccttgctcgtcagcttcatggccagcacgctgggcgtctcgctcatgaacgtatggaccacgccccacgtcatcagcggctgcgtcgtcttgaccgccgagttcatgagggtcctgaatttctccttccatgctctgccgatcgccgcggtggtggtcttgatcacgctggatgtgcttccgcacgcgtggaagctggcagtgtggctgccgttcttccctctggtcatagtgctcctggtgctgctggcgcggtacagccgtgaggcgatgaaacagcaggagccagcagcaagaggaagagggaagcaaggaccagaagcaacgggcagcagcacagcatcggatccatcgtcatcaggtgaaaagaagcctgatgatccaaagccggcctcgttggagttgaccaaggtggcattcacgggcttcttggccgtggcagtacccagcgtcaccagtgcttctttctgcgtcccgtctgcattctttgtgttattcagtgcagcgaccgttctcctgggcctcttgtggaggctcctcacgcacgaggcggaaccaccttcgtgtgtcctccaagctgccaatcatgcttccttctccgcgcacatgtccattttcttggccgggattgcattctgggtcatggctgcctttgctcttcattaatgctcgacgtcatcctttcacagtttaacatcgtattcacggtctgctgtaccgtacgctttttttaatggtgtaacggagaatgtggaacagcctaccaatcgagcgcaaaattctttaattatttgtattttccatacaactttgttcttactatcatcaattgattagaagtcggcaatctcgtggaccatatgatggatattctatttttttaagcactg

SEQ ID NO: 72346 - DNA, 1373 bp, Zea Mays
cgaatccgtccacggattaaatcgccgtccctacgcctgcctcaccaagccggagcgaggcccttgcgcctcggcatgcagcaaccggtgacggcggccgcttcgtgcggcttgcgcccgtcagtcatctgcctctgccccggaaacaacgcagtcgtggccgcggcagcttcacgaggcttcagctcgccactgctccgggcctcgccctccctcagctcggcaattttccctaaatctcaggagtaatttgatggagccatactgacctcacgtttccaatcccttgagaaggagaagggatagcatttgacatatctgtacatcttctttccaccaacaagtctccttcgttccccttcaaaatggcgcccgcttttccgacgaccctcctccaccaggcgtcgacctccttccgttttccagccggcgccgcagggtgcatccgccctcactgcttggccccactggcggcccccacaacgctctctttggcggccacgccagcggtacctcgccggctcctcctcccagtggcggccggcatttgggacctgatctccggcggagctggcgccgccgccgctgcgtccctcgccgtccggcgaggtatgcagcttttccggcagggagatgtagctggctcgttggcagaatttgacaaggcgatcgagatggacccgcgacagaagcaatatctttggcaacggggcctctcgctgtactacctagacaggtgtgtttgaagaaggtgcagagcagttcaggatagacgttgcagctaacccgaacgacaccgaggagtccatatggtgctttctgtgtgaagcgcagctgtacgggactgaagaagcaaggaagcggttcttggaggcaggttggtttggactcgagacctgtaatgcgtgaagcatatgcactgctcagaagtggtgcagatcctgaaaagttagttgcaaagttttcgagtggaactgatggtgaggtcttctattcttcactgtatgctggactatactatgaatctcagaaagatgcagatatggcaaaatctcacattgttgcagcatgcaagtcgccgtatggatcgaggtccggcgattacatggcttcccttgcacttgtccactgccagtgtcgcaactggaaagtagtttgaaagagatcaccaccatattcaagaggacccgacaattctgtttggaaattacttgcaatccttgatatatagactgcaaattacttgcaacaaggacatgggttttcagacaatgacggaccgagttaaggaaaatatgagaggctatcgagtttgggaaaaaaaaacttatcgaagatacctgttctgaagtctttttagtactggattcaca

SEQ ID NO: 72347 - DNA, 1661 bp, Zea Mays
attaaatcgccgtccctacgcctgcctcaccaagccggagcgaggcccttgcgcctcggcatgcagcaaccggtgacggcggccgcttcgtgcggcttgcgcccgtcagtcatctgcctctgccccggaaacaacgcagtcgtggccgcggcagcttcacgaggcttcagctcgccactgctccgggcctcgccctccctcagctcggcaattttccctaaatctcaggagtaatttgatggagccatactgacctcacgtttccaatcccttgagaaggagaagggatagcatttgacatatctgtacatcttctttccaccaacaagtctccttcgttccccttcaaaatggcgcccgcttttccgacgaccctcctccaccaggcgtcgacctccttccgttttccagccggcgccgcagggtgcatccgccctcactgcttggccccactggcggcccccacaacgctctctttggcggccacgccagcggtacctcgccggctcctcctcccagtggcggccggcatttgggacctgatctccggcggagctggcgccgccgccgctgcgtccctcgccgtccggcgaggtatgcagcttttccggcagggagatgtagctggctcgttggcagaatttgacaaggcgatcgagatggacccgcgacagaagcaatatctttggcaacggggcctctcgctgtactacctagacaggtttgaagaaggtgcagagcagttcaggatagacgttgcagctaacccgaacgacaccgaggagtccatatggtgctttctgtgtgaagcgcagctgtacgggactgaagaagcaaggaagcggttcttggaggttggtttggactcgagacctgtaatgcgtgaagcatatgcactgctcagaagtggtgcagatcctgaaaagttagttgcaaagttttcgagtggaactgatggtgaggtcttctattcttcactgtatgctggactatactatgaatctcaggtatggagtccattggcagtggtcgacaacgaaggaaaatattatattggctcgtgccgagggcgatgaaggatgagcgctaaaacttgattgagggatcagagaagtcggttgactagctatggtggctgatacctaaggaagactgataggtgtcatgacatgatagattagacgtgttgccgatgtggtcgaagaccaacatgacacatatctaggaagtgggggatgtgtatggatatgctagatgtggtcgaggaccgacatgacacatatctaggaagtgggggatgtgtatggatatgctatctgcggcggttcgggggttgaacccgaaaaaccagccagcgatgtttcatgggtttgaccttagaactcggagagcattttaaacgggaatcaaaggtgacacgtggagcgatcacggaggttacatcaaggcaaagcaaatatgtaaaaaggagtgtggccattagatcaacaaattcagagttagaccattatggcagtggctgatgagtttaaagcatattgtaagtctcaacacattgctaggcactgcactatacattatatgcctcaatagagtggtgtagctaagcgttggaacataactatcctctctaagacatgttgcatgttgtcttgttcata

SEQ ID NO: 72348 - DNA, 2060 bp, Zea Mays
attaaatcgccgtccctacgcctgcctcaccaagccggagcgaggcccttgcgcctcggcatgcagcaaccggtgacggcggccgcttcgtgcggcttgcgcccgtcagtcatctgcctctgccccggaaacaacgcagtcgtggccgcggcagcttcacgaggcttcagctcgccactgctccgggcctcgccctccctcagctcggcaattttccctaaatctcaggagtaatttgatggagccatactgacctcacgtttccaatcccttgagaaggagaagggatagcatttgacatatctgtacatcttctttccaccaacaagtctccttcgttccccttcaaaatggcgcccgcttttccgacgaccctcctccaccaggcgtcgacctccttccgttttccagccggcgccgcagggtgcatccgccctcactgcttggccccactggcggcccccacaacgctctctttggcggccacgccagcggtacctcgccggctcctcctcccagtggcggccggcatttgggacctgatctccggcggagctggcgccgccgccgctgcgtccctcgccgtccggcgaggtatgcagcttttccggcagggagatgtagctggctcgttggcagaatttgacaaggcgatcgagatggacccgcgacagaagcaatatctttggcaacggggcctctcgctgtactacctagacaggtttgaagaaggtgcagagcagttcaggatagacgttgcagctaacccgaacgacaccgaggagtccatatggtgctttctgtgtgaagcgcagctgtacgggactgaagaagcaaggaagcggttcttggaggttggtttggactcgagacctgtaatgcgtgaagcatatgcactgctcagaagtggtgcagatcctgaaaagttagttgcaaagttttcgagtggaactgatggtgaggtcttctattcttcactgtatgctggactatactatgaatctcagaaagatgcagatatggcaaaatctcacattgttgcagcatgcaagtcgccgtatggatcgaggtccggcgattacatggcttcccttgcacttgtccactgccagtgtcgcaactggaaagtagtttgaaagagatcaccaccatattcaagaggacccgacaattctgtttggaaattacttgcaatccttgatatatagactgcaaattacttgcaacaaggacatgggttttcagacaatgacggaccgagttaaggaaaatatgagaggctatcgagtttgggaaaaaaaaacttatcgaagatacctgttctgaagtctttttagtactggattcacatgatattcacgtcaaggagtcaatccacaatcttatctaatgtcaggacaccaaaagtatggagtccattggcagtggtcgacaacgaaggaaaatattatattggctcgtgccgagggcgatgaaggatgagcgctaaaacttgattgagggatcagagaagtcggttgactagctatggtggctgatacctaaggaagactgataggtgtcatgacatgatagattagacgtgttgccgatgtggtcgaagaccaacatgacacatatctaggaagtgggggatgtgtatggatatgctagatgtggtcgaggaccgacatgacacatatctaggaagtgggggatgtgtatggatatgctatctgcggcggttcgggggttgaacccgaaaaaccagccagcgatgtttcatgggtttgaccttagaactcggagagcattttaaacgggaatcaaaggtgacacgtggagcgatcacggaggttacatcaaggcaaagcaaatatgtaaaaaggagtgtggccattagatcaacaaattcagagttagaccattatggcagtggctgatgagtttaaagcatattgtaagtctcaacacattgctaggcactgcactatacattatatgcctcaatagagtggtgtagctaagcgttggaacataactatcctctctaagacatgttgcatgttgtcttgttcata

SEQ ID NO: 72349 - DNA, 1306 bp, Zea Mays
agcggctttgttgcattgcatcacaagttcacagctcgcccggacccagagggagcttgtacttccaaagttccacagttccactgcacagatcgtcggcggcggcgcaggcaaggccacaatgtctccggcgcccagcagcggcaagcgcgggagggttcccgacccggaggaggacgtctacgtcgacaacctccactcccacaagcgctacctcaccgagggatgagatgagtatgcagtactcacctatgtcagaagagtcagatgattataggtactatgacactcaagtaaacaccaatgggaatcaaacagatgtactgggtaatccctcaactagtctaatctcatctgcacaccgttttcagaggccacacacttggttctcttctgcaagtccataccctctcccaagctgctccctcccagcagtgatctgctcccctgctcgccgtggttgtggcactgaacaggaaggctggatcccatcctcacctaatgacatgtgctatggtggagatctgagacgaaccgcacttctgaggtcagttcaaatgaaggtgcagagcccccatccatgtgatgtgcatgaacgagaacaagggcgttctaatgtacatgctgacgagcttcaacaggatcagaaagaagctgtgggtgtacagctggaccaaaggcctctctcttgtccaaagtcaacccaggatgctaagtgccagagctctatacactgatgacgcggattttgttgaggatcagattacggtgtgaccagtcaaagtttgtcgaggatcatcacatatctggtaattttttgcgtagatttggatgaccataaataatactccctgtttcccaatatattgttcgtcctggcggatctattgacaccctaaaacgaatactattttgggttggagggagggagcatgttgcatggcccgttcgtaatttagtaaccattaacagtattctagtggtggcctgccccgttcgatgaacttatgtgacactaggttgtaagaagatgggacactaattaatcttgatcttagaaatgcaatgtgatgtagatgatatcagtgcttttattatgattagattaagaagttaagcagtctctgtcacttgcactttcaaggttcagatattgtttggatttgtttatcgttcggtgtctattttcattgttgaagctatgcatttgatgagggaaagagacaaaggggtgtgtatgattgtataattgtatatttgtatatcacatttgaatgattgccaggataatcttcggagattaggg

SEQ ID NO: 72350 - DNA, 870 bp, Zea Mays
  misc_feature (1)..(1): n is a, c, g, or t
natgagagtggagaatgcttcttgcattagggatgagatgagtatgcagtactcacctatgtcagaagagtcagatgattataggtactatgacactcaagtaaacaccaatgggaatcaaacagatgtactgggaaggctggatcccatcctcacctaatgacatgtgctatggtggagatctgagacgaaccgcacttctgaggatcagaaagaagctgtgggtgtacagctggaccaaaggcctctctcttgtccaaagtcaacccaggatgctaagtgccagagctctatacactgatgacgcggattttgttgaggatcagattacggtgtgaccagtcaaagtttgtcgaggatcatcacatatctggtaattttttgcgtagatttggatgaccataaataatactccctgtttcccaatatattgttcgtcctggcggatctattgacaccctaaaacgaatactattttgggttggagggagggagcatgttgcatggcccgttcgtaatttagtaaccattaacagtattctagtggtggcctgccccgttcgatgaacttatgtgacactaggttgtaagaagatgggacactaattaatcttgatcttagaaatgcaatgtgatgtagatgatatcagtgcttttattatgattagattaagaagttaagcagtctctgtcacttgcactttcaaggttcagatattgtttggatttgtttatcgttcggtgtctattttcattgttgaagctatgcatttgatgagggaaagagacaaaggggtgtgtatgattgtataattgtatatttgtatatcacatttgaatgattgccaggataatcttcggagattaggg

SEQ ID NO: 72351 - DNA, 1018 bp, Zea Mays
atgagagtggagaatgcttcttgcattagggatgagatgagtatgcagtactcacctatgtcagaagagtcagatgattatagaggccacacacttggttctcttctgcaagtccataccctctcccaagctgctccctcccagcagtgatctgctcccctgctcgccgtggttgtggcactgaacaggaaggctggatcccatcctcacctaatgacatgtgctatggtggagatctgagacgaaccgcacttctgaggtcagttcaaatgaaggtgcagagcccccatccatgtgatgtgcatgaacgagaacaagggcgttctaatgtacatgctgacgagcttcaacaggatcagaaagaagctgtgggtgtacagctggaccaaaggcctctctcttgtccaaagtcaacccaggatgctaagtgccagagctctatacactgatgacgcggattttgttgaggatcagattacggtgtgaccagtcaaagtttgtcgaggatcatcacatatctggtaattttttgcgtagatttggatgaccataaataatactccctgtttcccaatatattgttcgtcctggcggatctattgacaccctaaaacgaatactattttgggttggagggagggagcatgttgcatggcccgttcgtaatttagtaaccattaacagtattctagtggtggcctgccccgttcgatgaacttatgtgacactaggttgtaagaagatgggacactaattaatcttgatcttagaaatgcaatgtgatgtagatgatatcagtgcttttattatgattagattaagaagttaagcagtctctgtcacttgcactttcaaggttcagatattgtttggatttgtttatcgttcggtgtctattttcattgttgaagctatgcatttgatgagggaaagagacaaaggggtgtgtatgattgtataattgtatatttgtatatcacatttgaatgattgccaggataatcttcggagattaggg

SEQ ID NO: 72352 - DNA, 1020 bp, Zea Mays
cagccgtggagcatcagcaatccacatcatctcccttggctgagtggttcccttgcggcgcccaggatccttcccagacgcgctcggctccatggtctgtaaccttgccggcgttcccctccacctagcatgcccatcaggccctctcttcgcctccctgccatggagctcgccccatgcccaatgccggccaacctcacttcccatggccgtcccttcctcctccctccctatggtcaacggcctcaccttccatggcttccaagatctgctaaacatccatcccagcgcgcacccctacttccgtgtactggtggccgacgcccctccctagagctcgcccttactcatccactcgtcctcgtcttcgttgcgggcatcaacgcccttcgcctcctaccggtgagcagctcgccgccggtcgttacgactccatcccgcttgatcacgtttgtctcgctgctccttccagtcagcacctagcgctgctcgtctcgtcgttgatctacgctccaagctctccttgatgttgcattcggtggacaggagagaaattggaggaatctggcgaagaagaaaagaaccctgtctgtcgcgtccaagccgcgtcgagccccttcgtctcgccctttccctgcatcttcactatccatggtcgcttctctcctttccctgattaatactaggcgcagcagcagcaacatgccagatctctgtagcttaggtgagaccaactgcttgtgttctatttattccccaccaattcctatatttgattatttactgtataagtttgtgtgtttgtggtggaggtaaatcctaggaaatttagatgagaagaaagctttagcgaggcgcttgccaagtgcttggtgaatcgtctcaaccggatgtggttgtcgatctcgcagagtcgagtcgagtttagtcgtggtacgctaattgatcacgtgatgtggaggacaagagctggatttgtctcatggtgatgctgatgaataaacctgaagattgatgatc

SEQ ID NO: 72353 - DNA, 4247 bp, Zea Mays
ctcgatgtttccaaagccaagtgctccttctccacgccgctcagcctcctctctgtttcagccgtggagcatcagcaatccacatcatctcccttggccgagcggttcccttgcggcgcccaggatccttcccagacgcgctcggctccctggtctgtcaccttgccggcgttcccctccacctagcatgcccgtcaggccctctcttcgccaccctgccatggagctcgtcccatgcccaacgccggccaacctcacttcccatggtcgtcccttcctccttcctccctatggtcgacggcctcaccttccatggcttccaagatctgctcaacatccattctagcgcgcacccctgcttccgtttcctggtggccgacgccccctccctggagctcgcccttgctcatccactcgtcctcgtcttcattgcgggcatcagcgcccttcgcctcctgccggagagaaattggaggaatctggcgaagaagaaaagaaccctgtctgtcgcgcccaagccgcgtcgagccccttcgtctcgccctttccctacaccttcactatccatggtcgctactctcctttccctgattaatactaggcgcagcagcagcaacatgccagatctctgtagcccaggtaaatcctaggaaatttagatgagaagaaagctttagcgaggcgcttgccaagtgcttggtgaatcgcctcaatcggatgtggttgtcgatctcgcggagtcgagtcgagtttagtcgtggtacgctaattgatcacgtgatgtggaggacaagagctggatttgtctcatggtgatgctgatgaataaacctgaagattgatgatctgatcgagtgccagaataggagatgctcgccaaacaagcatcatctaacaacactaacctagtgtcatcccaggcaagccccagtgcatttgccccttccttgtgttttaaatgctttatcacgttaaatgatgcattaggtgataggagttgtgtgatgaacaattgatgcattaccattccttggaagttgaatactataccttgatccctgatttataaaaagaattgataatgcttaaccctgcttagaaactgaaaaatcctttgttttcaaaaagaatgatgtggaacattggttatgggctttttgattcgaaaatcaaaacaaactaaagtgatggatcctctacggccggagtggactcgtcactcgaaaagagtatccctgtcgggtaccaaaaatggggaaatggttaataaatctagaccagcgctgagcagacaaagtcacccgtctgtgtcgattaaggatcgtaccgttgactggcctgttgtggttgagactttgcaactagccacataccctggtatgggacagggaaagcttgaacccggctattccatatgtgaagagacaatcgcgcactgggagtggagagatggcgggactagcatgtaccctcctggcatagtaggacgcctagtagggtaatgttctctcgggtggcgtggacctattcatgtagtggaggactccgtgggaacggttgacatatgcaagggttaagtgctacatatgtcgtgtggttagagatccccagctgggtataatcggttcgaatcgtcgttgctcctcggttatggagactcatcccggtgaccatcatcatagttagcaagtgaaatatgagaatgaataaaatgcagctagtataggccaagtgcttgaactagactaggtaaatataaattcaggtaataacctaactagtgaaataaaacttggcttaaggatcaactggtagcaagcttttctgcaaaaggagtcttcgatcattgataaaccttaccttgattcccaatcaactagcatacccttgagagtcttttctttagtcgggtaagtcttgctgagtaattgcgtactcagggctttattccctgttgtttttcaggttataagtttgttctgttgtagatggtgctaagtgtcgatgggcttggccttcttatataagtatatcccatctttagctttttattgaggattgtcacttaagctaacatgtaatttaaaacttataaatgctttatacattttaaagtgtaattcttttgaatcactttcttttgtaatcactccgataattgtataatgtaaacttattgtaacatgtaatcattttgcaataaagaatttatttccgctgcaaatgttggtgtgtgatttgtgttaacttaatcctgcgatcttggtggtaagtcgtttatccggggtcatcggggcactcggacggatcatgttaagttgtttggtgcacatgcatagtcgtctgaggtctttgagacaatgacaggtgcatgtgggcccgataacttgggaggttctgcgacaactaagctgattgataatgacttatttatatgccaaatttatgttggtgacataatatttggttctactaaccaattgtcttgtgagaaatttagaaggattatgatcaagaagtttgagatgttgatgatgatcggagcagcgcaattactttggatgagacaagtcttcaagaactttgacaacaatctgagcaaagtccccctcctatgtgacaatgagagtgctctccaaataggtgataaccctattgatcacgaccgcactaagcacatagacatctggtatcaatttttgagagatcactcacaaaggtgagatatcgttatagaccatgtgaacacccataaatagttagtcaatgtcttcacctagatcttagatgagagaagattttgtgagcttaggagtgagataaatattttttattctcgaaacatggagtgaaatattgcacacattgcttatttgttatacctttgatcaacaagtgctcttttaattggtacaatttcaattgttcatatttgcttgtaccaaggttcaaatcatagaaaatcatctctggaccttacaagtccaagtgcataagttaaacaactattcaacacttgtatacacacattcagggggagggtggtctatagattgaacttttaggactaacaatgttttcaattttattatgtgtggtctcaaattgaaagggaaattgagattttgagcaaaggaaagcgcttccgctgcattttcggtatcaaagaccttttgcctcgttccatgcctcattgctattatttaacctctagttgtcttatcttatggggagtaatgtcaaaggtcactttaattatttctgtttttggcacttgacgccgaagggagagaaattatagcccaaagaaaatagaccaacccacgacttgagttttttaaaaaaaaatcagttttttgtgaatttatcaattggtatatgagattctcttatgaaatctttgccaaatagagagaagagaaattttggccaaagcaaatgtatttaaaaagaatgggggagatttagatttacaaaacaaaagactctttgttatagggggagaaattttcaaaaccttgaaaaagagtttgatttgcaaaaacacaagcaagtggtgtctcatatggtccaatatgctaaaactgttaaaaacctacatccaacttagttctaaaatttaattttcaccttgcgaacgtatgatgaatagcagacaagttagcaagttttattattcatatttgctttggtcatgttggtctcaaccaccaaaaagggcaaactgaaagtgaattgtgctatatgccatttctagtctgattttggtgattaatgaccaatagaaccctaagatctaactagtttgctaagtatgtgcttgcaggttcataagtgtcaaattcagagattcaactcaactatatagctcaatccaaggctaagaagggcatattagggataagcatgctattaggtattacagccttacaggagcttcgttaccagaaaagcttcaacataactcaagggaagtatgacgaagcaagcttcgtcatgatgaagcaggaaggcgacgtagggagaagatgttgttcaagttattgaatataaatgacaatttgtccatgtgacatttgtaaaccttgtatgtaattgttaagggtatgaatgtaataatgtacgaagttgtacgattgcctttaaatagatgaacagtaccccgtactgttcatgatggattgtaattgcactcgcgtcattatcttcacgcaaaccgaagcagttgagaacaagtgaccaacaag

SEQ ID NO: 72354 - DNA, 1130 bp, Zea Mays
gccaagtgctccttctccacgccgctcagcctcctctctgtttcagccgtggagcatcagcaatccacatcatctcccttggccgagcggttcccttgcggcgcccaggatccttcccagacgcgctcggctccctggtctgtcaccttgccggcgttcccctccacctagcatgcccgtcaggccctctcttcgccaccctgccatggagctcgtcccatgcccaacgccggccaacctcacttcccatggtcgtcccttcctccttcctccctatggtcgacggcctcaccttccatggcttccaagatctgctcaacatccattctagcgcgcacccctgcttccgtttcctggtggccgacgccccctccctggagctcgcccttgctcatccactcgtcctcgtcttcattgcgggcatcagcgcccttcgcctcctgccggagagaaattggaggaatctggcgaagaagaaaagaaccctgtctgtcgcgcccaagccgcgtcgagccccttcgtctcgccctttccctacaccttcactatccatggtcgctactctcctttccctgattaatactaggcgcagcagcagcaacatgccagatctctgtagcccaggtgagactaactgcttgtgttttgtttattccccaccaattcctatatttgattatttactgtatatgtttgtgtgtttgtggtggaggtaaatcctaggaaatttagatgagaagaaagctttagcgaggcgcttgccaagtgcttggtgaatcgcctcaatcggatgtggttgtcgatctcgcggagtcgagtcgagtttagtcgtggtaagtcgatccattgtttccgatagtcggatgaatgattagtttgtgtggatgtataaggcttgtgctattaaattgatttgtgttatgtgaatgaaattattttcatgagtatgtattagtatcaacatatgttggagatagttctatgttttagtggtcatgttatttgatatttattaaccgaattccggttgaatggatgtatatgcatagtctcattagagtagttcttcatttgcaatatgaactttagtttgaagatacaaactcatacgaagtgattgtgtgcatggt

SEQ ID NO: 72355 - DNA, 4354 bp, Zea Mays
cttctccacgccgctcagcctcctctctgtttcagccgtggagcatcagcaatccacatcatctcccttggccgagcggttcccttgcggcgcccaggatccttcccagacgcgctcggctccctggtctgtcaccttgccggcgttcccctccacctagcatgcccgtcaggccctctcttcgccaccctgccatggagctcgtcccatgcccaacgccggccaacctcacttcccatggtcgtcccttcctccttcctccctatggtcgacggcctcaccttccatggcttccaagatctgctcaacatccattctagcgcgcacccctgcttccgtttcctggtggccgacgccccctccctggagctcgcccttgctcatccactcgtcctcgtcttcattgcgggcatcagcgcccttcgcctcctgccggtgagcagctcgccgccggtcgttgcgactccatcccgcttggtcacgtttgtctcgctgctccttccaatcagcacctagcgctgctcatcccgtcgttgatctgcgctccaagctctccttgatgttgtattcggtgggcaggagagaaattggaggaatctggcgaagaagaaaagaaccctgtctgtcgcgcccaagccgcgtcgagccccttcgtctcgccctttccctacaccttcactatccatggtcgctactctcctttccctgattaatactaggcgcagcagcagcaacatgccagatctctgtagcccaggaaatttagatgagaagaaagctttagcgaggcgcttgccaagtgcttggtgaatcgcctcaatcggatgtggttgtcgatctcgcggagtcgagtcgagtttagtcgtggtacgctaattgatcacgtgatgtggaggacaagagctggatttgtctcatggtgatgctgatgaataaacctgaagattgatgatctgatcgagtgccagaataggagatgctcgccaaacaagcatcatctaacaacactaacctagtgtcatcccaggcaagccccagtgcatttgccccttccttgtgttttaaatgctttatcacgttaaatgatgcattaggtgataggagttgtgtgatgaacaattgatgcattaccattccttggaagttgaatactataccttgatccctgatttataaaaagaattgataatgcttaaccctgcttagaaactgaaaaatcctttgttttcaaaaagaatgatgtggaacattggttatgggctttttgattcgaaaatcaaaacaaactaaagtgatggatcctctacggccggagtggactcgtcactcgaaaagagtatccctgtcgggtaccaaaaatggggaaatggttaataaatctagaccagcgctgagcagacaaagtcacccgtctgtgtcgattaaggatcgtaccgttgactggcctgttgtggttgagactttgcaactagccacataccctggtatgggacagggaaagcttgaacccggctattccatatgtgaagagacaatcgcgcactgggagtggagagatggcgggactagcatgtaccctcctggcatagtaggacgcctagtagggtaatgttctctcgggtggcgtggacctattcatgtagtggaggactccgtgggaacggttgacatatgcaagggttaagtgctacatatgtcgtgtggttagagatccccagctgggtataatcggttcgaatcgtcgttgctcctcggttatggagactcatcccggtgaccatcatcatagttagcaagtgaaatatgagaatgaataaaatgcagctagtataggccaagtgcttgaactagactaggtaaatataaattcaggtaataacctaactagtgaaataaaacttggcttaaggatcaactggtagcaagcttttctgcaaaaggagtcttcgatcattgataaaccttaccttgattcccaatcaactagcatacccttgagagtcttttctttagtcgggtaagtcttgctgagtaattgcgtactcagggctttattccctgttgtttttcaggttataagtttgttctgttgtagatggtgctaagtgtcgatgggcttggccttcttatataagtatatcccatctttagctttttattgaggattgtcacttaagctaacatgtaatttaaaacttataaatgctttatacattttaaagtgtaattcttttgaatcactttcttttgtaatcactccgataattgtataatgtaaacttattgtaacatgtaatcattttgcaataaagaatttatttccgctgcaaatgttggtgtgtgatttgtgttaacttaatcctgcgatcttggtggtaagtcgtttatccggggtcatcggggcactcggacggatcatgttaagttgtttggtgcacatgcatagtcgtctgaggtctttgagacaatgacaggtgcatgtgggcccgataacttgggaggttctgcgacaactaagctgattgataatgacttatttatatgccaaatttatgttggtgacataatatttggttctactaaccaattgtcttgtgagaaatttagaaggattatgatcaagaagtttgagatgttgatgatgatcggagcagcgcaattactttggatgagacaagtcttcaagaactttgacaacaatctgagcaaagtccccctcctatgtgacaatgagagtgctctccaaataggtgataaccctattgatcacgaccgcactaagcacatagacatctggtatcaatttttgagagatcactcacaaaggtgagatatcgttatagaccatgtgaacacccataaatagttagtcaatgtcttcacctagatcttagatgagagaagattttgtgagcttaggagtgagataaatattttttattctcgaaacatggagtgaaatattgcacacattgcttatttgttatacctttgatcaacaagtgctcttttaattggtacaatttcaattgttcatatttgcttgtaccaaggttcaaatcatagaaaatcatctctggaccttacaagtccaagtgcataagttaaacaactattcaacacttgtatacacacattcagggggagggtggtctatagattgaacttttaggactaacaatgttttcaattttattatgtgtggtctcaaattgaaagggaaattgagattttgagcaaaggaaagcgcttccgctgcattttcggtatcaaagaccttttgcctcgttccatgcctcattgctattatttaacctctagttgtcttatcttatggggagtaatgtcaaaggtcactttaattatttctgtttttggcacttgacgccgaagggagagaaattatagcccaaagaaaatagaccaacccacgacttgagttttttaaaaaaaaatcagttttttgtgaatttatcaattggtatatgagattctcttatgaaatctttgccaaatagagagaagagaaattttggccaaagcaaatgtatttaaaaagaatgggggagatttagatttacaaaacaaaagactctttgttatagggggagaaattttcaaaaccttgaaaaagagtttgatttgcaaaaacacaagcaagtggtgtctcatatggtccaatatgctaaaactgttaaaaacctacatccaacttagttctaaaatttaattttcaccttgcgaacgtatgatgaatagcagacaagttagcaagttttattattcatatttgctttggtcatgttggtctcaaccaccaaaaagggcaaactgaaagtgaattgtgctatatgccatttctagtctgattttggtgattaatgaccaatagaaccctaagatctaactagtttgctaagtatgtgcttgcaggttcataagtgtcaaattcagagattcaactcaactatatagctcaatccaaggctaagaagggcatattagggataagcatgctattaggtattacagccttacaggagcttcgttaccagaaaagcttcaacataactcaagggaagtatgacgaagcaagcttcgtcatgatgaagcaggaaggcgacgtagggagaagatgttgttcaagttattgaatataaatgacaatttgtccatgtgacatttgtaaaccttgtatgtaattgttaagggtatgaatgtaataatgtacgaagttgtacgattgcctttaaatagatgaacagtaccccgtactgttcatgatggattgtaattgcactcgcgtcattatcttcacgcaaaccgaagcagttgagaacaagtgaccaacaag

SEQ ID NO: 72356 - DNA, 6213 bp, Zea Mays
cagccgtggagcatcagcaatccacatcatctcccttggccgagcggttcccttgcggcgcccaggatccttcccagacgcgctcggctccctggtctgtcaccttgccggcgttcccctccacctagcatgcccgtcaggccctctcttcgccaccctgccatggagctcgtcccatgcccaacgccggccaacctcacttcccatggtcgtcccttcctccttcctccctatggtcgacggcctcaccttccatggcttccaagatctgctcaacatccattctagcgcgcacccctgcttccgtttcctggtggccgacgccccctccctggagctcgcccttgctcatccactcgtcctcgtcttcattgcgggcatcagcgcccttcgcctcctgccggagagaaattggaggaatctggcgaagaagaaaagaaccctgtctgtcgcgcccaagccgcgtcgagccccttcgtctcgccctttccctacaccttcactatccatggtcgctactctcctttccctgattaatactaggcgcagcagcagcaacatgccagatctctgtagcccaggtaaatcctaggaaatttagatgagaagaaagctttagcgaggcgcttgccaagtgcttggtgaatcgcctcaatcggatgtggttgtcgatctcgcggagtcgagtcgagtttagtcgtggtacgctaattgatcacgtgatgtggaggacaagagctggatttgtctcatggtgatgctgatgaataaacctgaagattgatgatctgatcgagtgccagaataggagatgctcgccaaacaagcatcatctaacaacactaacctagtgtcatcccaggcaagccccagtgcatttgccccttccttgtgttttaaatgctttatcacgttaaatgatgcattaggtgataggagttgtgtgatgaacaattgatgcattaccattccttggaagttgaatactataccttgatccctgatttataaaaagaattgataatgcttaaccctgcttagaaactgaaaaatcctttgttttcaaaaagaatgatgtggaacattggttatgggctttttgattcgaaaatcaaaacaaactaaagtgatggatcctctacggccggagtggactcgtcactcgaaaagagtatccctgtcgggtaccaaaaatggggaaatggttaataaatctagaccagcgctgagcagacaaagtcacccgtctgtgtcgattaaggatcgtaccgttgactggcctgttgtggttgagactttgcaactagccacataccctggtatgggacagggaaagcttgaacccggctattccatatgtgaagagacaatcgcgcactgggagtggagagatggcgggactagcatgtaccctcctggcatagtaggacgcctagtagggtaatgttctctcgggtggcgtggacctattcatgtagtggaggactccgtgggaacggttgacatatgcaagggttaagtgctacatatgtcgtgtggttagagatccccagctgggtataatcggttcgaatcgtcgttgctcctcggttatggagactcatcccggtgaccatcatcatagttagcaagtgaaatatgagaatgaataaaatgcagctagtataggccaagtgcttgaactagactaggtaaatataaattcaggtaataacctaactagtgaaataaaacttggcttaaggatcaactggtagcaagcttttctgcaaaaggagtcttcgatcattgataaaccttaccttgattcccaatcaactagcatacccttgagagtcttttctttagtcgggtaagtcttgctgagtaattgcgtactcagggctttattccctgttgtttttcaggttataagtttgttctgttgtagatggtgctaagtgtcgatgggcttggccttcttatataagtatatcccatctttagctttttattgaggattgtcacttaagctaacatgtaatttaaaacttataaatgctttatacattttaaagtgtaattcttttgaatcactttcttttgtaatcactccgataattgtataatgtaaacttattgtaacatgtaatcattttgcaataaagaatttatttccgctgcaaatgttggtgtgtgatttgtgttaacttaatcctgcgatcttggtggtaagtcgtttatccggggtcatcggggcactcggacggatcatgttaagttgtttggtgcacatgcatagtcgtctgaggtctttgagacaatgacaggtgcatgtgggcccgataacttgggaggttctgcgacaactaagctgattgataatgacttatttatatgccaaatttatgttggtgacataatatttggttctactaaccaattgtcttgtgagaaatttagaaggattatgatcaagaagtttgagatgttgatgatgatcggagcagcgcaattactttggatgagacaagtcttcaagaactttgacaacaatctgagcaaagtccccctcctatgtgacaatgagagtgctctccaaataggtgataaccctattgatcacgaccgcactaagcacatagacatctggtatcaatttttgagagatcactcacaaaggtgagatatcgttatagaccatgtgaacacccataaatagttagtcaatgtcttcacctagatcttagatgagagaagattttgtgagcttaggagtgagataaatattttttattctcgaaacatggagtgaaatattgcacacattgcttatttgttatacctttgatcaacaagtgctcttttaattggtacaatttcaattgttcatatttgcttgtaccaaggttcaaatcatagaaaatcatctctggaccttacaagtccaagtgcataagttaaacaactattcaacacttgtatacacacattcagggggagggtggtctatagattgaacttttaggactaacaatgttttcaattttattatgtgtggtctcaaattgaaagggaaattgagattttgagcaaaggaaagcgcttccgctgcattttcggtatcaaagaccttttgcctcgttccatgcctcattgctattatttaacctctagttgtcttatcttatggggagtaatgtcaaaggtcactttaattatttctgtttttggcacttgacgccgaagggagagaaattatagcccaaagaaaatagaccaacccacgacttgagttttttaaaaaaaaatcagttttttgtgaatttatcaattggtatatgagattctcttatgaaatctttgccaaatagagagaagagaaattttggccaaagcaaatgtatttaaaaagaatgggggagatttagatttacaaaacaaaagactctttgttatagggggagaaattttcaaaaccttgaaaaagagtttgatttgcaaaaacacaagcaagtggtgtctcatatggtccaatatgctaaaactgttaaaaacctacatccaacttagttctaaaatttaattttcaccttgcgaacgtatgatgaatagcagacaagttagcaagttttattattcatatttgctttggtcatgttggtctcaaccaccaaaaagggcaaactgaaagtgaattgtgctatatgccatttctagtctgattttggtgattaatgaccaatagaaccctaagatctaactagtttgctaagtatgtgcttgcaggttcataagtgtcaaattcagagattcaactcaactatatagctcaatccaaggctaagaagggcatattagggataaggtatgttataagtggtttatatacttggataagttctaaatgcccttagaaatgtttttgagcacattagaggattgagaagtcacaatattggaaaaggtgtttttggagcaaaggttgagctagaatagaaaactaagttggagaagttaaagaattgaagtttcatgacttagactagtttgatagtcacaagaaatgattgtctaagtcataggaacaccctcaaggaaagccaaatcaatttgaagaagaatgttcattttgagctttaactcagctggtctggggtgcattaagccttgtttctagtgaaacctgtagaaggtctttggtagcctagcgcaccggacctatcccgttgtgcaccagaccacttacacacagagctctacaaaagcactcctgtggccaggtgcactagatcagtctgatggcgcaccaaaccactttactagagaggtaagcagagaaacccagaaggaattcggcataccaaaccagtccggtgtgaaccagacatgttaggtccaacagaaactttagctttcaacggccaactctaatgactgctgacatggcgagacacgtagaggggtctggcacggactggtccggtgccaccgagcagggcaatgttagagcatatcctattgactaaggtgatcattggaggtccagtggtgcactaggctggtctagtgcacccgaggaaagcaaaaatttagcaatctacttaacaactctttgaggggttggggctataaatacccctagatagtccattcgagacatcagtcaccattagagttatgcatcattcccaaacacttgtgcaacatcttaaagccatccgagagatccgagcactccatttgagtagagatagtcattctagagggagtgtgctcttatgatctgcattcttggtgttgtgttgttgtgtttcttgctcttgtgtgagtgatactatattgtaaaggctagtgaattatcccgatcctttgggaccaaatgtgatacaattactagtcctaggaggctagtaaacatatttatttcatcagatggaacagagtctaatacaagaatattacaacacaaagtgtgagtctctgaggagcgagaactggccctaagacacaagtatgttgggtgcagacatagccccttctagtcaaacattgtagaaatgaaatcttcagccactaaaagaatcataaagccataggtgaatactttcatataccacaagaccactctaagtcgttttagcatgagacctatgttatacatgcaagtatttggagtagatgttgagtcactctttctctttttttaagtaaagtggtttaaagcctaaaatcccatagacagaaataaacatttctttctttaaacaccattgggctcctctcccccatggcacacaatgtccttaaaagcaaacgcacacatacaaccctttcctttttcgaaccaaaattctctaattgtcatagccatacccaacccatccataacagcgggcatggctattttaatagattttgactctgcatagaggtacactttacccactagtctggctctgcagtctcacttccatgtgacccgataccaaaacccatcctcccttgcatggctttaccttggcgattataccgagaggaaaaggctaccatctcgcccaaaccaggacggtaatgctccccttccttctcctttcgatgctccccgccaccgataaccctagggtttagctcatgcaaatatggattgagtgactcccatatagcctctagtggttgtacttttgagagtttaggtagtgaaatatgacaaattgatccttatgcaaattgagacaagacttcatgctcttgccgaacctggttgatccaacttcttatagccgccccaagaccaggcagtcccaatcatcccgctcttggtggtgagggttgctgggggccttcgtcttccgaagttcctcaaaaacatggctcactatttgtttccagcatgctattaggtattacagccttacaggagcttcgttaccagaaaagcttcaacataactcaagggaagtatgacgaagcaagcttcgtcatgatgaagcaggaaggcgacgtagggagaagatgttgttcaagttattgaatataaatgacaatttgtccatgtgacatttgtaaaccttgtatgtaattgttaagggtatgaatgtaataatgtacgaagttgtacgattgcctttaaatagatgaacagtaccccgtactgttcatgatggattgtaattgcactcgcgtcattatcttcacgcaaaccgaagcagttgagaacaagtgaccaacaag

SEQ ID NO: 72357 - DNA, 979 bp, Zea Mays
ctagccgccactctctcttctccctttttccctctcacacacaactctcttctcctctgttcagcgggcacacggctgcaagcatggagccgagctccaagctccaatggcggccgagctcctttcctgctccatgggcgcgggagctctccatggtgtggatcggcgcccttgctgtctcctccaatggtgcatggcgcagggagcagccatccctagctcgcccctctctccccccacaacagcagcaggcctgcgctcaccttccatggaaaaccagcaggagctctctcccccccatggtcgcgagcttccctcggccaccatggcgctggacgcctctttcccagatcgacgggcgtccatctccgtgcgtcctgtctcccatggactgaacgtccctccccctcgcagcacctccccttggcgagtttctttccctgcaaccctgcattttccccctgccatggacgcccaagaacagcagctcctccaactccccatggcgcgctgcagcagacgccgtggagcacctcccggcatctcccctgccatggctcgtgactcggcgtcctccctgcttgcgtgctgctgcgcagtgacccgcggtgcttgcaaggtgctcggcaaaatgcgcagcagccccgacgtctgcgcgcgctgtcggctcgctgttttgggaagccaagtggacagcacgccgtcgacactcgccggttgtttgctgtttttgcacagccccgtcgtcgtcgtcgttcacccccggtgagaccgcaacgctccttgttcgattccgcatcgacgttattttcctatgattaattatgtatgtgtgctgctttgttttgttttgtggaggagagaaaccctgcgttttgcgaggagaaggcaagccgctcaacgctcgtcgatgtgcggagctatgcaaaaaatcggaatcgccatcgtccttacaaacaccgattgggtttgtttatgg

SEQ ID NO: 72358 - DNA, 1483 bp, Zea Mays
ccaggactcagcattgcgacgcacgcggaccgtgcgcgccgcgcaccgaagacgtcatcgaagctttcgagccgcggggctgaatcgatcggcactcgggaggaagacgaaggccgaaggggccgcgcgtcgacgcgtttgcttgctcgatcgtccgttcgctcgctacaacaacagcaatggcggcgaggagggtggcgctgctcttcgctatcctcctcctgcaccaaacggtgtcttcgcttgctggaaagagctactatgagattctgcaagtgccaaagggtgcatcggaggagcaaatcaagagggcataccgcaagcttgcgctgaaataccacccagacaagaaccccaacaatgaggaagctggcaggcggtttgccgagatcaacgatgcctacgaggtcttgacggatcggaagaagaggaaagccgatgactggcacggtgaggaggatttagccaagtacatgggtcgtgctatgaaggtcgatgtcgaatacgtgtttagcaatggtggaagtccgaaacaggaggaagaacagattttgaagggtgatgatgtcactgttgaattggaggcttcgctagaggacttgtatatgggtggttccttgaagatttggagggagaaaaatgttataaaaccagctcctggcgtcaggcgatgcagatgcaggaatgtggttcgtaaacgagaagtcgctcctggagttattcttaacttgagtcaccaggaatgtgatacatgcccaaatgtgaagtacgtaagagaaggggctttcattaatgttgatattgaaaaggggatgcaagatggacaggaaattttattttacgaggacggagaacccaagattgatggagtgcctggtgatttgaagattaaaattcggacagcacggcatgaacgctacagaagagacggcaatgacctacacacgacagtggaaatctcgcagaagctcttggcggattcgagaagaaggtaacgcaccttgacaaccatgaggtggaaatcgggaccaaggagatcacgagaccagaagaagttcggaagttccaaggcgagggcatgccactgtaccgtagtaacgagaagggagacctgtacgtcgttttcgaggtagtcttccctgaagacctagctgatgatcagaagaccgagctgaatagcattttcactggaacaccgtcaatttcagctcttgggctagttgccaagagcaaaggtaggcaaaggtcaatggcaggagtaatgtttcttttagcgttgttgctcagattcataggtagtcaaaggtagaaaatggatgcatcagtatatctctcaagtgcctggctgttttactttcaactatctcctccgccagcaatgttcgtgaatcgtctggttcaacgcaaacaaaaagtaaaatatactggcggaggagatagcgttcatgagcaacatgtacaaagcctgcatttttttactttc

SEQ ID NO: 72359 - DNA, 2000 bp, Zea Mays
ccgcaatccaactctaaattgttccatatcctcgctcagcaaggcaaaaattaagcaaacaaatgaatacatgcattgataacgcaaccaccgatactcagtaccaatccaccaccatattataacacataatttaagcaatcaataatcttataatgcatcgcaggcaagtccttagtaaaggtcctacggaaaagcaaaagaattccaggagtttgactgacataacaaaatgttttcacgctaaagattcaacatgttccccaatgttaagcactgttttttcctcttcatacccctccatgatactgtcatgatatgatgatcatcgttcacgtgacgaaataccaaccagaacaaataacaaggcaaaaaaatcgctgggctgagcaagcgccccggcaagggccctacttgatgtattgggagacccacttgaaaccatcgccgtagcccatcttgcgaacaacactgcacatgaaaacctcaagtggccggacattggagtcgccaaggttgaccttgcccttcccggttgtgaagttgctaaggcctaggtgataccgcagctcctcttcagaggcagcatacgggatatcaatcttgttgccaaggatgagaaatggaacatttgccaaggaatcatctgacaggagagcgtccagctccttttttgattcagcaaatcgctccttatcatacgcatctaccaggtatactacagcatcaacctgttgcaatatgaaaaagaaaattcagtcagacatatatgaaaagcagtttctggtggaataaaagcagatgcataagcaaaataattagcttatagagagaagcaaaacaaagatagaacacagggaacgaaccacaactgtccgcaactaatcattgcttcacaaattttggtgcaaggaataaggatagcataatgtgcaaagacaataggaaataatggtaacatcagcatgtaacatgaaatatcacgtaacaaaatacatatttagaccaatgttcaatataaaatcatgcaaacaaactttgggtgcctcttgacagtgaaatgaagcaataaaaggatcaaaacaccatgcttgcaaagtaggcaaaagataataaaagatgcagtatgttacaatgtagagcaagatgacacaaaaaatacaagctattaaatgaagacatgctaatacgttgcaattcaacaggtaacatgttagtcaataccaaaatggctaaagtctgaagtgcaccttaaaagctttgactataccaaaggaacactttatgaagtgccccatgacttgtgccagaaagtgtgaagatgaaaaatgcaactttcatgttgttaatttaaaagtgttaacaattgagaattttgaaagttactgcaacaaaaagtgtcagacatagagtcgcatacaaacatgtgtatttctaaaaaaacacgtcataaatatcaacatagatatgtatagaacatgatttttaaaagcggtatggagagacaaggcgttggaccaccgcatagatgcctaggcaaggtaggcgcccaaggcattggaccaccgcctggacgcctaggcaatgcctttaaaacagtgatatagaaccagaaaaaagtgttaatagacatagaattgcaattatattttgtgtatcaaaatggaacgagtatatgaagcaacagatgcagctgactcccaaagctcacacatttcaaagaaccttaagactgaccacaaaagaaatatacaacaacatacacctgtgtatatatgttttttatactcaatttcacattgtctcctcagagtaccgaaagaaccagtaccgacccaggaatttggttgcaagggctgatgcatgtaaaacagttccatacaggagctactgatcaatttctctaagtggcacaatcagaattcccaaccaagattcgaactcgtcaaatcaacaatttctggcgtcccttgaacgtcattgaaaaggaaaattgtaac

SEQ ID NO: 72360 - DNA, 1825 bp, Zea Mays
gtacagaatagattttattggttaacgtgtccatccctctcaaacacagcattaaagaagctagagatcaaactgtttttaaaatcaaaaccctatcaaactagagctaaatacttttcgttgctactatattttttttccagcacgccatttccattctcctttcatccattgcgagtttgcgactgcgaacacgcgcgcaaaaaatattgacgaaaactggaggggtaaaggggaaaaggcgacggccgcctgggccctggaggagcgagaaggcggaagaaggggagcggcagtcgcaggccgcagctcgttgatggtggttagggtttcgccgcccgcacgctcgacctgctgaagaatcgcccccctgttgaagaggtctgcgcctcgccctataaggctccggggaagaggagatagacatcagtggaccccggcgcgcggctgatggcggagcaggagcggagggacgcggaggctgggggcgatgccgcgggcgcagcggtggcgtctcacaccagcagcatgcagcgtgtcaaagtataccgtttggctgatggtgggaagtgggacgatcaaggaacaggtcatgtttctattgattacattgagggttcgaaagaactcggtttgactgttttagatgaagatgacaatgagacgctacttatgcacaacatcacatctgatgatatttacagaaaacaagaagaaacaatcatttcatggagagatcgtgaagcagcgacagacttagcactaagctttcaggaagctgcaggatgctcctacatatgggaacatatatgtgaaattcagagaaaccttcagttcagtaaccttggtgctccggaagttggtcgtcgtcaatcatcagaatctctagaagcctctagaataatgcattcaaatgatgattcattccgctctgctaacggtgaattcagggaacttcctcctgttgagctgtctaatcttccttttattttgaagactgtattggagggtggcattacagatcagatccacatggcagagttgataacacaagatcgggactttttcccaaagctagtggacattttcagaatgtgcgaggatttagagaacatagatgatcttcacatgattttcaaattggtcaagggaataatattgttgaacagtccgtcaatctttgacaagattttctctgatgagtttatccttgacataataggtgcccttgaatatgatccagaggttccaagagtgcaaaagcaccgtgcttttctaaaagatcatgtagttttcaaagaggccatacatattgaaaatgtttctgttatttcgaagattcatcaaacatacagaataggctatcttaaggatgttattctgccacgaatattggatgatgccactctaggaagttttaacacaatgatacattcaaataatgcttctgttatttccatgctaaaggatgacacaccctttataagacaactatttgctaggatgaggtcatcagatatttctatggaatcaaaacgagaattggttctgttcttgcatgaattttgcacacttagcaagagtctaccagttgttcagcaactgcgactgtttcgggatctttcaggtgaaggcgttttcgaaataatttctgatgtgttgcagagtcaagatagaaaaatcgtttcagctgggacagatatgctgatactttttcttaatcaggaccctaacctattgaggtcatatattgttcagcaagaaggaaattctcttctaggacttctgcaatatggcggctgcggcgtagggacacagcagtgga

SEQ ID NO: 72361 - DNA, 3960 bp, Zea Mays
gtacagaatagattttattggttaacgtgtccatccctctcaaacacagcattaaagaagctagagatcaaactgtttttaaaatcaaaaccctatcaaactagagctaaatacttttcgttgctactatattttttttccagcacgccatttccattctcctttcatccattgcgagtttgcgactgcgaacacgcgcgcaaaaaatattgacgaaaactggaggggtaaaggggaaaaggcgacggccgcctgggccctggaggagcgagaaggcggaagaaggggagcggcagtcgcaggccgcagctcgttgatggtggttagggtttcgccgcccgcacgctcgacctgctgaagaatcgcccccctgttgaagaggtctgcgcctcgccctataaggctccggggaagaggagatagacatcagtggaccccggcgcgcggctgatggcggagcaggagcggagggacgcggaggctgggggcgatgccgcgggcgcagcggtggcgtctcacaccagcagcatgcagcgtgtcaaagtataccgtttggctgatggtgggaagtgggacgatcaaggaacaggtcatgtttctattgattacattgagggttcgaaagaactcggtttgactgttttagatgaagatgacaatgagacgctacttatgcacaacatcacatctgatgatatttacagaaaacaagaagaaacaatcatttcatggagagatcgtgaagcagcgacagacttagcactaagctttcaggaagctgcaggatgctcctacatatgggaacatatatgtgaaattcagagaaaccttcagttcagtaaccttggtgctccggaagttggtcgtcgtcaatcatcagaatctctagaagcctctagaataatgcattcaaatgatgattcattccgctctgctaacggtgaattcagggaacttcctcctgttgagctgtctaatcttccttttattttgaagactgtattggagggtggcattacagatcagatccacatggcagagttgataacacaagatcgggactttttcccaaagctagtggacattttcagaatgtgcgaggatttagagaacatagatgatcttcacatgattttcaaattggtcaagggaataatattgttgaacagtccgtcaatctttgacaagattttctctgatgagtttatccttgacataataggtgcccttgaatatgatccagaggttccaagagtgcaaaagcaccgtgcttttctaaaagatcatgtagttttcaaagaggccatacatattgaaaatgtttctgttatttcgaagattcatcaaacatacagaataggctatcttaaggatgttattctgccacgaatattggatgatgccactctaggaagttttaacacaatgatacattcaaataatgcttctgttatttccatgctaaaggatgacacaccctttataagacaactatttgctaggatgaggtcatcagatatttctatggaatcaaaacgagaattggttctgttcttgcatgaattttgcacacttagcaagagtctaccagttgttcagcaactgcgactgtttcgggatctttcaggtgaaggcgttttcgaaataatttctgatgtgttgcagagtcaagatagaaaaatcgtttcagctggatatgctgatactttttcttaatcaggaccctaacctattgaggtcatatattgttcagcaagaaggaaattctcttctaggacttctggttaaaggcatggtaactgacttcggtgaggaaatgcactgccagtttctagaaatcttgcgcatattgatggattctttcactatgtctggagcacatagagacgtaattattgagattttctacgaaaggcatcttgactatttggttgatgtaatagcatcctcttgtcccccgaggagcttgtctcgaccaagatctaactctgtacgtgttggtggaaacgctgaaggacatcatatcaagcctgagattttgttaaatgtttgtgaactactgtgcttttgtgtagttcatcatccctacagaattaagtgcaattttcttatgaataatgctatcgagaaaatccttacattgactcaacggagggagaagtttttggttgtagcagctgttaggtttatgcgtactattatatccagaaatgatgagcatctcattcgccatgttgtgaagttcaacttgttgaaaccaataattgatatctttgttgacaatggggagaggtacaacatgctacattcaggagtacttgaattgttggaatacatacgaaaggaaaatataaaagctctcactatctatgttattgagtctttctggtatgaacttgtcaagtttgaacacttcgggagtattcaggccttcaaactcaagtatcaacagtacgtggagagtgctgaaccaatgttaaatgcgagtgtgcctaacatgagaaagaaggcagaacaaagaggtctagagaaggaagaggaagactacttcaataaggatagtgatgaagaagattcaggctccggccggcgggataaacatgcacagaaccagcatagcaagcctaagcccaaggtccctaatggaagtgaagctgatgacactgatggcgcctctagacctaaatctgctggacttgtggactatgacgatgatgacgatgaagacttcaatccaccaccaatggagccttctacgcctgcagaggatgatgtgcccttaaacatatccccggtgaagcggaagccagtggatgtgaaacatgcagatggggagggtcgcaggaggcaaaaaatagaaaccagaattagttgtgctaaaattgctgctgttactagtaccattattaagcacacagatctacaaaacaagcatgcttgctacttgcctacatcagccgcgccaagtactgaacccaatggtgtttttagggagcgtggcactaactctgaggagcatcaacattctgtagagaacacagaaacttcacgacaagctggtggtgattgtataaaagacgggggcagtatgtctcccgagaaggctgtaaatacgacaacgacaagtgattcggagccttattcagtaagatgactgactactacacagctggtttgtccctgtacccaacctgttctcttgccaacaggaaggaatcggaatgtgtttggctccaaaaattcattgatatcaagctggaagcatgattggaggtgacatagattgcagctacctttacatctcaagtaaaattccagttacccctttttgagcctgtaaagttaattttccacaaggaaagatctgacgaacatcagaattgggatggctgtagattggaacattgaatgggccttgctcctgctgctatgctcgctattgtatctcttttatgagctaatggagtagcagtgaatgtgtgccttcaacttcactgttttctctccagtcattgactctgatgttactgctgtaaaacaagtaggactaaggcatagtttcagttgaatagcgtttttgccggattctgctgactcacttatacgactgtaatttgatggttcatagttttggctggacatgctgtcttggataattattcaagccttgtggtagaatagttctttaggccaaagatgtgctaggtagaatttcgaaagtgaataatgttggatgtattgggttaaggatggcaggtgtacatgatatcctactccagaacaggttcgctaaatactgtggtacaatcaaaaaacattcttgctcttgttaggattgtaatatctttcactaaattacacatgtctgcaaaacagattcatgagatgtgaaaacaatacacaggtcatggctactcaatctacgatgcagaatcatttgttcaaccagtgcgcctttac

SEQ ID NO: 72362 - DNA, 3965 bp, Zea Mays
gtacagaatagattttattggttaacgtgtccatccctctcaaacacagcattaaagaagctagagatcaaactgtttttaaaatcaaaaccctatcaaactagagctaaatacttttcgttgctactatattttttttccagcacgccatttccattctcctttcatccattgcgagtttgcgactgcgaacacgcgcgcaaaaaatattgacgaaaactggaggggtaaaggggaaaaggcgacggccgcctgggccctggaggagcgagaaggcggaagaaggggagcggcagtcgcaggccgcagctcgttgatggtggttagggtttcgccgcccgcacgctcgacctgctgaagaatcgcccccctgttgaagaggtctgcgcctcgccctataaggctccggggaagaggagatagacatcagtggaccccggcgcgcggctgatggcggagcaggagcggagggacgcggaggctgggggcgatgccgcgggcgcagcggtggcgtctcacaccagcagcatgcagcgtgtcaaagtataccgtttggctgatggtgggaagtgggacgatcaaggaacaggtcatgtttctattgattacattgagggttcgaaagaactcggtttgactgttttagatgaagatgacaatgagacgctacttatgcacaacatcacatctgatgatatttacagaaaacaagaagaaacaatcatttcatggagagatcgtgaagcagcgacagacttagcactaagctttcaggaagctgcaggatgctcctacatatgggaacatatatgtgaaattcagagaaaccttcagttcagtaaccttggtgctccggaagttggtcgtcgtcaatcatcagaatctctagaagcctctagaataatgcattcaaatgatgattcattccgctctgctaacggtgaattcagggaacttcctcctgttgagctgtctaatcttccttttattttgaagactgtattggagggtggcattacagatcagatccacatggcagagttgataacacaagatcgggactttttcccaaagctagtggacattttcagaatgtgcgaggatttagagaacatagatgatcttcacatgattttcaaattggtcaagggaataatattgttgaacagtccgtcaatctttgacaagattttctctgatgagtttatccttgacataataggtgcccttgaatatgatccagaggttccaagagtgcaaaagcaccgtgcttttctaaaagatcatgtagttttcaaagaggccatacatattgaaaatgtttctgttatttcgaagattcatcaaacatacagaataggctatcttaaggatgttattctgccacgaatattggatgatgccactctaggaagttttaacacaatgatacattcaaataatgcttctgttatttccatgctaaaggatgacacaccctttataagacaactatttgctaggatgaggtcatcagatatttctatggaatcaaaacgagaattggttctgttcttgcatgaattttgcacacttagcaagagtctaccagttgttcagcaactgcgactgtttcgggatctttcaggtgaaggcgttttcgaaataatttctgatgtgttgcagagtcaagatagaaaaatcgtttcagctgggacagatatgctgatactttttcttaatcaggaccctaacctattgaggtcatatattgttcagcaagaaggaaattctcttctaggacttctggttaaaggcatggtaactgacttcggtgaggaaatgcactgccagtttctagaaatcttgcgcatattgatggattctttcactatgtctggagcacatagagacgtaattattgagattttctacgaaaggcatcttgactatttggttgatgtaatagcatcctcttgtcccccgaggagcttgtctcgaccaagatctaactctgtacgtgttggtggaaacgctgaaggacatcatatcaagcctgagattttgttaaatgtttgtgaactactgtgcttttgtgtagttcatcatccctacagaattaagtgcaattttcttatgaataatgctatcgagaaaatccttacattgactcaacggagggagaagtttttggttgtagcagctgttaggtttatgcgtactattatatccagaaatgatgagcatctcattcgccatgttgtgaagttcaacttgttgaaaccaataattgatatctttgttgacaatggggagaggtacaacatgctacattcaggagtacttgaattgttggaatacatacgaaaggaaaatataaaagctctcactatctatgttattgagtctttctggtatgaacttgtcaagtttgaacacttcgggagtattcaggccttcaaactcaagtatcaacagtacgtggagagtgctgaaccaatgttaaatgcgagtgtgcctaacatgagaaagaaggcagaacaaagaggtctagagaaggaagaggaagactacttcaataaggatagtgatgaagaagattcaggctccggccggcgggataaacatgcacagaaccagcatagcaagcctaagcccaaggtccctaatggaagtgaagctgatgacactgatggcgcctctagacctaaatctgctggacttgtggactatgacgatgatgacgatgaagacttcaatccaccaccaatggagccttctacgcctgcagaggatgatgtgcccttaaacatatccccggtgaagcggaagccagtggatgtgaaacatgcagatggggagggtcgcaggaggcaaaaaatagaaaccagaattagttgtgctaaaattgctgctgttactagtaccattattaagcacacagatctacaaaacaagcatgcttgctacttgcctacatcagccgcgccaagtactgaacccaatggtgtttttagggagcgtggcactaactctgaggagcatcaacattctgtagagaacacagaaacttcacgacaagctggtggtgattgtataaaagacgggggcagtatgtctcccgagaaggctgtaaatacgacaacgacaagtgattcggagccttattcagtaagatgactgactactacacagctggtttgtccctgtacccaacctgttctcttgccaacaggaaggaatcggaatgtgtttggctccaaaaattcattgatatcaagctggaagcatgattggaggtgacatagattgcagctacctttacatctcaagtaaaattccagttacccctttttgagcctgtaaagttaattttccacaaggaaagatctgacgaacatcagaattgggatggctgtagattggaacattgaatgggccttgctcctgctgctatgctcgctattgtatctcttttatgagctaatggagtagcagtgaatgtgtgccttcaacttcactgttttctctccagtcattgactctgatgttactgctgtaaaacaagtaggactaaggcatagtttcagttgaatagcgtttttgccggattctgctgactcacttatacgactgtaatttgatggttcatagttttggctggacatgctgtcttggataattattcaagccttgtggtagaatagttctttaggccaaagatgtgctaggtagaatttcgaaagtgaataatgttggatgtattgggttaaggatggcaggtgtacatgatatcctactccagaacaggttcgctaaatactgtggtacaatcaaaaaacattcttgctcttgttaggattgtaatatctttcactaaattacacatgtctgcaaaacagattcatgagatgtgaaaacaatacacaggtcatggctactcaatctacgatgcagaatcatttgttcaaccagtgcgcctttac

SEQ ID NO: 72363 - DNA, 3904 bp, Zea Mays
gtacagaatagattttattggttaacgtgtccatccctctcaaacacagcattaaagaagctagagatcaaactgtttttaaaatcaaaaccctatcaaactagagctaaatacttttcgttgctactatattttttttccagcacgccatttccattctcctttcatccattgcgagtttgcgactgcgaacacgcgcgcaaaaaatattgacgaaaactggaggggtaaaggggaaaaggcgacggccgcctgggccctggaggagcgagaaggcggaagaaggggagcggcagtcgcaggccgcagctcgttgatggtggttagggtttcgccgcccgcacgctcgacctgctgaagaatcgcccccctgttgaagaggtctgcgcctcgccctataaggctccggggaagaggagatagacatcagtggaccccggcgcgcggctgatggcggagcaggagcggagggacgcggaggctgggggcgatgccgcgggcgcagcggtggcgtctcacaccagcagcatgcagcgtgtcaaagtataccgtttggctgatggtgggaagtgggacgatcaaggaacaggtcatgtttctattgattacattgagggttcgaaagaactcggtttgactgttttagatgaagatgacaatgagacgctacttatgcacaacatcacatctgatgatatttacagaaaacaagaagaaacaatcatttcatggagagatcgtgaagcagcgacagacttagcactaagctttcaggaagctgcaggatgctcctacatatgggaacatatatgtgaaattcagagaaaccttcagttcagtaaccttggtgctccggaagttggtcgtcgtcaatcatcagaatctctagaagcctctagaataatgcattcaaatgatgattcattccgctctgctaacggtgaattcagggaacttcctcctgttgagctgtctaatcttccttttattttgaagactgtattggagggtggcattacagatcagatccacatggcagagttgataacacaagatcgggactttttcccaaagctagtggacattttcagaatgtgcgaggatttagagaacatagatgatcttcacatgattttcaaattggtcaagggaataatattgttgaacagtccgtcaatctttgacaagattttctctgatgagtttatccttgacataataggtgcccttgaatatgatccagaggttccaagagtgcaaaagcaccgtgcttttctaaaagatcatgtagttttcaaagaggccatacatattgaaaatgtttctgttatttcgaagattcatcaaacatacagaataggctatcttaaggatgttattctgccacgaatattggatgatgccactctaggaagttttaacacaatgatacattcaaataatgcttctgttatttccatgctaaaggatgacacaccctttataagacaactatttgctaggatgaggtcatcagatatttctatggaatcaaaacgagaattggttctgttcttgcatgaattttgcacacttagcaagagtctaccagttgttcagcaactgcgactgtttcgggatctttcaggtgaaggcgttttcgaaataatttctgatgtgttgcagagtcaagatagaaaaatcgtttcagctgggacagatatgctgatactttttcttaatcaggaccctaacctattgaggtcatatattgttcagcaagaaggaaattctcttctaggacttctggttaaaggcatggtaactgacttcggtgaggaaatgcactgccagtttctagaaatcttgcgcatattgatggattctttcactatgtctggagcacatcatcctcttgtcccccgaggagcttgtctcgaccaagatctaactctgtacgtgttggtggaaacgctgaaggacatcatatcaagcctgagattttgttaaatgtttgtgaactactgtgcttttgtgtagttcatcatccctacagaattaagtgcaattttcttatgaataatgctatcgagaaaatccttacattgactcaacggagggagaagtttttggttgtagcagctgttaggtttatgcgtactattatatccagaaatgatgagcatctcattcgccatgttgtgaagttcaacttgttgaaaccaataattgatatctttgttgacaatggggagaggtacaacatgctacattcaggagtacttgaattgttggaatacatacgaaaggaaaatataaaagctctcactatctatgttattgagtctttctggtatgaacttgtcaagtttgaacacttcgggagtattcaggccttcaaactcaagtatcaacagtacgtggagagtgctgaaccaatgttaaatgcgagtgtgcctaacatgagaaagaaggcagaacaaagaggtctagagaaggaagaggaagactacttcaataaggatagtgatgaagaagattcaggctccggccggcgggataaacatgcacagaaccagcatagcaagcctaagcccaaggtccctaatggaagtgaagctgatgacactgatggcgcctctagacctaaatctgctggacttgtggactatgacgatgatgacgatgaagacttcaatccaccaccaatggagccttctacgcctgcagaggatgatgtgcccttaaacatatccccggtgaagcggaagccagtggatgtgaaacatgcagatggggagggtcgcaggaggcaaaaaatagaaaccagaattagttgtgctaaaattgctgctgttactagtaccattattaagcacacagatctacaaaacaagcatgcttgctacttgcctacatcagccgcgccaagtactgaacccaatggtgtttttagggagcgtggcactaactctgaggagcatcaacattctgtagagaacacagaaacttcacgacaagctggtggtgattgtataaaagacgggggcagtatgtctcccgagaaggctgtaaatacgacaacgacaagtgattcggagccttattcagtaagatgactgactactacacagctggtttgtccctgtacccaacctgttctcttgccaacaggaaggaatcggaatgtgtttggctccaaaaattcattgatatcaagctggaagcatgattggaggtgacatagattgcagctacctttacatctcaagtaaaattccagttacccctttttgagcctgtaaagttaattttccacaaggaaagatctgacgaacatcagaattgggatggctgtagattggaacattgaatgggccttgctcctgctgctatgctcgctattgtatctcttttatgagctaatggagtagcagtgaatgtgtgccttcaacttcactgttttctctccagtcattgactctgatgttactgctgtaaaacaagtaggactaaggcatagtttcagttgaatagcgtttttgccggattctgctgactcacttatacgactgtaatttgatggttcatagttttggctggacatgctgtcttggataattattcaagccttgtggtagaatagttctttaggccaaagatgtgctaggtagaatttcgaaagtgaataatgttggatgtattgggttaaggatggcaggtgtacatgatatcctactccagaacaggttcgctaaatactgtggtacaatcaaaaaacattcttgctcttgttaggattgtaatatctttcactaaattacacatgtctgcaaaacagattcatgagatgtgaaaacaatacacaggtcatggctactcaatctacgatgcagaatcatttgttcaaccagtgcgcctttac

SEQ ID NO: 72364 - DNA, 3729 bp, Zea Mays
agagatcaaactgtttttaaaatcaaaaccctatcaaactagagctaaatacttttcgttgctactatattttttttccagcacgccatttccattctcctttcatccattgcgagtttgcgactgcgaacacgcgcgcaaaaaatattgacgaaaactggaggggtaaaggggaaaaggcgacggccgcctgggccctggaggagcgagaaggcggaagaaggggagcggcagtcgcaggccgcagctcgttgatggtggttagggtttcgccgcccgcacgctcgacctgctgaagaatcgcccccctgttgaagaggtctgcgcctcgccctataaggctccggggaagaggagatagacatcagtggaccccggcgcgcggctgatggcggagcaggagcggagggacgcggaggctgggggcgatgccgcgggcgcagcggtggcgtctcacaccagcagcatgcagcgtgtcaaagtataccgtttggctgatggtgggaagtgggacgatcaaggaacaggtcatgtttctattgattacattgagggttcgaaagaactcggtttgactgttttagatgaagatgacaatgagacgctacttatgcacaacatcacatctgatgatatttacagaaaacaagaagaaacaatcatttcatggagagatcgtgaagcagcgacagacttagcactaagctttcaggaagctgcaggatgctcctacatatgggaacatatatgtgaaattcagagaaaccttcagttcagtaaccttggtgctccggaagttggtcgtcgtcaatcatcagaatctctagaagcctctagaataatgcattcaaatgatgattcattccgctctgctaacggtgaattcagggaacttcctcctgttgagctgtctaatcttccttttattttgaagactgtattggagggtggcattacagatcagatccacatggcagagttgataacacaagatcgggactttttcccaaagctagtggacattttcagaatgtgcgaggatttagagaacatagatgatcttcacatgattttcaaattggtcaagggaataatattgttgaacagtccgtcaatctttgacaagattttctctgatgagtttatccttgacataataggtgcccttgaatatgatccagaggttccaagagtgcaaaagcaccgtgcttttctaaaagatcatgtagttttcaaagaggccatacatattgaaaatgtttctgttatttcgaagattcatcaaacatacagaataggctatcttaaggttctgttcttgcatgaattttgcacacttagcaagagtctaccagttgttcagcaactgcgactgtttcgggatctttcaggtgaaggcgttttcgaaataatttctgatgtgttgcagagtcaagatagaaaaatcgtttcagctgggacagatatgctgatactttttcttaatcaggaccctaacctattgaggtcatatattgttcagcaagaaggaaattctcttctaggacttctggttaaaggcatggtaactgacttcggtgaggaaatgcactgccagtttctagaaatcttgcgcatattgatggattctttcactatgtctggagcacatagagacgtaattattgagattttctacgaaaggcatcttgactatttggttgatgtaatagcatcctcttgtcccccgaggagcttgtctcgaccaagatctaactctgtacgtgttggtggaaacgctgaaggacatcatatcaagcctgagattttgttaaatgtttgtgaactactgtgcttttgtgtagttcatcatccctacagaattaagtgcaattttcttatgaataatgctatcgagaaaatccttacattgactcaacggagggagaagtttttggttgtagcagctgttaggtttatgcgtactattatatccagaaatgatgagcatctcattcgccatgttgtgaagttcaacttgttgaaaccaataattgatatctttgttgacaatggggagaggtacaacatgctacattcaggagtacttgaattgttggaatacatacgaaaggaaaatataaaagctctcactatctatgttattgagtctttctggtatgaacttgtcaagtttgaacacttcgggagtattcaggccttcaaactcaagtatcaacagtacgtggagagtgctgaaccaatgttaaatgcgagtgtgcctaacatgagaaagaaggcagaacaaagaggtctagagaaggaagaggaagactacttcaataaggatagtgatgaagaagattcaggctccggccggcgggataaacatgcacagaaccagcatagcaagcctaagcccaaggtccctaatggaagtgaagctgatgacactgatggcgcctctagacctaaatctgctggacttgtggactatgacgatgatgacgatgaagacttcaatccaccaccaatggagccttctacgcctgcagaggatgatgtgcccttaaacatatccccggtgaagcggaagccagtggatgtgaaacatgcagatggggagggtcgcaggaggcaaaaaatagaaaccagaattagttgtgctaaaattgctgctgttactagtaccattattaagcacacagatctacaaaacaagcatgcttgctacttgcctacatcagccgcgccaagtactgaacccaatggtgtttttagggagcgtggcactaactctgaggagcatcaacattctgtagagaacacagaaacttcacgacaagctggtggtgattgtataaaagacgggggcagtatgtctcccgagaaggctgtaaatacgacaacgacaagtgattcggagccttattcagtaagatgactgactactacacagctggtttgtccctgtacccaacctgttctcttgccaacaggaaggaatcggaatgtgtttggctccaaaaattcattgatatcaagctggaagcatgattggaggtgacatagattgcagctacctttacatctcaagtaaaattccagttacccctttttgagcctgtaaagttaattttccacaaggaaagatctgacgaacatcagaattgggatggctgtagattggaacattgaatgggccttgctcctgctgctatgctcgctattgtatctcttttatgagctaatggagtagcagtgaatgtgtgccttcaacttcactgttttctctccagtcattgactctgatgttactgctgtaaaacaagtaggactaaggcatagtttcagttgaatagcgtttttgccggattctgctgactcacttatacgactgtaatttgatggttcatagttttggctggacatgctgtcttggataattattcaagccttgtggtagaatagttctttaggccaaagatgtgctaggtagaatttcgaaagtgaataatgttggatgtattgggttaaggatggcaggtgtacatgatatcctactccagaacaggttcgctaaatactgtggtacaatcaaaaaacattcttgctcttgttaggattgtaatatctttcactaaattacacatgtctgcaaaacagattcatgagatgtgaaaacaatacacaggtcatggctactcaatctacgatgcagaatcatttgttcaaccagtgcgcctttac

SEQ ID NO: 72365 - DNA, 3776 bp, Zea Mays
gtttgcgactgcgaacacgcgcgcaaaaaatattgacgaaaactggaggggtaaaggggaaaaggcgacggccgcctgggccctggaggagcgagaaggcggaagaaggggagcggcagtcgcaggccgcagctcgttgatggtggttagggtttcgccgcccgcacgctcgacctgctgaagaatcgcccccctgttgaagaggtctgcgcctcgccctataaggctccggggaagaggagatagacatcagtggaccccggcgcgcggctgatggcggagcaggagcggagggacgcggaggctgggggcgatgccgcgggcgcagcggtggcgtctcacaccagcagcatgcagcgtgtcaaagtataccgtttggctgatggtgggaagtgggacgatcaaggaacaggtcatgtttctattgattacattgagggttcgaaagaactcggtttgactgttttagatgaagatgacaatgagacgctacttatgcacaacatcacatctgatgatatttacagaaaacaagaagaaacaatcatttcatggagagatcgtgaagcagcgacagacttagcactaagctttcaggaagctgcaggatgctcctacatatgggaacatatatgtgaaattcagagaaaccttcagttcagtaaccttggtgctccggaagttggtcgtcgtcaatcatcagaatctctagaagcctctagaataatgcattcaaatgatgattcattccgctctgctaacggtgaattcagggaacttcctcctgttgagctgtctaatcttccttttattttgaagactgtattggagggtggcattacagatcagatccacatggcagagttgataacacaagatcgggactttttcccaaagctagtggacattttcagaatgtgcgaggatttagagaacatagatgatcttcacatgattttcaaattggtcaagggaataatattgttgaacagtccgtcaatctttgacaagattttctctgatgagtttatccttgacataatagatgatccagaggttccaagagtgcaaaagcaccgtgcttttctaaaagatcatgtagttttcaaagaggccatacatattgaaaatgtttctgttatttcgaagattcatcaaacatacagaataggctatcttaaggatgttattctgccacgaatattggatgatgccactctaggaagttttaacacaatgatacattcaaataatgcttctgttatttccatgctaaaggatgacacaccctttataagacaactatttgctaggatgaggtcatcagatatttctatggaatcaaaacgagaattggttctgttcttgcatgaattttgcacacttagcaagagtctaccagttgttcagcaactgcgactgtttcgggatctttcaggtgaaggcgttttcgaaataatttctgatgtgttgcagagtcaagatagaaaaatcgtttcagctgggacagatatgctgatactttttcttaatcaggaccctaacctattgaggtcatatattgttcagcaagaaggaaattctcttctaggacttctggttaaaggcatggtaactgacttcggtgaggaaatgcactgccagtttctagaaatcttgcgcatattgatggattctttcactatgtctggagcacatagagacgtaattattgagattttctacgaaaggcatcttgactatttggttgatgtaatagcatcctcttgtcccccgaggagcttgtctcgaccaagatctaactctgtacgtgttggtggaaacgctgaaggacatcatatcaagcctgagattttgttaaatgtttgtgaactactgtgcttttgtgtagttcatcatccctacagaattaagtgcaattttcttatgaataatgctatcgagaaaatccttacattgactcaacggagggagaagtttttggttgtagcagctgttaggtttatgcgtactattatatccagaaatgatgagcatctcattcgccatgttgtgaagttcaacttgttgaaaccaataattgatatctttgttgacaatggggagaggtacaacatgctacattcaggagtacttgaattgttggaatacatacgaaaggaaaatataaaagctctcactatctatgttattgagtctttctggtatgaacttgtcaagtttgaacacttcgggagtattcaggccttcaaactcaagtatcaacagtacgtggagagtgctgaaccaatgttaaatgcgagtgtgcctaacatgagaaagaaggcagaacaaagaggtctagagaaggaagaggaagactacttcaataaggatagtgatgaagaagattcaggctccggccggcgggataaacatgcacagaaccagcatagcaagcctaagcccaaggtccctaatggaagtgaagctgatgacactgatggcgcctctagacctaaatctgctggacttgtggactatgacgatgatgacgatgaagacttcaatccaccaccaatggagccttctacgcctgcagaggatgatgtgcccttaaacatatccccggtgaagcggaagccagtggatgtgaaacatgcagatggggagggtcgcaggaggcaaaaaatagaaaccagaattagttgtgctaaaattgctgctgttactagtaccattattaagcacacagatctacaaaacaagcatgcttgctacttgcctacatcagccgcgccaagtactgaacccaatggtgtttttagggagcgtggcactaactctgaggagcatcaacattctgtagagaacacagaaacttcacgacaagctggtggtgattgtataaaagacgggggcagtatgtctcccgagaaggctgtaaatacgacaacgacaagtgattcggagccttattcagtaagatgactgactactacacagctggtttgtccctgtacccaacctgttctcttgccaacaggaaggaatcggaatgtgtttggctccaaaaattcattgatatcaagctggaagcatgattggaggtgacatagattgcagctacctttacatctcaagtaaaattccagttacccctttttgagcctgtaaagttaattttccacaaggaaagatctgacgaacatcagaattgggatggctgtagattggaacattgaatgggccttgctcctgctgctatgctcgctattgtatctcttttatgagctaatggagtagcagtgaatgtgtgccttcaacttcactgttttctctccagtcattgactctgatgttactgctgtaaaacaagtaggactaaggcatagtttcagttgaatagcgtttttgccggattctgctgactcacttatacgactgtaatttgatggttcatagttttggctggacatgctgtcttggataattattcaagccttgtggtagaatagttctttaggccaaagatgtgctaggtagaatttcgaaagtgaataatgttggatgtattgggttaaggatggcaggtgtacatgatatcctactccagaacaggttcgctaaatactgtggtacaatcaaaaaacattcttgctcttgttaggattgtaatatctttcactaaattacacatgtctgcaaaacagattcatgagatgtgaaaacaatacacaggtcatggctactcaatctacgatgcagaatcatttgttcaaccagtgcgcctttac

SEQ ID NO: 72366 - DNA, 3609 bp, Zea Mays
gtttgcgactgcgaacacgcgcgcaaaaaatattgacgaaaactggaggggtaaaggggaaaaggcgacggccgcctgggccctggaggagcgagaaggcggaagaaggggagcggcagtcgcaggccgcagctcgttgatggtggttagggtttcgccgcccgcacgctcgacctgctgaagaatcgcccccctgttgaagaggtctgcgcctcgccctataaggctccggggaagaggagatagacatcagtggaccccggcgcgcggctgatggcggagcaggagcggagggacgcggaggctgggggcgatgccgcgggcgcagcggtggcgtctcacaccagcagcatgcagcgtgtcaaagtataccgtttggctgatggtgggaagtgggacgatcaaggaacaggtcatgtttctattgattacattgagggttcgaaagaactcggtttgactgttttagatgaagatgacaatgagacgctacttatgcacaacatcacatctgatgatatttacagaaaacaagaagaaacaatcatttcatggagagatcgtgaagcagcgacagacttagcactaagctttcaggaagctgcaggatgctcctacatatgggaacatatatgtgaaattcagagaaaccttcagttcagtaaccttggtgctccggaagttggtcgtcgtcaatcatcagaatctctagaagcctctagaataatgcattcaaatgatgattcattccgctctgctaacggtgaattcagggaacttcctcctgttgagctgtctaatcttccttttattttgaagactgtattggagggtggcattacagatcagatccacatggcagagttgataacacaagatcgggactttttcccaaagctagtggacattttcagaatgtgcgaggatttagagaacatagatgatcttcacatgattttcaaattggtcaagggaataatattgttgaacagtccgtcaatctttgacaagattttctctgatgagtttatccttgacataataggtgcccttgaatatgatccagaggttccaagagtgcaaaagcaccgtgcttttctaaaagatcatgtagttttcaaagaggccatacatattgaaaatgtttctgttatttcgaagattcatcaaacatacagaataggctatcttaaggttctgttcttgcatgaattttgcacacttagcaagagtctaccagttgttcagcaactgcgactgtttcgggatctttcaggtgaaggcgttttcgaaataatttctgatgtgttgcagagtcaagatagaaaaatcgtttcagacagatatgctgatactttttcttaatcaggaccctaacctattgaggtcatatattgttcagcaagaaggaaattctcttctaggacttctggttaaaggcatggtaactgacttcggtgaggaaatgcactgccagtttctagaaatcttgcgcatattgatggattctttcactatgtctggagcacatagagacgtaattattgagattttctacgaaaggcatcttgactatttggttgatgtaatagcatcctcttgtcccccgaggagcttgtctcgaccaagatctaactctgtacgtgttggtggaaacgctgaaggacatcatatcaagcctgagattttgttaaatgtttgtgaactactgtgcttttgtgtagttcatcatccctacagaattaagtgcaattttcttatgaataatgctatcgagaaaatccttacattgactcaacggagggagaagtttttggttgtagcagctgttaggtttatgcgtactattatatccagaaatgatgagcatctcattcgccatgttgtgaagttcaacttgttgaaaccaataattgatatctttgttgacaatggggagaggtacaacatgctacattcaggagtacttgaattgttggaatacatacgaaaggaaaatataaaagctctcactatctatgttattgagtctttctggtatgaacttgtcaagtttgaacacttcgggagtattcaggccttcaaactcaagtatcaacagtacgtggagagtgctgaaccaatgttaaatgcgagtgtgcctaacatgagaaagaaggcagaacaaagaggtctagagaaggaagaggaagactacttcaataaggatagtgatgaagaagattcaggctccggccggcgggataaacatgcacagaaccagcatagcaagcctaagcccaaggtccctaatggaagtgaagctgatgacactgatggcgcctctagacctaaatctgctggacttgtggactatgacgatgatgacgatgaagacttcaatccaccaccaatggagccttctacgcctgcagaggatgatgtgcccttaaacatatccccggtgaagcggaagccagtggatgtgaaacatgcagatggggagggtcgcaggaggcaaaaaatagaaaccagaattagttgtgctaaaattgctgctgttactagtaccattattaagcacacagatctacaaaacaagcatgcttgctacttgcctacatcagccgcgccaagtactgaacccaatggtgtttttagggagcgtggcactaactctgaggagcatcaacattctgtagagaacacagaaacttcacgacaagctggtggtgattgtataaaagacgggggcagtatgtctcccgagaaggctgtaaatacgacaacgacaagtgattcggagccttattcagtaagatgactgactactacacagctggtttgtccctgtacccaacctgttctcttgccaacaggaaggaatcggaatgtgtttggctccaaaaattcattgatatcaagctggaagcatgattggaggtgacatagattgcagctacctttacatctcaagtaaaattccagttacccctttttgagcctgtaaagttaattttccacaaggaaagatctgacgaacatcagaattgggatggctgtagattggaacattgaatgggccttgctcctgctgctatgctcgctattgtatctcttttatgagctaatggagtagcagtgaatgtgtgccttcaacttcactgttttctctccagtcattgactctgatgttactgctgtaaaacaagtaggactaaggcatagtttcagttgaatagcgtttttgccggattctgctgactcacttatacgactgtaatttgatggttcatagttttggctggacatgctgtcttggataattattcaagccttgtggtagaatagttctttaggccaaagatgtgctaggtagaatttcgaaagtgaataatgttggatgtattgggttaaggatggcaggtgtacatgatatcctactccagaacaggttcgctaaatactgtggtacaatcaaaaaacattcttgctcttgttaggattgtaatatctttcactaaattacacatgtctgcaaaacagattcatgagatgtgaaaacaatacacaggtcatggctactcaatctacgatgcagaatcatttgttcaaccagtgcgcctttac

SEQ ID NO: 72367 - DNA, 3830 bp, Zea Mays
gtttgcgactgcgaacacgcgcgcaaaaaatattgacgaaaactggaggggtaaaggggaaaaggcgacggccgcctgggccctggaggagcgagaaggcggaagaaggggagcggcagtcgcaggccgcagctcgttgatggtggttagggtttcgccgcccgcacgctcgacctgctgaagaatcgcccccctgttgaagaggtctgcgcctcgccctataaggctccggggaagaggagatagacatcagtggaccccggcgcgcggctgatggcggagcaggagcggagggacgcggaggctgggggcgatgccgcgggcgcagcggtggcgtctcacaccagcagcatgcagcgtgtcaaagtataccgtttggctgatggtgggaagtgggacgatcaaggaacaggtcatgtttctattgattacattgagggttcgaaagaactcggtttgactgttttagatgaagatgacaatgagacgctacttatgcacaacatcacatctgatgatatttacagaaaacaagaagaaacaatcatttcatggagagatcgtgaagcagcgacagacttagcactaagctttcaggaagctgcaggatgctcctacatatgggaacatatatgtgaaattcagagaaaccttcagttcagtaaccttggtgctccggaagttggtcgtcgtcaatcatcagaatctctagaagcctctagaataatgcattcaaatgatgattcattccgctctgctaacggtgaattcagggaacttcctcctgttgagctgtctaatcttccttttattttgaagactgtattggagggtggcattacagatcagatccacatggcagagttgataacacaagatcgggactttttcccaaagctagtggacattttcagaatgtgcgaggatttagagaacatagatgatcttcacatgattttcaaattggtcaagggaataatattgttgaacagtccgtcaatctttgacaagattttctctgatgagtttatccttgacataataggtgcccttgaatatgatccagaggttccaagagtgcaaaagcaccgtgcttttctaaaagatcatgtagttttcaaagaggccatacatattgaaaatgtttctgttatttcgaagattcatcaaacatacagaataggctatcttaaggatgttattctgccacgaatattggatgatgccactctaggaagttttaacacaatgatacattcaaataatgcttctgttctgttcttgcatgaattttgcacacttagcaagagtctaccagttgttcagcaactgcgactgtttcgggatctttcaggtgaaggcgttttcgaaataatttctgatgtgttgcagagtcaagatagaaaaatcgtttcagctgggacagatatgctgatactttttcttaatcaggaccctaacctattgaggtcatatattgttcagcaagaaggaaattctcttctaggacttctggttaaaggcatggtaactgacttcggtgaggaaatgcactgccagtttctagaaatcttgcgcatattgatggattctttcactatgtctggagcacatagagacgtaattattgagattttctacgaaaggcatcttgactatttggttgatgtaatagcatcctcttgtcccccgaggagcttgtctcgaccaagatctaactctgtacgtgttggtggaaacgctgaaggacatcatatcaagcctgagattttgttaaatgtttgtgaactactgtgcttttgtgtagttcatcatccctacagaattaagtgcaattttcttatgaataatgctatcgagaaaatccttacattgactcaacggagggagaagtttttggttgtagcagctgttaggtttatgcgtactattatatccagaaatgatgagcatctcattcgccatgttgtgaagttcaacttgttgaaaccaataattgatatctttgttgacaatggggagaggtacaacatgctacattcaggagtacttgaattgttggaatacatacgaaaggaaaatataaaagctctcactatctatgttattgagtctttctggtatgaacttgtcaagtttgaacacttcgggagtattcaggccttcaaactcaagtatcaacagtacgtggagagtgctgaaccaatgttaaatgcgagtgtgcctaacatgagaaagaaggcagaacaaagaggtctagagaaggaagaggaagactacttcaataaggataggtttactatttttttcttactggtcatttatttcttcattattttagcaatatagtcgagcttcgacattccagggtgccattatgttcaaagattatacagtgaatttgcaagtgaaatgatctttgttcttcctagtgatgaagaagattcaggctccggccggcgggataaacatgcacagaaccagcatagcaagcctaagcccaaggtccctaatggaagtgaagctgatgacactgatggcgcctctagacctaaatctgctggacttgtggactatgacgatgatgacgatgaagacttcaatccaccaccaatggagccttctacgcctgcagaggatgatgtgcccttaaacatatccccggtgaagcggaagccagtggatgtgaaacatgcagatggggagggtcgcaggaggcaaaaaatagaaaccagaattagttgtgctaaaattgctgctgttactagtaccattattaagcacacagatctacaaaacaagcatgcttgctacttgcctacatcagccgcgccaagtactgaacccaatggtgtttttagggagcgtggcactaactctgaggagcatcaacattctgtagagaacacagaaacttcacgacaagctggtggtgattgtataaaagacgggggcagtatgtctcccgagaaggctgtaaatacgacaacgacaagtgattcggagccttattcagtaagatgactgactactacacagctggtttgtccctgtacccaacctgttctcttgccaacaggaaggaatcggaatgtgtttggctccaaaaattcattgatatcaagctggaagcatgattggaggtgacatagattgcagctacctttacatctcaagtaaaattccagttacccctttttgagcctgtaaagttaattttccacaaggaaagatctgacgaacatcagaattgggatggctgtagattggaacattgaatgggccttgctcctgctgctatgctcgctattgtatctcttttatgagctaatggagtagcagtgaatgtgtgccttcaacttcactgttttctctccagtcattgactctgatgttactgctgtaaaacaagtaggactaaggcatagtttcagttgaatagcgtttttgccggattctgctgactcacttatacgactgtaatttgatggttcatagttttggctggacatgctgtcttggataattattcaagccttgtggtagaatagttctttaggccaaagatgtgctaggtagaatttcgaaagtgaataatgttggatgtattgggttaaggatggcaggtgtacatgatatcctactccagaacaggttcgctaaatactgtggtacaatcaaaaaacattcttgctcttgttaggattgtaatatctttcactaaattacacatgtctgcaaaacagattcatgagatgtgaaaacaatacacaggtcatggctactcaatctacgatgcagaatcatttgttcaaccagtgcgcctttac

SEQ ID NO: 72368 - DNA, 3783 bp, Zea Mays
gtttgcgactgcgaacacgcgcgcaaaaaatattgacgaaaactggaggggtaaaggggaaaaggcgacggccgcctgggccctggaggagcgagaaggcggaagaaggggagcggcagtcgcaggccgcagctcgttgatggtggttagggtttcgccgcccgcacgctcgacctgctgaagaatcgcccccctgttgaagaggtctgcgcctcgccctataaggctccggggaagaggagatagacatcagtggaccccggcgcgcggctgatggcggagcaggagcggagggacgcggaggctgggggcgatgccgcgggcgcagcggtggcgtctcacaccagcagcatgcagcgtgtcaaagtataccgtttggctgatggtgggaagtgggacgatcaaggaacaggtcatgtttctattgattacattgagggttcgaaagaactcggtttgactgttttagatgaagatgacaatgagacgctacttatgcacaacatcacatctgatgatatttacagaaaacaagaagaaacaatcatttcatggagagatcgtgaagcagcgacagacttagcactaagctttcaggaagctgcaggatgctcctacatatgggaacatatatgtgaaattcagagaaaccttcagttcagtaaccttggtgctccggaagttggtcgtcgtcaatcatcagaatctctagaagcctctagaataatgcattcaaatgatgattcattccgctctgctaacggtgaattcagggaacttcctcctgttgagctgtctaatcttccttttattttgaagactgtattggagggtggcattacagatcagatccacatggcagagttgataacacaagatcgggactttttcccaaagctagtggacattttcagaatgtgcgaggatttagagaacatagatgatcttcacatgattttcaaattggtcaagggaataatattgttgaacagtccgtcaatctttgacaagattttctctgatgagtttatccttgacataataggtgcccttgaatatgatccagaggttccaagagtgcaaaagcaccgtgcttttctaaaagatcatgtagttttcaaagaggccatacatattgaaaatgtttctgttatttcgaagattcatcaaacatacagaataggctatcttaaggatgttattctgccacgaatattggatgatgccactctaggaagttttaacacaatgatacattcaaataatgcttctgttatttccatgctaaaggatgacacaccctttataagacaactatttgctaggatgaggtcatcagatatttctatggaatcaaaacgagaattggttctgttcttgcatgaattttgcacacttagcaagagtctaccagttgttcagcaactgcgactgtttcgggatctttcaggtgaaggcgttttcgaaataatttctgatgtgttgcagagtcaagatagaaaaatcgtttcagacagatatgctgatactttttcttaatcaggaccctaacctattgaggtcatatattgttcagcaagaaggaaattctcttctaggacttctggttaaaggcatggtaactgacttcggtgaggaaatgcactgccagtttctagaaatcttgcgcatattgatggattctttcactatgtctggagcacatagagacgtaattattgagattttctacgaaaggcatcttgactatttggttgatgtaatagcatcctcttgtcccccgaggagcttgtctcgaccaagatctaactctgtacgtgttggtggaaacgctgaaggacatcatatcaagcctgagattttgttaaatgtttgtgaactactgtgcttttgtgtagttcatcatccctacagaattaagtgcaattttcttatgaataatgctatcgagaaaatccttacattgactcaacggagggagaagtttttggttgtagcagctgttaggtttatgcgtactattatatccagaaatgatgagcatctcattcgccatgttgtgaagttcaacttgttgaaaccaataattgatatctttgttgacaatggggagaggtacaacatgctacattcaggagtacttgaattgttggaatacatacgaaaggaaaatataaaagctctcactatctatgttattgagtctttctggtatgaacttgtcaagtttgaacacttcgggagtattcaggccttcaaactcaagtatcaacagtacgtggagagtgctgaaccaatgttaaatgcgagtgtgcctaacatgagaaagaaggcagaacaaagaggtctagagaaggaagaggaagactacttcaataaggatagtgatgaagaagattcaggctccggccggcgggataaacatgcacagaaccagcatagcaagcctaagcccaaggtccctaatggaagtgaagctgatgacactgatggcgcctctagacctaaatctgctggacttgtggactatgacgatgatgacgatgaagacttcaatccaccaccaatggagccttctacgcctgcagaggatgatgtgcccttaaacatatccccggtgaagcggaagccagtggatgtgaaacatgcagatggggagggtcgcaggaggcaaaaaatagaaaccagaattagttgtgctaaaattgctgctgttactagtaccattattaagcacacagatctacaaaacaagcatgcttgctacttgcctacatcagccgcgccaagtactgaacccaatggtgtttttagggagcgtggcactaactctgaggagcatcaacattctgtagagaacacagaaacttcacgacaagctggtggtgattgtataaaagacgggggcagtatgtctcccgagaaggctgtaaatacgacaacgacaagtgattcggagccttattcagtaagatgactgactactacacagctggtttgtccctgtacccaacctgttctcttgccaacaggaaggaatcggaatgtgtttggctccaaaaattcattgatatcaagctggaagcatgattggaggtgacatagattgcagctacctttacatctcaagtaaaattccagttacccctttttgagcctgtaaagttaattttccacaaggaaagatctgacgaacatcagaattgggatggctgtagattggaacattgaatgggccttgctcctgctgctatgctcgctattgtatctcttttatgagctaatggagtagcagtgaatgtgtgccttcaacttcactgttttctctccagtcattgactctgatgttactgctgtaaaacaagtaggactaaggcatagtttcagttgaatagcgtttttgccggattctgctgactcacttatacgactgtaatttgatggttcatagttttggctggacatgctgtcttggataattattcaagccttgtggtagaatagttctttaggccaaagatgtgctaggtagaatttcgaaagtgaataatgttggatgtattgggttaaggatggcaggtgtacatgatatcctactccagaacaggttcgctaaatactgtggtacaatcaaaaaacattcttgctcttgttaggattgtaatatctttcactaaattacacatgtctgcaaaacagattcatgagatgtgaaaacaatacacaggtcatggctactcaatctacgatgcagaatcatttgttcaaccagtgcgcctttac

SEQ ID NO: 72369 - DNA, 3788 bp, Zea Mays
gtttgcgactgcgaacacgcgcgcaaaaaatattgacgaaaactggaggggtaaaggggaaaaggcgacggccgcctgggccctggaggagcgagaaggcggaagaaggggagcggcagtcgcaggccgcagctcgttgatggtggttagggtttcgccgcccgcacgctcgacctgctgaagaatcgcccccctgttgaagaggtctgcgcctcgccctataaggctccggggaagaggagatagacatcagtggaccccggcgcgcggctgatggcggagcaggagcggagggacgcggaggctgggggcgatgccgcgggcgcagcggtggcgtctcacaccagcagcatgcagcgtgtcaaagtataccgtttggctgatggtgggaagtgggacgatcaaggaacaggtcatgtttctattgattacattgagggttcgaaagaactcggtttgactgttttagatgaagatgacaatgagacgctacttatgcacaacatcacatctgatgatatttacagaaaacaagaagaaacaatcatttcatggagagatcgtgaagcagcgacagacttagcactaagctttcaggaagctgcaggatgctcctacatatgggaacatatatgtgaaattcagagaaaccttcagttcagtaaccttggtgctccggaagttggtcgtcgtcaatcatcagaatctctagaagcctctagaataatgcattcaaatgatgattcattccgctctgctaacggtgaattcagggaacttcctcctgttgagctgtctaatcttccttttattttgaagactgtattggagggtggcattacagatcagatccacatggcagagttgataacacaagatcgggactttttcccaaagctagtggacattttcagaatgtgcgaggatttagagaacatagatgatcttcacatgattttcaaattggtcaagggaataatattgttgaacagtccgtcaatctttgacaagattttctctgatgagtttatccttgacataataggtgcccttgaagatgatccagaggttccaagagtgcaaaagcaccgtgcttttctaaaagatcatgtagttttcaaagaggccatacatattgaaaatgtttctgttatttcgaagattcatcaaacatacagaataggctatcttaaggatgttattctgccacgaatattggatgatgccactctaggaagttttaacacaatgatacattcaaataatgcttctgttatttccatgctaaaggatgacacaccctttataagacaactatttgctaggatgaggtcatcagatatttctatggaatcaaaacgagaattggttctgttcttgcatgaattttgcacacttagcaagagtctaccagttgttcagcaactgcgactgtttcgggatctttcaggtgaaggcgttttcgaaataatttctgatgtgttgcagagtcaagatagaaaaatcgtttcagctgggacagatatgctgatactttttcttaatcaggaccctaacctattgaggtcatatattgttcagcaagaaggaaattctcttctaggacttctggttaaaggcatggtaactgacttcggtgaggaaatgcactgccagtttctagaaatcttgcgcatattgatggattctttcactatgtctggagcacatagagacgtaattattgagattttctacgaaaggcatcttgactatttggttgatgtaatagcatcctcttgtcccccgaggagcttgtctcgaccaagatctaactctgtacgtgttggtggaaacgctgaaggacatcatatcaagcctgagattttgttaaatgtttgtgaactactgtgcttttgtgtagttcatcatccctacagaattaagtgcaattttcttatgaataatgctatcgagaaaatccttacattgactcaacggagggagaagtttttggttgtagcagctgttaggtttatgcgtactattatatccagaaatgatgagcatctcattcgccatgttgtgaagttcaacttgttgaaaccaataattgatatctttgttgacaatggggagaggtacaacatgctacattcaggagtacttgaattgttggaatacatacgaaaggaaaatataaaagctctcactatctatgttattgagtctttctggtatgaacttgtcaagtttgaacacttcgggagtattcaggccttcaaactcaagtatcaacagtacgtggagagtgctgaaccaatgttaaatgcgagtgtgcctaacatgagaaagaaggcagaacaaagaggtctagagaaggaagaggaagactacttcaataaggatagtgatgaagaagattcaggctccggccggcgggataaacatgcacagaaccagcatagcaagcctaagcccaaggtccctaatggaagtgaagctgatgacactgatggcgcctctagacctaaatctgctggacttgtggactatgacgatgatgacgatgaagacttcaatccaccaccaatggagccttctacgcctgcagaggatgatgtgcccttaaacatatccccggtgaagcggaagccagtggatgtgaaacatgcagatggggagggtcgcaggaggcaaaaaatagaaaccagaattagttgtgctaaaattgctgctgttactagtaccattattaagcacacagatctacaaaacaagcatgcttgctacttgcctacatcagccgcgccaagtactgaacccaatggtgtttttagggagcgtggcactaactctgaggagcatcaacattctgtagagaacacagaaacttcacgacaagctggtggtgattgtataaaagacgggggcagtatgtctcccgagaaggctgtaaatacgacaacgacaagtgattcggagccttattcagtaagatgactgactactacacagctggtttgtccctgtacccaacctgttctcttgccaacaggaaggaatcggaatgtgtttggctccaaaaattcattgatatcaagctggaagcatgattggaggtgacatagattgcagctacctttacatctcaagtaaaattccagttacccctttttgagcctgtaaagttaattttccacaaggaaagatctgacgaacatcagaattgggatggctgtagattggaacattgaatgggccttgctcctgctgctatgctcgctattgtatctcttttatgagctaatggagtagcagtgaatgtgtgccttcaacttcactgttttctctccagtcattgactctgatgttactgctgtaaaacaagtaggactaaggcatagtttcagttgaatagcgtttttgccggattctgctgactcacttatacgactgtaatttgatggttcatagttttggctggacatgctgtcttggataattattcaagccttgtggtagaatagttctttaggccaaagatgtgctaggtagaatttcgaaagtgaataatgttggatgtattgggttaaggatggcaggtgtacatgatatcctactccagaacaggttcgctaaatactgtggtacaatcaaaaaacattcttgctcttgttaggattgtaatatctttcactaaattacacatgtctgcaaaacagattcatgagatgtgaaaacaatacacaggtcatggctactcaatctacgatgcagaatcatttgttcaaccagtgcgcctttac

SEQ ID NO: 72370 - DNA, 3765 bp, Zea Mays
gtttgcgactgcgaacacgcgcgcaaaaaatattgacgaaaactggaggggtaaaggggaaaaggcgacggccgcctgggccctggaggagcgagaaggcggaagaaggggagcggcagtcgcaggccgcagctcgttgatggtggttagggtttcgccgcccgcacgctcgacctgctgaagaatcgcccccctgttgaagaggtctgcgcctcgccctataaggctccggggaagaggagatagacatcagtggaccccggcgcgcggctgatggcggagcaggagcggagggacgcggaggctgggggcgatgccgcgggcgcagcggtggcgtctcacaccagcagcatgcagcgtgtcaaagtataccgtttggctgatggtgggaagtgggacgatcaaggaacaggtcatgtttctattgattacattgagggttcgaaagaactcggtttgactgttttagatgaagatgacaatgagacgctacttatgcacaacatcacatctgatgatatttacagaaaacaagaagaaacaatcatttcatggagagatcgtgaagcagcgacagacttagcactaagctttcaggaagctgcaggatgctcctacatatgggaacatatatgtgaaattcagagaaaccttcagttcagtaaccttggtgctccggaagttggtcgtcgtcaatcatcagaatctctagaagcctctagaataatgcattcaaatgatgattcattccgctctgctaacggtgaattcagggaacttcctcctgttgagctgtctaatcttccttttattttgaagactgtattggagggtggcattacagatcagatccacatggcagagttgataacacaagatcgggactttttcccaaagctagtggacattttcagaatgtgcgaggatttagagaacatagatgatcttcacatgattttcaaattggtcaagggaataatattgttgaacagtccgtcaatctttgacaagattttctctgatgagtttatccttgacataataggtgcccttgaatatgatccagaggttccaagagtgcaaaagcaccgtgcttttctaaaagatcatgtagttttcaaagaggccatacatattgaaaatgtttctgttatttcgaagattcatcaaacatacagaataggctatcttaaggatgttattctgccacgaatattggatgatgccactctaggaagttttaacacaatgatacattcaaataatgcttctgatgacacaccctttataagacaactatttgctaggatgaggtcatcagatatttctatggaatcaaaacgagaattggttctgttcttgcatgaattttgcacacttagcaagagtctaccagttgttcagcaactgcgactgtttcgggatctttcaggtgaaggcgttttcgaaataatttctgatgtgttgcagagtcaagatagaaaaatcgtttcagacagatatgctgatactttttcttaatcaggaccctaacctattgaggtcatatattgttcagcaagaaggaaattctcttctaggacttctggttaaaggcatggtaactgacttcggtgaggaaatgcactgccagtttctagaaatcttgcgcatattgatggattctttcactatgtctggagcacatagagacgtaattattgagattttctacgaaaggcatcttgactatttggttgatgtaatagcatcctcttgtcccccgaggagcttgtctcgaccaagatctaactctgtacgtgttggtggaaacgctgaaggacatcatatcaagcctgagattttgttaaatgtttgtgaactactgtgcttttgtgtagttcatcatccctacagaattaagtgcaattttcttatgaataatgctatcgagaaaatccttacattgactcaacggagggagaagtttttggttgtagcagctgttaggtttatgcgtactattatatccagaaatgatgagcatctcattcgccatgttgtgaagttcaacttgttgaaaccaataattgatatctttgttgacaatggggagaggtacaacatgctacattcaggagtacttgaattgttggaatacatacgaaaggaaaatataaaagctctcactatctatgttattgagtctttctggtatgaacttgtcaagtttgaacacttcgggagtattcaggccttcaaactcaagtatcaacagtacgtggagagtgctgaaccaatgttaaatgcgagtgtgcctaacatgagaaagaaggcagaacaaagaggtctagagaaggaagaggaagactacttcaataaggatagtgatgaagaagattcaggctccggccggcgggataaacatgcacagaaccagcatagcaagcctaagcccaaggtccctaatggaagtgaagctgatgacactgatggcgcctctagacctaaatctgctggacttgtggactatgacgatgatgacgatgaagacttcaatccaccaccaatggagccttctacgcctgcagaggatgatgtgcccttaaacatatccccggtgaagcggaagccagtggatgtgaaacatgcagatggggagggtcgcaggaggcaaaaaatagaaaccagaattagttgtgctaaaattgctgctgttactagtaccattattaagcacacagatctacaaaacaagcatgcttgctacttgcctacatcagccgcgccaagtactgaacccaatggtgtttttagggagcgtggcactaactctgaggagcatcaacattctgtagagaacacagaaacttcacgacaagctggtggtgattgtataaaagacgggggcagtatgtctcccgagaaggctgtaaatacgacaacgacaagtgattcggagccttattcagtaagatgactgactactacacagctggtttgtccctgtacccaacctgttctcttgccaacaggaaggaatcggaatgtgtttggctccaaaaattcattgatatcaagctggaagcatgattggaggtgacatagattgcagctacctttacatctcaagtaaaattccagttacccctttttgagcctgtaaagttaattttccacaaggaaagatctgacgaacatcagaattgggatggctgtagattggaacattgaatgggccttgctcctgctgctatgctcgctattgtatctcttttatgagctaatggagtagcagtgaatgtgtgccttcaacttcactgttttctctccagtcattgactctgatgttactgctgtaaaacaagtaggactaaggcatagtttcagttgaatagcgtttttgccggattctgctgactcacttatacgactgtaatttgatggttcatagttttggctggacatgctgtcttggataattattcaagccttgtggtagaatagttctttaggccaaagatgtgctaggtagaatttcgaaagtgaataatgttggatgtattgggttaaggatggcaggtgtacatgatatcctactccagaacaggttcgctaaatactgtggtacaatcaaaaaacattcttgctcttgttaggattgtaatatctttcactaaattacacatgtctgcaaaacagattcatgagatgtgaaaacaatacacaggtcatggctactcaatctacgatgcagaatcatttgttcaaccagtgcgcctttac

SEQ ID NO: 72371 - DNA, 2535 bp, Zea Mays
tgtgtggaggtaccagttagtgtcgacaccatagccatgaatgccatgagtggccgcaacaataatcttggtcttggaggagtatctttcattgaagtgataccaacaatctagggttctgttcttgcatgaattttgcacacttagcaagagtctaccagttgttcagcaactgcgactgtttcgggatctttcaggtgaaggcgttttcgaaataatttctgatgtgttgcagagtcaagatagaaaaatcgtttcagctgggacagatatgctgatactttttcttaatcaggaccctaacctattgaggtcatatattgttcagcaagaaggaaattctcttctaggacttctggttaaaggcatggtaactgacttcggtgaggaaatgcactgccagtttctagaaatcttgcgcatattgatggattctttcactatgtctggagcacatagagacgtaattattgagattttctacgaaaggcatcttgactatttggttgatgtaatagcatcctcttgtcccccgaggagcttgtctcgaccaagatctaactctgtacgtgttggtggaaacgctgaaggacatcatatcaagcctgagattttgttaaatgtttgtgaactactgtgcttttgtgtagttcatcatccctacagaattaagtgcaattttcttatgaataatgctatcgagaaaatccttacattgactcaacggagggagaagtttttggttgtagcagctgttaggtttatgcgtactattatatccagaaatgatgagcatctcattcgccatgttgtgaagttcaacttgttgaaaccaataattgatatctttgttgacaatggggagaggtacaacatgctacattcaggagtacttgaattgttggaatacatacgaaaggaaaatataaaagctctcactatctatgttattgagtctttctggtatgaacttgtcaagtttgaacacttcgggagtattcaggccttcaaactcaagtatcaacagtacgtggagagtgctgaaccaatgttaaatgcgagtgtgcctaacatgagaaagaaggcagaacaaagaggtctagagaaggaagaggaagactacttcaataaggatagtgatgaagaagattcaggctccggccggcgggataaacatgcacagaaccagcatagcaagcctaagcccaaggtccctaatggaagtgaagctgatgacactgatggcgcctctagacctaaatctgctggacttgtggactatgacgatgatgacgatgaagacttcaatccaccaccaatggagccttctacgcctgcagaggatgatgtgcccttaaacatatccccggtgaagcggaagccagtggatgtgaaacatgcagatggggagggtcgcaggaggcaaaaaatagaaaccagaattagttgtgctaaaattgctgctgttactagtaccattattaagcacacagatctacaaaacaagcatgcttgctacttgcctacatcagccgcgccaagtactgaacccaatggtgtttttagggagcgtggcactaactctgaggagcatcaacattctgtagagaacacagaaacttcacgacaagctggtggtgattgtataaaagacgggggcagtatgtctcccgagaaggctgtaaatacgacaacgacaagtgattcggagccttattcagtaagatgactgactactacacagctggtttgtccctgtacccaacctgttctcttgccaacaggaaggaatcggaatgtgtttggctccaaaaattcattgatatcaagctggaagcatgattggaggtgacatagattgcagctacctttacatctcaagtaaaattccagttacccctttttgagcctgtaaagttaattttccacaaggaaagatctgacgaacatcagaattgggatggctgtagattggaacattgaatgggccttgctcctgctgctatgctcgctattgtatctcttttatgagctaatggagtagcagtgaatgtgtgccttcaacttcactgttttctctccagtcattgactctgatgttactgctgtaaaacaagtaggactaaggcatagtttcagttgaatagcgtttttgccggattctgctgactcacttatacgactgtaatttgatggttcatagttttggctggacatgctgtcttggataattattcaagccttgtggtagaatagttctttaggccaaagatgtgctaggtagaatttcgaaagtgaataatgttggatgtattgggttaaggatggcaggtgtacatgatatcctactccagaacaggttcgctaaatactgtggtacaatcaaaaaacattcttgctcttgttaggattgtaatatctttcactaaattacacatgtctgcaaaacagattcatgagatgtgaaaacaatacacaggtcatggctactcaatctacgatgcagaatcatttgttcaaccagtgcgcctttac

SEQ ID NO: 72372 - DNA, 1706 bp, Zea Mays
ccatgaatgccatgagtggccgcaacaataatcttggtcttggaggagtatctttcattgaagtgataccaacaatctagggtaacgtgccctactttgccacatacttggcagatcttgttagtgtgctgggattgtgagcgtccattagacgaggagaaagacacacattgatggctacgaccactaggaccatgacgccctctgccccgaccatggccacgacacagttgttgctttcgtgaccttgaccagcaacattagcagaagcttgatgacctccatgaagtagatccatactgacattgaagctgggaggtggctacagtcacggtgacctgctcaacatgggccaccagagttgagactaccagattgtactcttcatctagtcccaccaggatgtacgagaagagttcttcatctatgtttttctttgtagatgtcatctcatatacaagaggcttcattttggtaacatattctagcatagtcatgccacctagggggtcctgtaggttgaaacttgacttatgacttcttgagtcatggaggtcatgaggaaaccgaagacttgctgctcaagtcccacccaccgaccccgtaggttgaaacttgacttatgacttcttgagtcatggaggtcatgaggaaacagaggacttgctgctcaagcgccacccaccgggtgtacttcggattgggtttccctagcgaatcttcgtcgcctttcttggtgttgatcttctcttctggtgtaacaactgagccatcgaggtagccctgcagctgcgcacccccaatgttaggtagaacttgcaccttccagagcgtggagttgttcttggtaaggttcaccaccacagattttcctagtaggggcgttggcacaacagagtctgaggtagacgctatggagacttgctgttgccgtcagctagggttctagaggtgggtgcaggagttggttctgattaccatgtaaaaaacacaacaccaagtttaagctgtttgccctgacctattaggccgaaggggactgaatatatatagggcagttaattgtcatcaggattgcaacatgatatggaatccaacttgggtacagttgccttaaccgactcctattctaactctgctatctctgggacagatcaaaacctgatcctattgtatcttttaattatagttgtttaaggtctttctctattatggccctgtttggtccagcttatttcacatcttcacagatttaggaagaagctgtaccaaacatgacacttctgcagtagcttatcagttcaactgtttcttagaatgaactaaaaacagacaataatcagaagctgcttttcaccagcttcttagataagctgcttttccaacaagcaacagctgtggcaaacagggcctatagaacaatcatgtggaccccagatctgatatggccgtaacttgatatacaagcacattctattctaacactctcttatctttatgattagttaatgtgatataagcaagcttgctttccctgtctgtttgccttgcaattacttgaacctggattgaaaaatggaatgcgttgcgtcttgtttgttgaccccactaacagtgtttcttgtatttctaggttctgttcttgcatgaattttgcacacttagcaagagtctaccagttgttcagcaactgcgactgtttcggt

SEQ ID NO: 72373 - DNA, 284 bp, Zea Mays
atcagtctatctcgacccattcccgcgagccgtcccccttccctcttcatccgctcgctccgtctcccgcgctcctgccatcccctccggccactccgaccttccatggagggagattccttgcccggtgggaatcttagggctgatttgaagactgccggcaaagatccatcgaggaggcggcgattccatcccgaatcacgacatccggcctaagcgaaggagctgaataggcgcgcatcaccctcgtcgtcctagccgtcaccggctccttgctagtcccc

SEQ ID NO: 72374 - DNA, 968 bp, Zea Mays
atcagtctatctcgacccattcccgcgagccgtcccccttccctcttcatccgctcgctccgtctcccgcgctcctgccatcccctccggccactccgaccttccatggagggagattccttgcccggtgggaatcttagggctgatttgaagactgccggcaaagatccatcgaggaggcggcgattccatcccgaatcacgacatccggcctaagcgaaggagctgaataggcgcgcatcaccctcgtcgtcctagccgtcaccggctccatttgaatgtgccttcagttgctagtccccgaaccctatccctctgccgtcctcaaggtgcaggtccacctgatgcgacacaactcgcctaccgagctcgacgtcccatcgtcggcttcctctctccagggtccaggataatctaaagtaacgacgagcaaatagaagatcggtggatctcagaaaaatctgttgtcgtatctgcttaaacaaaatggagcttccattgggtttgctgggagttatttcttgtcacttggaagaacatcaaacgtcgttgcaggaaaacccagcactgaaaatgaaggctcggaagaaaaaacatagaccaaagataatcagagagaataagctagccaaagtcagaaggatcacctgaaggctagcgcgtggagtccctggctcaaggctggcgcgtggagtccttggcgcgtggagtccctggctggctgaaggtggctgaaggctggcgcgtggagtccctggcgcgtcgagtccaattatttgatggctttaaagcaccggtagcagtaacactttgggtctaatcactttgtgtctaatctagaagccattaatagttgtatgtactagtataggcatgcagacaacaattggaaaattgtatgattcatgtgatcattttccttgtattcttttctattgttggttatataccagattttagaagattct

SEQ ID NO: 72375 - DNA, 2587 bp, Zea Mays
cgagccgcgagcattttgtccagccctagtcgagagcgagccaaaaactcgaactgttcaaaccccgccagcccttccgctcccacgacccaaccccactgcccggagcccccgagccttctcgaatcttgcgagaaccccaggggcgaggagcagatgtcggcgaggctacgggtggcggagctccgcgcggagcttcagcgccgcggcctcgatgtatccggcaccaagcctgctctcgtgcggaggctggacgccgcaatttgcgaggcggagaaggccgtggtggctgctgcgccaaccagtgtggcaaatgggtatgacgtagccgtagatggcaaaaggaacggcgggaataataagaggaaaaggtccggggatgggggtgaagagggaaacggcgatacgtgtacagatgtgacaaaactagagggcatgagctatcgtgagctgcagggattggccaaggcacgtggagttgcggcaaatgggggcaagaaagatgttatccagaggttgctctcggcgactgctgatcctgctgcagttgcagatggtggtcctcagggcgaaaaggaagtcataaaaggtggtgatgaggaggttgaggtgaaaaaggagaagatggttactgccacgaagaagggagctgcagtgctggatcagcacattcccgatcacataaaagtgaactatcatgtcttgcaagtgggcgatgaaatctatgatgccaccttgaaccagactaatgttggagacaacaacaataagttctatatcattcaagttttagaatctgatgctggtggaagctttatggtttacaatagatggggaagagttggggtacgaggtcaagataaactacatggtcccttcccaacacgagaccaagcaatatatgaatttgaggggaagttccacaacaaaaccaataatcattggtctgatcgcaagaacttcaaatgttatgcaaagaaatacacttggcttgaaatggattatggtgaaactgagaaagaaatagagaaaggttccattactgatcagataaaagagacaaaacttgaaactagaattgcgcagttcatatccctgatctgcaatattagcatgatgaagcaaagaatggtggaaataggttataatgctgaaaagcttccccttggaaagctaaggaaagctacaatacttaagggttatcatgttttgaaaaggatatccgatgttatttcaaaggcggacaggagacatcttgagcaattgactggggaattctacaccgtgattcctcatgactttggtttcagaaagatgcgtgaatttattatcgatactcctcagaaactaaaagctaagctggagatggttgaagcccttggtgagattgaaattgcaactaaacttttggaggatgattcaagtgaccaggatgatccgttgtatgctcgatacaagcaacttcattgtgatttcacacctcttgaagctgattcagatgagtactctatgataaaatcatatttgagaaatacacatggaaaaacacactctggttatacggtggacatagtgcaaatatttaaggtttcaaggcatggtgaaacagagcgatttcaaaaatttgctagtacaagaaataggatgcttttgtggcatggttctcggttgagcaactgggctgggatcctttctcagggtctgcgaatcgctcctcctgaagcacctgttactggttacatgtttggcaagggtgtttactttgctgacatgttttcaaagagtgcaaactattgctacgcctctgaagcatgtagatctggagtactgcttttatgtgaggttgcattgggcgatatgaatgagctactgaatgcagattacgatgctaataacctgcccaaaggaaaattaagtaccaagggagttggtcaaacagcacctaacatggtcgagtctaaggtcgctgacgatggtgttgttgttccccttggcgaacccaaacaggaaccttccaaaaggggtggcttgctttataatgagtacatagtgtacaacgtagaccagataagaatgcggtatgtcttacatgttaacttcaatttcaagagacggtagatgttgcaaagagctgaaactgttgctgagatcttagcagaacatatgtggacttatagcaccaggtgccctcagcctcattttctgagcaaatttggtagcctttgcatttcgattttggtttcaggcttctagccccattgatgattgatactgagtgtatatatgaaccattgatatccaccttccatgtacttaagtttttttaacatgtcccatgcatataaatctgatgaagcatatagcactaatacgattctaacttgagaatgtattttgtgcacaagatctctttcatgcatcaatgcacaaaatcaatcttgatcctccatccaacatcctttggcttagaccgtctccagtagagtttgtaaaatatgggacttagaattgtagatgatactgtttacagagagaaatttaaaatagagctccatatatgtagctacatatttgaaaaaaaaccgtg

SEQ ID NO: 72376 - DNA, 1275 bp, Zea Mays
tcgagagcgagccaaaaactcgaactgttcaaaccccgccagcccttccgctcccacgacccaaccccactgcccggagcccccgagccttctcgaatcttgcgagaaccccaggggcgaggagcagatgtcggcgaggctacgggtggcggagctccgcgcggagcttcagcgccgcggcctcgatgtatccggcaccaagcctgctctcgtgcggaggctggacgccgcaatttgcgaggcggagaaggccgtggtggctgctgcgccaaccagtgtggcaaatgggtatgacgtagccgtagatggcaaaaggaacggcgggaataataagaggaaaaggtccggggatgggggtgaagagggaaacggcgatacgtgtacagatgtgacaaaactagagggcatgagctatcgtgagctgcagggattggccaaggcacgtggagttgcggcaaatgggggcaagaaagatgttatccagaggttgctctcggcgactgctgatcctgctgcagttgcagatggtggtcctcagggcgaaaaggaagtcataaaaggtggtgatgaggaggttgaggtgaaaaaggagaagatggttactgccacgaagaagggagctgcagtgctggatcagcacattcccgatcacataaaagtgaactatcatgtcttgcaagtgggcgatgaaatctatgatgccaccttgaaccagactaatgttggagacaacaacaataagttctatatcattcaagttttagaatctgatgctggtggaagctttatggtttacaatagatggggaagagttggggtacgaggtcaagataaactacatggtcccttcccaacacgagaccaagcaatatatgaatttgaggggaagttccacaacaaaaccaataatcattggtctgatcgcaagaacttcaaatgttatgcaaagaaatacacttggcttgaaatggattatggtgaaactgagaaagaaatagagaaaggttccattactgatcagataaaagagacaaaacttgaaactagaattgcgcagttcatatccctgatctgcaatattagcatgatgaagcaaagaatggtggaaataggttataatgctgaaaagcttccccttggaaagctaaggaaagctacaatacttaagggttatcatgttttgaaaaggatatccgatgttatttcaaaggcggacaggagacatcttgagcaattgactggtaggcctgggcggctgtgcctaatgggccttaa

SEQ ID NO: 72377 - DNA, 1324 bp, Zea Mays
tcgagagcgagccaaaaactcgaactgttcaaaccccgccagcccttccgctcccacgacccaaccccactgcccggagcccccgagccttctcgaatcttgcgagaaccccaggggcgaggagcagatgtcggcgaggctacgggtggcggagctccgcgcggagcttcagcgccgcggcctcgatgtatccggcaccaagcctgctctcgtgcggaggctggacgccgcaatttgcgaggcggagaaggccgtggtggctgctgcgccaaccagtgtggcaaatgggtatgacgtagccgtagatggcaaaaggaacggcgggaataataagaggaaaaggtccggggatgggggtgaagagggaaacggcgatacgtgtacagatgtgacaaaactagagggcatgagctatcgtgagctgcagggattggccaaggcacgtggagttgcggcaaatgggggcaagaaagatgttatccagaggttgctctcggcgactgctgatcctgctgcagttgcagatggtggtcctcagggcgaaaaggaagtcataaaaggtggtgatgaggaggttgaggtgaaaaaggagaagatggttactgccacgaagaagggagctgcagtgctggatcagcacattcccgatcacataaaagtgaactatcatgtcttgcaagtgggcgatgaaatctatgatgccaccttgaaccagactaatgttggagacaacaacaataagttctatatcattcaagttttagaatctgatgctggtggaagctttatggtttacaatagatggggaagagttggggtacgaggtcaagataaactacatggtcccttcccaacacgagaccaagcaatatatgaatttgaggggaagttccacaacaaaaccaataatcattggtctgatcgcaagaacttcaaatgttatgcaaagaaatacacttggcttgaaatggattatggtgaaactgagaaagaaatagagaaaggttccattactgatcagataaaagagacaaaacttgaaactagaattgcgcagttcatatccctgatctgcaatattagcatgatgaagcaaagaatggtggaaataggttataatgctgaaaagcttccccttggaaagctaaggaaagctacaatacttaagggttatcatgttttgaaaaggatatccgatgttatttcaaaggcggacaggagacatcttgagcaattgactggggaattctacaccgtgattcctcatgactttggtttcagaaagatgcgggacaagtggagatgggacttgatgatactcttt

SEQ ID NO: 72378 - DNA, 2791 bp, Zea Mays
tcgagagcgagccaaaaactcgaactgttcaaaccccgccagcccttccgctcccacgacccaaccccactgcccggagcccccgagccttctcgaatcttgcgagaaccccaggggcgaggagcagatgtcggcgaggctacgggtggcggagctccgcgcggagcttcagcgccgcggcctcgatgtatccggcaccaagcctgctctcgtgcggaggctggacgccgcaatttgcgaggcggagaaggccgtggtggctgctgcgccaaccagtgtggcaaatgggtatgacgtagccgtagatggcaaaaggaacggcgggaataataagaggaaaaggtccggggatgggggtgaagagggaaacggcgatacgtgtacagatgtgacaaaactagagggcatgagctatcgtgagctgcagggattggccaaggcacgtggagttgcggcaaatgggggcaagaaagatgttatccagaggttgctctcggcgactgctgatcctgctgcagttgcagatggtggtcctcagggcgaaaaggaagtcataaaaggtggtgatgaggaggttgaggtgaaaaaggagaagatggttactgccacgaagaagggagctgcagtgctggatcagcacattcccgatcacataaaagtgaactatcatgtcttgcaagtgggcgatgaaatctatgatgccaccttgaaccagactaatgttggagacaacaacaataagttctatatcattcaagttttagaatctgatgctggtggaagctttatggtttacaatagatggggaagagttggggtacgaggtcaagataaactacatggtcccttcccaacacgagaccaagcaatatatgaatttgaggggaagttccacaacaaaaccaataatcattggtctgatcgcaagaacttcaaatgttatgcaaagaaatacacttggcttgaaatggattatggtgaaactgagaaagaaatagagaaaggttccattactgatcagataaaagagacaaaacttgaaactagaattgcgcagttcatatccctgatctgcaatattagcatgatgaagcaaagaatggtggaaataggttataatgctgaaaagcttccccttggaaagctaaggaaagctacaatacttaagggttatcatgttttgaaaaggatatccgatgttatttcaaaggcggacaggagacatcttgagcaattgactggggaattctacaccgtgattcctcatgactttggtttcagaaagatgcgtgaatttattatcgatactcctcagaaactaaaagctaagctggagatggttgaagcccttggtgagattgaaattgcaactaaacttttggaggatgattcaagtgaccaggatgatccgttgtatgctcgatacaagcaacttcattgtgatttcacacctcttgaagctgattcagatgagtactctatgataaaatcatatttgagaaatacacatggaaaaacacactctggttatacggtggacatagtgcaaatatttaaggtttcaaggcatggtgaaacagagcgatttcaaaaatttgctagtacaagaaataggatgcttttgtggcatggttctcggttgagcaactgggctgggatcctttctcagggtctgcgaatcgctcctcctgaagcacctgttactggttacatgtttggcaagggtgtttactttgctgacatgttttcaaagagtgcaaactattgctacgcctctgaagcatgtagatctggagtactgcttttatgtgaggtctgtcgcctactgaatattcatgcatgattttacaagcttcagattgtgtgctatttttctgtttgttacagggttgattgtcatatgtgcatgtcccaattattttgtttgttacactagttactttgtcatattgagacgggttctgcccgattattttgttgtaagggatttgctgagttcatggtaaatgcagactacgagtgggctatttaacttcaatttgccaggttgcattgggcgatatgaatgagctactgaatgcagattacgatgctaataacctgcccaaaggaaaattaagtaccaagggagttggtcaaacagcacctaacatggtcgagtctaaggtcgctgacgatggtgttgttgttccccttggcgaacccaaacaggaaccttccaaaaggggtggcttgctttataatgagtacatagtgtacaacgtagaccagataagaatgcggtatgtcttacatgttaacttcaatttcaagagacggtagatgttgcaaagagctgaaactgttgctgagatcttagcagaacatatgtggacttatagcaccaggtgccctcagcctcattttctgagcaaatttggtagcctttgcatttcgattttggtttcaggcttctagccccattgatgattgatactgagtgtatatatgaaccattgatatccaccttccatgtacttaagtttttttaacatgtcccatgcatataaatctgatgaagcatatagcactaatacgattctaacttgagaatgtattttgtgcacaagatctctttcatgcatcaatgcacaaaatcaatcttgatcctccatccaacatcctttggcttagaccgtctccagtagagtttgtaaaatatgggacttagaattgtagatgatactgtttacagagagaaatttaaaatagagctccatatatgtagctacatatttgaaaaaaaaccgtg

SEQ ID NO: 72379 - DNA, 2342 bp, Zea Mays
tcgagagcgagccaaaaactcgaactgttcaaaccccgccagcccttccgctcccacgacccaaccccactgcccggagcccccgagccttctcgaatcttgcgagaaccccaggggcgaggagcagatgtcggcgaggctacgggtggcggagctccgcgcggagcttcagcgccgcggcctcgatgtatccggcaccaagcctgctctcggattggccaaggcacgtggagttgcggcaaatgggggcaagaaagatgttatccagaggttgctctcggcgactgctgatcctgctgcagttgcagatggtggtcctcagggcgaaaaggaagtcataaaaggtggtgatgaggaggttgaggtgaaaaaggagaagatggttactgccacgaagaagggagctgcagtgctggatcagcacattcccgatcacataaaagtgaactatcatgtcttgcaagtgggcgatgaaatctatgatgccaccttgaaccagactaatgttggagacaacaacaataagttctatatcattcaagttttagaatctgatgctggtggaagctttatggtttacaatagatggggaagagttggggtacgaggtcaagataaactacatggtcccttcccaacacgagaccaagcaatatatgaatttgaggggaagttccacaacaaaaccaataatcattggtctgatcgcaagaacttcaaatgttatgcaaagaaatacacttggcttgaaatggattatggtgaaactgagaaagaaatagagaaaggttccattactgatcagataaaagagacaaaacttgaaactagaattgcgcagttcatatccctgatctgcaatattagcatgatgaagcaaagaatggtggaaataggttataatgctgaaaagcttccccttggaaagctaaggaaagctacaatacttaagggttatcatgttttgaaaaggatatccgatgttatttcaaaggcggacaggagacatcttgagcaattgactggggaattctacaccgtgattcctcatgactttggtttcagaaagatgcgtgaatttattatcgatactcctcagaaactaaaagctaagctggagatggttgaagcccttggtgagattgaaattgcaactaaacttttggaggatgattcaagtgaccaggatgatccgttgtatgctcgatacaagcaacttcattgtgatttcacacctcttgaagctgattcagatgagtactctatgataaaatcatatttgagaaatacacatggaaaaacacactctggttatacggtggacatagtgcaaatatttaaggtttcaaggcatggtgaaacagagcgatttcaaaaatttgctagtacaagaaataggatgcttttgtggcatggttctcggttgagcaactgggctgggatcctttctcagggtctgcgaatcgctcctcctgaagcacctgttactggttacatgtttggcaagggtgtttactttgctgacatgttttcaaagagtgcaaactattgctacgcctctgaagcatgtagatctggagtactgcttttatgtgaggttgcattgggcgatatgaatgagctactgaatgcagattacgatgctaataacctgcccaaaggaaaattaagtaccaagggagttggtcaaacagcacctaacatggtcgagtctaaggtcgctgacgatggtgttgttgttccccttggcgaacccaaacaggaaccttccaaaaggggtggcttgctttataatgagtacatagtgtacaacgtagaccagataagaatgcggtatgtcttacatgttaacttcaatttcaagagacggtagatgttgcaaagagctgaaactgttgctgagatcttagcagaacatatgtggacttatagcaccaggtgccctcagcctcattttctgagcaaatttggtagcctttgcatttcgattttggtttcaggcttctagccccattgatgattgatactgagtgtatatatgaaccattgatatccaccttccatgtacttaagtttttttaacatgtcccatgcatataaatctgatgaagcatatagcactaatacgattctaacttgagaatgtattttgtgcacaagatctctttcatgcatcaatgcacaaaatcaatcttgatcctccatccaacatcctttggcttagaccgtctccagtagagtttgtaaaatatgggacttagaattgtagatgatactgtttacagagagaaatttaaaatagagctccatatatgtagctacatatttgaaaaaaaaccgtg

SEQ ID NO: 72380 - DNA, 772 bp, Zea Mays
aagtcatagactttcaaaatatcaatgataactgtcagtatgttcctgttgccatacatggtatggtcttcaatatcgtaacgattgattatggttgtttgccaatctcaaggtatgaactaatttattggaaatattgatagctgttctattcttgaattgtagggaattctacaccgtgattcctcatgactttggtttcagaaagatgcgtgaatttattatcgatactcctcagaaactaaaagctaagctggagatggttgaagcccttggtgagattgaaattgcaactaaacttttggaggatgattcaagtgaccaggatgatccgttgtatgctcgatacaagcaacttcattgtgatttcacacctcttgaagctgattcagatgagtactctatgataaaatcatatttgagaaatacacatggaaaaacacactctggttatacggtggacatagtgcaaatatttaaggtttcaaggcatggtgaaacagagcgatttcaaaaatttgctagtacaagaaataggatgcttttgtggcatggttctcggttgagcaactgggctgggatcctttctcagggtctgcgaatcgctcctcctgaagcacctgttactggttacatgtttggcaagggtgtttactttgctgacatgttttcaaagagtgcaaactattgctacgcctctgaagcatgtagatctggagtactgcttttatgtgagggatttgctgagttcatggtaaatgcagactacgag

SEQ ID NO: 72381 - DNA, 3604 bp, Zea Mays
gaaatatagttaaaaaagaaaaattccgaaaacatttgaatctgcctgagaaaagtggagctcaccccattcctcctactttctaccttttccacgtaaaaaactaatatctgcgagctctctcctctgcgtggtgtattttcaaatttgtgtgagcagaatcaaggccaccaatagccaacaggcaacagcagcggaacatctcgccttctctgaaagccatttcagaaccaccttcaaagttcgaactccatctcctccgcgtccgcaaaccaatccctagatcctctcgccctcgcaccaacccccaattcgatccaccccgtcccctatccgcctcgagtcccacccaattcggcgctagcctgatcggcattgcctgccggcctcgtcgtacagatctgagcgccgtctcgagcgccagatctcgccggctccgcgcctagcattccgccaggaccaggattcgcgcagcgccggcgccggcaccggcaccggcgcctgacgccaagttggcgcctcagaagcggtcccagcgtggcggcggcggaggtggcgcctccgccgccgccgcggcttcgtcagccgccgcgggggactccggcgacgccgttatggcgcggtggctgcagtccgcaggtctgcagcacctcgccgcgtcctcggccgcaggcggggccggggccggcgaccttcgcgttggtggcctgagtggcggtggcggcggcggccttctcccgagtcttctcatgcagggatatggaccacaaacaatcgaggagaaacagaagctttatacattattgaggagcctaaatgttaatggtggattagcatctgcatctatatccgagccctatacttcaacaggacagagctttgctggtggtgctcctgtagatggattttattcacctgaacttagaggtgaatttggggctggccttttggatcttcatgcaatggatgacagcgagcttctttctgagaatgctgcatcagaaccatttgagccttcgccttttatgccaaaagaaatggatgatgacgactacgatgtaatagcagaaaaccaacaaggtctagtagacaaccagagtgccttcaccaacgaaaaagaaaacactgtggtcagtgcaagagaaagtaatgtagcaaagattaaagtcgtggtaaggaaaagacctctgaacaaaaaggaggtatctcgaaaagaggaagacatcatagatgtacacaattctcaattcttaactgtccatgagcctaaactaaaggtggatttgacagcttatgtggaaaagcatgatttctgctttgacactgtcttgggcgagaatgtaactaatgatgaggtgtaccgtgagactgtggagcctattataccattaattttccaaaggacaaaagcgacatgctttgcatatggccaaacagtggcaagacctatacaatgcaacccctacctcttagagctgcacatgatatggtttgtcttttacatcaacctatgtatcggaatcaacatttcaagttatggcttagctactttgaaatttatggtggcaaactctttgatcttcttagcgaaaggaggcaactcttaatgagagaagacggaaagaaacaggtctgtattgttggtttacaggagttcgaggtttctgatgtccagattgtcaaagaatacattgagaaaggaaatgctgcaagaagcacaggcacaactggagccaatgaagagtcctcacgatctcatgctattctgcaattgtctgtgaaaaagcatatcccagttactgaaacccggagacagagagaccgagatgctattgaagcaaagaatacaaagcatgtggggaaaatgtcatttattgatcttgctggaagtgagcgtggtgctgatacaacagataatgacaaacaaacaagaattgaaggtgcagagatcaacaagagccttttggctctcaaggaatgtattcgggcactggataacgatcaaatacacattcctttcagaggaagcaagctaacagaggtgcttcgggactcctttgttggaaactcccgtacagtgatgatttcttgcgtttcaccaagttcaggttcatgtgaacacacactgaatacgttaagatatgctgacagggttaaaagtctttcaaaaggtggtaacacaaaaaaggagcagtttgctgtgcagtctgtatcatctggcaaggaatctacctacacatcgtaccctttatcatgtgaagctgaagagactatggagcagactcaagaaattaggcctgttgattcttctaggaaaggtgttgacagtttcacttccaattcttccattgagcctgagaaaaactcctattgtatgattccaagctatccacataaaggaaaagaagaaactagtactagatctggtttgaatgatagggagagaggggacttgaaatataaccaggctggttttaatagtaaaacacattcacttcaggaatcaataaattcacaagaagaggtgaaagtgacaaaagtctcaccaccccggagaaaagctaacagggatgagaaatcagaaaggcaggtcaactacatgaaaaaagaaagtgggcctgaaattagtcggactggtgttaagcagcaacagcaacttaaacagctgcaaaggccatcatcaacctcatcgtcgcaggttttatccaagcaatctgagaaggaagatatggaaataaacacaatacttgaggaagaggcgctgatagcagctcacagaaaggaaattgaaagtacaatggagatagtacgagaagagatgaatctattagcagaggtcgatcagccaggtagtcttattgacaactacgtggcacagctaagctttctgttgtcgcggaaggcttctggtttggtaagccttcaggcacgcttggcacggtttcagcagcgcctcaaggaacaggagattcttagccgtcaaaaaccattgagatagtttaaaccgcccaaaatggaaacctttcggtttgtcgttgatcgcgagaagcctcggatactggaaactgccatcgattgcgacagcctcggatcatggcctccaacatcgccttttagggatctaagggtgaaaggatgggagatggaaatgtgggctgatgaagtgcgcattcattattgattttgaggttttatgaaccagtttactaatttttcttttactgaaaagggtgcttgagtgtattttctatcgatgtcatgggtttgtcaacgtttgccattttcttttgtacgagtatagttgtaactgttgttcgaataccggtagtgaagtgctgcgagtgaggaaataaccttgccttgccgttatggtgttgtatcttttgttgatatttatttcgcatcaacaaaagaaaagcagcgttcgataaatgtctacaggatttgctttgtaccttgggggtgccctgtttattgtgactacaagtctgtgatatgcattttttatacctttattttttgtacctttttctgattgaatccgaaatccacacaacacccgaagccaaatgtcagacaaaaatagtgctcaggcaaaaaaaaa

SEQ ID NO: 72382 - DNA, 3478 bp, Zea Mays
gcaacagcagcggaacatctcgccttctctgaaagccatttcagaaccaccttcaaagttcgaactccatctcctccgcgtccgcaaaccaatccctagatcctctcgccctcgcaccaacccccaattcgatccaccccgtcccctatccgcctcgagtcccacccaattcggcgctagcctgatcggcattgcctgccggcctcgtcgtacagatctgagcgccgtctcgagcgccagatctcgccggctccgcgcctagcattccgccaggaccaggattcgcgcagcgccggcgccggcaccggcaccggcgcctgacgccaagttggcgcctcagaagcggtcccagcgtggcggcggcggaggtggcgcctccgccgccgccgcggcttcgtcagccgccgcgggggactccggcgacgccgttatggcgcggtggctgcagtccgcaggtctgcagcacctcgccgcgtcctcggccgcaggcggggccggggccggcgaccttcgcgttggtggcctgagtggcggtggcggcggcggccttctcccgagtcttctcatgcagggatatggaccacaaacaatcgaggagaaacagaagctttatacattattgaggagcctaaatgttaatggtggattagcatctgcatctatatccgagccctatacttcaacaggacagagctttgctggtggtgctcctgtagatggattttattcacctgaacttagaggtgaatttggggctggccttttggatcttcatgcaatggatgacagcgagcttctttctgagaatgctgcatcagaaccatttgagccttcgccttttatgccaaaagaaatggatgatgacgactacgatgtaatagcagaaaaccaacaaggtctagtagacaaccagagtgccttcaccaacgaaaaagaaaacactgtggtcagtgcaagagaaagtaatgtagcaaagattaaagtcgtggtaaggaaaagacctctgaacaaaaaggaggtatctcgaaaagaggaagacatcatagatgtacacaattctcaattcttaactgtccatgagcctaaactaaaggtggatttgacagcttatgtggaaaagcatgatttctgctttgacactgtcttgggcgagaatgtaactaatgatgaggtgtaccgtgagactgtggagcctattataccattaattttccaaaggacaaaagcgacatgctttgcatatggccaaacaggcagtggcaagacctatacaatgcaacccctacctcttagagctgcacatgatatggtttgtcttttacatcaacctatgtatcggaatcaacatttcaagttatggcttagctactttgaaatttatggtggcaaactctttgatcttcttagcgaaaggaggcaactcttaatgagagaagacggaaagaaacaggtctgtattgttggtttacaggagttcgaggtttctgatgtccagattgtcaaagaatacattgagaaaggaaatgctgcaagaagcacaggcacaactggagccaatgaagagtcctcacgatctcatgctattctgcaattgtctgtgaaaaagcatatcccagttactgaaacccggagacagagagaccgagatgctattgaagcaaagaatacaaagcatgtggggaaaatgtcatttattgatcttgctggaagtgagcgtggtgctgatacaacagataatgacaaacaaacaagaattgaaggtgcagagatcaacaagagccttttggctctcaaggaatgtattcgggcactggataacgatcaaatacacattcctttcagaggaagcaagctaacagaggtgcttcgggactcctttgttggaaactcccgtacagtgatgatttcttgcgtttcaccaagttcaggttcatgtgaacacacactgaatacgttaagatatgctgacagggttaaaagtctttcaaaaggtggtaacacaaaaaaggagcagtttgctgtgcagtctgtatcatctggcaaggaatctacctacacatcgtaccctttatcatgtgaagctgaagagactatggagcagactcaagaaattaggcctgttgattcttctaggaaaggtgttgacagtttcacttccaattcttccattgagcctgagaaaaactcctattgtatgattccaagctatccacataaaggaaaagaagaaactagtactagatctggtttgaatgatagggagagaggggacttgaaatataaccaggctggttttaatagtaaaacacattcacttcaggaatcaataaattcacaagaagaggtgaaagtgacaaaagtctcaccaccccggagaaaagctaacagggatgagaaatcagaaaggcaggtcaactacatgaaaaaagaaagtgggcctgaaattagtcggactggtgttaagcagcaacagcaacttaaacagctgcaaaggccatcatcaacctcatcgtcgcaggttttatccaagcaatctgagaaggaagatatggaaataaacacaatacttgaggaagaggcgctgatagcagctcacagaaaggaaattgaaagtacaatggagatagtacgagaagtaagttcaagttactcagttgtatttaaatgtcaccacagatgtcagtgtttggagatgaatctattagcagaggtcgatcagccaggtagtcttattgacaactacgtggcacagctaagctttctgttgtcgcggaaggcttctggtttggtaagccttcaggcacgcttggcacggtttcagcagcgcctcaaggaacaggagattcttagccgtcaaaaaccattgagatagtttaaaccgcccaaaatggaaacctttcggtttgtcgttgatcgcgagaagcctcggatactggaaactgccatcgattgcgacagcctcggatcatggcctccaacatcgccttttagggatctaagggtgaaaggatgggagatggaaatgtgggctgatgaagtgcgcattcattattgattttgaggttttatgaaccagtttactaatttttcttttactgaaaagggtgcttgagtgtattttctatcgatgtcatgggtttgtcaacgtttgccattttcttttgtacgagtatagttgtaactgttgttcgaataccggtagtgaagtgctgcgagtgaggaaataaccttgccttgccgttatggtgttgtatcttttgttgatatttatttcgcatcaacaaaagaaaagcagcgttcgataaatgtctacaggatttgctttgtaccttgggggtgccctgtttattgtgactacaagtctgtgatatgcattttttatacctttattttttgtacctttttctgattgaatccgaaatccacacaacacccgaagccaaatgtcagacaaaaatagtgctcaggcaaaaaaaaa

SEQ ID NO: 72383 - DNA, 3234 bp, Zea Mays
agcggaacatctcgccttctctgaaagccatttcagaaccaccttcaaagttcgaactccatctcctccgcgtccgcaaaccaatccctagatcctctcgccctcgcaccaacccccaattcgatccaccccgtcccctatccgcctcgagtcccacccaattcggcgctagcctgatcggcattgcctgccggcctcgtcgtacagatctgagcgccgtctcgagcgccagatctcgccggctccgcgcctagcattccgccaggaccaggattcgcgcagcgccggcgccggcaccggcaccggcgcctgacgccaagttggcgcctcagaagcggtcccagcgtggcggcggcggaggtggcgcctccgccgccgccgcggcttcgtcagccgccgcgggggactccggcgacgccgttatggcgcggtggctgcagtccgcaggtctgcagcacctcgccgcgtcctcggccgcaggcggggccggggccggcgaccttcgcgttggtggcctgagtggcggtggcggcggcggccttctcccgagtcttctcatgcagggatatggaccacaaacaatcgaggagaaacagaagctttatacattattgaggagcctaaatgttaatggtggattagcatctgcatctatatccgagccctatacttcaacaggacagagctttgctggtggtgctcctgtagatggattttattcacctgaacttagaggtgaatttggggctggccttttggatcttcatgcaatggatgacagcgagcttctttctgagaatgctgcatcagaaccatttgagccttcgccttttatgccaaaagaaatggatgatgacgactacgatgtaatagcagaaaaccaacaaggtctagtagacaaccagagtgccttcaccaacgaaaaagaaaacactgtggtcagtgcaagagaaagtaatgtagcaaagattaaagtcgtggtaaggaaaagacctctgaacaaaaaggaggtatctcgaaaagaggaagacatcatagatgtacacaattctcaattcttaactgtccatgagcctaaactaaaggtggatttgacagcttatgtggaaaagcatgatttctgctttgacactgtcttgggcgagaatgtaactaatgatgaggtgtaccgtgagactgtggagcctattataccattaattttccaaaggacaaaagcgacatgctttgcatatggccaaacaggcagtggcaagacctatacaatgcaacccctacctcttagagctgcacatgatatggtttgtcttttacatcaacctatgtatcggaatcaacatttcaagttatggcttagctactttgaaatttatggtggcaaactctttgatcttcttagcgaaaggaggcaactcttaatgagagaagacggaaagaaacaggtctgtattgttggtttacaggagttcgaggtttctgatgtccagattgtcaaagaatacattgagaaaggaaatgctgcaagaagcacaggcacaactggagccaatgaagagtcctcacgatctcatgctattctgcaattgtctgtgaaaaagcatatcccagttactgaaacccggagacagagagaccgagatgctattgaagcaaagaatacaaagcatgtggggaaaatgtcatttattgatcttgctggaagtgagcgtggtgctgatacaacagataatgacaaacaaacaagaattgaaggtgcagagatcaacaagagccttttggctctcaaggaatgtattcgggcactggataacgatcaaatacacattcctttcagaggaagcaagctaacagaggtgcttcgggactcctttgttggaaactcccgtacagtgatgatttcttgcgtttcaccaagttcaggttcatgtgaacacacactgaatacgttaagatatgctgacagggttaaaagtctttcaaaaggtggtaacacaaaaaaggagcagtttgctgtgcagtctgtatcatctggcaaggaatctacctacacatcgtaccctttatcatgtgaagctgaagagactatggagcagactcaagaaattaggcctgttgattcttctaggaaaggaatcaataaattcacaagaagaggtgaaagtgacaaaagtctcaccaccccggagaaaagctaacagggatgagaaatcagaaaggcaggtcaactacatgaaaaaagaaagtgggcctgaaattagtcggactggtgttaagcagcaacagcaacttaaacagctgcaaaggccatcatcaacctcatcgtcgcaggttttatccaagcaatctgagaaggaagatatggaaataaacacaatacttgaggaagaggcgctgatagcagctcacagaaaggaaattgaaagtacaatggagatagtacgagaagagatgaatctattagcagaggtcgatcagccaggtagtcttattgacaactacgtggcacagctaagctttctgttgtcgcggaaggcttctggtttggtaagccttcaggcacgcttggcacggtttcagcagcgcctcaaggaacaggagattcttagccgtcaaaaaccattgagatagtttaaaccgcccaaaatggaaacctttcggtttgtcgttgatcgcgagaagcctcggatactggaaactgccatcgattgcgacagcctcggatcatggcctccaacatcgccttttagggatctaagggtgaaaggatgggagatggaaatgtgggctgatgaagtgcgcattcattattgattttgaggttttatgaaccagtttactaatttttcttttactgaaaagggtgcttgagtgtattttctatcgatgtcatgggtttgtcaacgtttgccattttcttttgtacgagtatagttgtaactgttgttcgaataccggtagtgaagtgctgcgagtgaggaaataaccttgccttgccgttatggtgttgtatcttttgttgatatttatttcgcatcaacaaaagaaaagcagcgttcgataaatgtctacaggatttgctttgtaccttgggggtgccctgtttattgtgactacaagtctgtgatatgcattttttatacctttattttttgtacctttttctgattgaatccgaaatccacacaacacccgaagccaaatgtcagacaaaaatagtgctcaggcaaaaaaaaa

SEQ ID NO: 72384 - DNA, 2899 bp, Zea Mays
ctaactgctaaggaagtaactagaaagtgagcttacacattgcatgggatatggaccacaaacaatcgaggagaaacagaagctttatacattattgaggagcctaaatgttaatggtggattagcatctgcatctatatccgagccctatacttcaacaggacagagctttgctggtggtgctcctgtagatggattttattcacctgaacttagaggtgaatttggggctggccttttggatcttcatgcaatggatgacagcgagcttctttctgagaatgctgcatcagaaccatttgagccttcgccttttatgccaaaagaaatggatgatgacgactacgatgtaatagcagaaaaccaacaaggtctagtagacaaccagagtgccttcaccaacgaaaaagaaaacactgtggtcagtgcaagagaaagtaatgtagcaaagattaaagtcgtggtaaggaaaagacctctgaacaaaaaggaggtatctcgaaaagaggaagacatcatagatgtacacaattctcaattcttaactgtccatgagcctaaactaaaggtggatttgacagcttatgtggaaaagcatgatttctgctttgacactgtcttgggcgagaatgtaactaatgatgaggtgtaccgtgagactgtggagcctattataccattaattttccaaaggacaaaagcgacatgctttgcatatggccaaacaggcagtggcaagacctatacaatgcaacccctacctcttagagctgcacatgatatggtttgtcttttacatcaacctatgtatcggaatcaacatttcaagttatggcttagctactttgaaatttatggtggcaaactctttgatcttcttagcgaaaggaggcaactcttaatgagagaagacggaaagaaacaggtctgtattgttggtttacaggagttcgaggtttctgatgtccagattgtcaaagaatacattgagaaaggaaatgctgcaagaagcacaggcacaactggagccaatgaagagtcctcacgatctcatgctattctgcaattgtctgtgaaaaagcatatcccagttactgaaacccggagacagagagaccgagatgctattgaagcaaagaatacaaagcatgtggggaaaatgtcatttattgatcttgctggaagtgagcgtggtgctgatacaacagataatgacaaacaaacaagaattgaaggtgcagagatcaacaagagccttttggctctcaaggaatgtattcgggcactggataacgatcaaatacacattcctttcagaggaagcaagctaacagaggtgcttcgggactcctttgttggaaactcccgtacagtgatgatttcttgcgtttcaccaagttcaggttcatgtgaacacacactgaatacgttaagatatgctgacagggttaaaagtctttcaaaaggtggtaacacaaaaaaggagcagtttgctgtgcagtctgtatcatctggcaaggaatctacctacacatcgtaccctttatcatgtgaagctgaagagactatggagcagactcaagaaattaggcctgttgattcttctaggaaaggtgttgacagtttcacttccaattcttccattgagcctgagaaaaactcctattgtatgattccaagctatccacataaaggaaaagaagaaactagtactagatctggtttgaatgatagggagagaggggacttgaaatataaccaggctggttttaatagtaaaacacattcacttcaggaatcaataaattcacaagaagaggtgaaagtgacaaaagtctcaccaccccggagaaaagctaacagggatgagaaatcagaaaggcaggtcaactacatgaaaaaagaaagtgggcctgaaattagtcggactggtgttaagcagcaacagcaacttaaacagctgcaaaggccatcatcaacctcatcgtcgcaggttttatccaagcaatctgagaaggaagatatggaaataaacacaatacttgaggaagaggcgctgatagcagctcacagaaaggaaattgaaagtacaatggagatagtacgagaagagatgaatctattagcagaggtcgatcagccaggtagtcttattgacaactacgtggcacagctaagctttctgttgtcgcggaaggcttctggtttggtaagccttcaggcacgcttggcacggtttcagcagcgcctcaaggaacaggagattcttagccgtcaaaaaccattgagatagtttaaaccgcccaaaatggaaacctttcggtttgtcgttgatcgcgagaagcctcggatactggaaactgccatcgattgcgacagcctcggatcatggcctccaacatcgccttttagggatctaagggtgaaaggatgggagatggaaatgtgggctgatgaagtgcgcattcattattgattttgaggttttatgaaccagtttactaatttttcttttactgaaaagggtgcttgagtgtattttctatcgatgtcatgggtttgtcaacgtttgccattttcttttgtacgagtatagttgtaactgttgttcgaataccggtagtgaagtgctgcgagtgaggaaataaccttgccttgccgttatggtgttgtatcttttgttgatatttatttcgcatcaacaaaagaaaagcagcgttcgataaatgtctacaggatttgctttgtaccttgggggtgccctgtttattgtgactacaagtctgtgatatgcattttttatacctttattttttgtacctttttctgattgaatccgaaatccacacaacacccgaagccaaatgtcagacaaaaatagtgctcaggcaaaaaaaaa

SEQ ID NO: 72385 - DNA, 2977 bp, Zea Mays
gtcgattcccaaagacccggcgccctaagacgaagactactgtcactacccgcgcgtgttaataaagcaggcccgtgcagaactgccctgggtcgcctgaccccacttgtaagccacaacgcagggatatggaccacaaacaatcgaggagaaacagaagctttatacattattgaggagcctaaatgttaatggtggattagcatctgcatctatatccgagccctatacttcaacaggacagagctttgctggtggtgctcctgtagatggattttattcacctgaacttagaggtgaatttggggctggccttttggatcttcatgcaatggatgacagcgagcttctttctgagaatgctgcatcagaaccatttgagccttcgccttttatgccaaaagaaatggatgatgacgactacgatgtaatagcagaaaaccaacaaggtctagtagacaaccagagtgccttcaccaacgaaaaagaaaacactgtggtcagtgcaagagaaagtaatgtagcaaagattaaagtcgtggtaaggaaaagacctctgaacaaaaaggaggtatctcgaaaagaggaagacatcatagatgtacacaattctcaattcttaactgtccatgagcctaaactaaaggtggatttgacagcttatgtggaaaagcatgatttctgctttgacactgtcttgggcgagaatgtaactaatgatgaggtgtaccgtgagactgtggagcctattataccattaattttccaaaggacaaaagcgacatgctttgcatatggccaaacaggcagtggcaagacctatacaatgcaacccctacctcttagagctgcacatgatatggtttgtcttttacatcaacctatgtatcggaatcaacatttcaagttatggcttagctactttgaaatttatggtggcaaactctttgatcttcttagcgaaaggaggcaactcttaatgagagaagacggaaagaaacaggtctgtattgttggtttacaggagttcgaggtttctgatgtccagattgtcaaagaatacattgagaaaggaaatgctgcaagaagcacaggcacaactggagccaatgaagagtcctcacgatctcatgctattctgcaattgtctgtgaaaaagcatatcccagttactgaaacccggagacagagagaccgagatgctattgaagcaaagaatacaaagcatgtggggaaaatgtcatttattgatcttgctggaagtgagcgtggtgctgatacaacagataatgacaaacaaacaagaattgaaggtgcagagatcaacaagagccttttggctctcaaggaatgtattcgggcactggataacgatcaaatacacattcctttcagaggaagcaagctaacagaggtgcttcgggactcctttgttggaaactcccgtacagtgatgatttcttgcgtttcaccaagttcaggttcatgtgaacacacactgaatacgttaagatatgctgacagggttaaaagtctttcaaaaggtggtaacacaaaaaaggagcagtttgctgtgcagtctgtatcatctggcaaggaatctacctacacatcgtaccctttatcatgtgaagctgaagagactatggagcagactcaagaaattaggcctgttgattcttctaggaaaggtgttgacagtttcacttccaattcttccattgagcctgagaaaaactcctattgtatgattccaagctatccacataaaggaaaagaagaaactagtactagatctggtttgaatgatagggagagaggggacttgaaatataaccaggctggttttaatagtaaaacacattcacttcaggaatcaataaattcacaagaagaggtgaaagtgacaaaagtctcaccaccccggagaaaagctaacagggatgagaaatcagaaaggcaggtcaactacatgaaaaaagaaagtgggcctgaaattagtcggactggtgttaagcagcaacagcaacttaaacagctgcaaaggccatcatcaacctcatcgtcgcaggttttatccaagcaatctgagaaggaagatatggaaataaacacaatacttgaggaagaggcgctgatagcagctcacagaaaggaaattgaaagtacaatggagatagtacgagaagagatgaatctattagcagaggtcgatcagccaggtagtcttattgacaactacgtggcacagctaagctttctgttgtcgcggaaggcttctggtttggtaagccttcaggcacgcttggcacggtttcagcagcgcctcaaggaacaggagattcttagccgtcaaaaaccattgagatagtttaaaccgcccaaaatggaaacctttcggtttgtcgttgatcgcgagaagcctcggatactggaaactgccatcgattgcgacagcctcggatcatggcctccaacatcgccttttagggatctaagggtgaaaggatgggagatggaaatgtgggctgatgaagtgcgcattcattattgattttgaggttttatgaaccagtttactaatttttcttttactgaaaagggtgcttgagtgtattttctatcgatgtcatgggtttgtcaacgtttgccattttcttttgtacgagtatagttgtaactgttgttcgaataccggtagtgaagtgctgcgagtgaggaaataaccttgccttgccgttatggtgttgtatcttttgttgatatttatttcgcatcaacaaaagaaaagcagcgttcgataaatgtctacaggatttgctttgtaccttgggggtgccctgtttattgtgactacaagtctgtgatatgcattttttatacctttattttttgtacctttttctgattgaatccgaaatccacacaacacccgaagccaaatgtcagacaaaaatagtgctcaggcaaaaaaaaa

SEQ ID NO: 72386 - DNA, 2879 bp, Zea Mays
ctgttgaacagcctcatgaaaccctgggatatggaccacaaacaatcgaggagaaacagaagctttatacattattgaggagcctaaatgttaatggtggattagcatctgcatctatatccgagccctatacttcaacaggacagagctttgctggtggtgctcctgtagatggattttattcacctgaacttagaggtgaatttggggctggccttttggatcttcatgcaatggatgacagcgagcttctttctgagaatgctgcatcagaaccatttgagccttcgccttttatgccaaaagaaatggatgatgacgactacgatgtaatagcagaaaaccaacaaggtctagtagacaaccagagtgccttcaccaacgaaaaagaaaacactgtggtcagtgcaagagaaagtaatgtagcaaagattaaagtcgtggtaaggaaaagacctctgaacaaaaaggaggtatctcgaaaagaggaagacatcatagatgtacacaattctcaattcttaactgtccatgagcctaaactaaaggtggatttgacagcttatgtggaaaagcatgatttctgctttgacactgtcttgggcgagaatgtaactaatgatgaggtgtaccgtgagactgtggagcctattataccattaattttccaaaggacaaaagcgacatgctttgcatatggccaaacaggcagtggcaagacctatacaatgcaacccctacctcttagagctgcacatgatatggtttgtcttttacatcaacctatgtatcggaatcaacatttcaagttatggcttagctactttgaaatttatggtggcaaactctttgatcttcttagcgaaaggaggcaactcttaatgagagaagacggaaagaaacaggtctgtattgttggtttacaggagttcgaggtttctgatgtccagattgtcaaagaatacattgagaaaggaaatgctgcaagaagcacaggcacaactggagccaatgaagagtcctcacgatctcatgctattctgcaattgtctgtgaaaaagcatatcccagttactgaaacccggagacagagagaccgagatgctattgaagcaaagaatacaaagcatgtggggaaaatgtcatttattgatcttgctggaagtgagcgtggtgctgatacaacagataatgacaaacaaacaagaattgaaggtgcagagatcaacaagagccttttggctctcaaggaatgtattcgggcactggataacgatcaaatacacattcctttcagaggaagcaagctaacagaggtgcttcgggactcctttgttggaaactcccgtacagtgatgatttcttgcgtttcaccaagttcaggttcatgtgaacacacactgaatacgttaagatatgctgacagggttaaaagtctttcaaaaggtggtaacacaaaaaaggagcagtttgctgtgcagtctgtatcatctggcaaggaatctacctacacatcgtaccctttatcatgtgaagctgaagagactatggagcagactcaagaaattaggcctgttgattcttctaggaaaggtgttgacagtttcacttccaattcttccattgagcctgagaaaaactcctattgtatgattccaagctatccacataaaggaaaagaagaaactagtactagatctggtttgaatgatagggagagaggggacttgaaatataaccaggctggttttaatagtaaaacacattcacttcaggaatcaataaattcacaagaagaggtgaaagtgacaaaagtctcaccaccccggagaaaagctaacagggatgagaaatcagaaaggcaggtcaactacatgaaaaaagaaagtgggcctgaaattagtcggactggtgttaagcagcaacagcaacttaaacagctgcaaaggccatcatcaacctcatcgtcgcaggttttatccaagcaatctgagaaggaagatatggaaataaacacaatacttgaggaagaggcgctgatagcagctcacagaaaggaaattgaaagtacaatggagatagtacgagaagagatgaatctattagcagaggtcgatcagccaggtagtcttattgacaactacgtggcacagctaagctttctgttgtcgcggaaggcttctggtttggtaagccttcaggcacgcttggcacggtttcagcagcgcctcaaggaacaggagattcttagccgtcaaaaaccattgagatagtttaaaccgcccaaaatggaaacctttcggtttgtcgttgatcgcgagaagcctcggatactggaaactgccatcgattgcgacagcctcggatcatggcctccaacatcgccttttagggatctaagggtgaaaggatgggagatggaaatgtgggctgatgaagtgcgcattcattattgattttgaggttttatgaaccagtttactaatttttcttttactgaaaagggtgcttgagtgtattttctatcgatgtcatgggtttgtcaacgtttgccattttcttttgtacgagtatagttgtaactgttgttcgaataccggtagtgaagtgctgcgagtgaggaaataaccttgccttgccgttatggtgttgtatcttttgttgatatttatttcgcatcaacaaaagaaaagcagcgttcgataaatgtctacaggatttgctttgtaccttgggggtgccctgtttattgtgactacaagtctgtgatatgcattttttatacctttattttttgtacctttttctgattgaatccgaaatccacacaacacccgaagccaaatgtcagacaaaaatagtgctcaggcaaaaaaaaa

SEQ ID NO: 72387 - DNA, 2226 bp, Zea Mays
gtgcttgtgattctgtttaccatgcttcaaattctccactgcaatttgtttaatggcagtggcaagacctatacaatgcaacccctacctcttagagctgcacatgatatggtttgtcttttacatcaacctatgtatcggaatcaacatttcaagttatggcttagctactttgaaatttatggtggcaaactctttgatcttcttagcgaaaggaggcaactcttaatgagagaagacggaaagaaacaggtctgtattgttggtttacaggagttcgaggtttctgatgtccagattgtcaaagaatacattgagaaaggaaatgctgcaagaagcacaggcacaactggagccaatgaagagtcctcacgatctcatgctattctgcaattgtctgtgaaaaagcatatcccagttactgaaacccggagacagagagaccgagatgctattgaagcaaagaatacaaagcatgtggggaaaatgtcatttattgatcttgctggaagtgagcgtggtgctgatacaacagataatgacaaacaaacaagaattgaaggtgcagagatcaacaagagccttttggctctcaaggaatgtattcgggcactggataacgatcaaatacacattcctttcagaggaagcaagctaacagaggtgcttcgggactcctttgttggaaactcccgtacagtgatgatttcttgcgtttcaccaagttcaggttcatgtgaacacacactgaatacgttaagatatgctgacagggttaaaagtctttcaaaaggtggtaacacaaaaaaggagcagtttgctgtgcagtctgtatcatctggcaaggaatctacctacacatcgtaccctttatcatgtgaagctgaagagactatggagcagactcaagaaattaggcctgttgattcttctaggaaaggtgttgacagtttcacttccaattcttccattgagcctgagaaaaactcctattgtatgattccaagctatccacataaaggaaaagaagaaactagtactagatctggtttgaatgatagggagagaggggacttgaaatataaccaggctggttttaatagtaaaacacattcacttcaggaatcaataaattcacaagaagaggtgaaagtgacaaaagtctcaccaccccggagaaaagctaacagggatgagaaatcagaaaggcaggtcaactacatgaaaaaagaaagtgggcctgaaattagtcggactggtgttaagcagcaacagcaacttaaacagctgcaaaggccatcatcaacctcatcgtcgcaggttttatccaagcaatctgagaaggaagatatggaaataaacacaatacttgaggaagaggcgctgatagcagctcacagaaaggaaattgaaagtacaatggagatagtacgagaagagatgaatctattagcagaggtcgatcagccaggtagtcttattgacaactacgtggcacagctaagctttctgttgtcgcggaaggcttctggtttggtaagccttcaggcacgcttggcacggtttcagcagcgcctcaaggaacaggagattcttagccgtcaaaaaccattgagatagtttaaaccgcccaaaatggaaacctttcggtttgtcgttgatcgcgagaagcctcggatactggaaactgccatcgattgcgacagcctcggatcatggcctccaacatcgccttttagggatctaagggtgaaaggatgggagatggaaatgtgggctgatgaagtgcgcattcattattgattttgaggttttatgaaccagtttactaatttttcttttactgaaaagggtgcttgagtgtattttctatcgatgtcatgggtttgtcaacgtttgccattttcttttgtacgagtatagttgtaactgttgttcgaataccggtagtgaagtgctgcgagtgaggaaataaccttgccttgccgttatggtgttgtatcttttgttgatatttatttcgcatcaacaaaagaaaagcagcgttcgataaatgtctacaggatttgctttgtaccttgggggtgccctgtttattgtgactacaagtctgtgatatgcattttttatacctttattttttgtacctttttctgattgaatccgaaatccacacaacacccgaagccaaatgtcagacaaaaatagtgctcaggcaaaaaaaaa

SEQ ID NO: 72388 - DNA, 1454 bp, Zea Mays
aaataatctcgaccccgtgtgttatctgagaaatcgtgtttgaagataatgacgtggtctggtccgttatttcttgctctactctaagcattcgggtagcaaatgaatttatcgggtctcaattatatcaaaagaaatctcctacgtagttggcaatatcattttggtctaaccaaattgaacctaatttatacttgatactaaattcaaatctgagcacaaatatatatggattaatgtgtaaaaaaagaaaaggaaataaaaaagaaaaaatatctcagccgctcctatccttccaccgctttcttcttgatttttcccttggccgcgttggtttcctgggcgtgtctttcttctctgcaggcagccacgctcatcttcctggccgcgctcatcttcctgctgctccagcgcgcccagctcccagctcggatccctgcctcaactcgcctccctcacggcgccctccctccgttccttctcctccatggccgtcggtcctccccgcgctgctctctgtctctctcctagccgcggtcggctctggcccaggtccgatcggtgctcctccctgctgtagcgccggtcccagctcggatccctcccagccgcggctctccggtgtttggccctggtccaagctcctgctcgtccagcccccttcccaggcgcccctggctgagctcccccatggcgtctcccccatccatggctgtgtcgttcccctgctctggtggctgagctatctctcttgtgctcgacgaaacgaccatgaggagttttgtgttgtgtgcagccccatatgcgacaccgtcgaaccccggatgtgagcagagaaatctttggaggtttggttgaatgaaagcgaaatcccgaggtgtcgttcattaggtgctcgacgtatgggctaaagtgtagcttgacgttgtgcttatactttccgagttgaatttaattttgggtgaattccttcgctatctataattgtcagcttgaatgatgggttaaatagttaggtggtcgatcactcttttgtgattagcataggtacttgtggttagcaggtgtggtgtgatctccgattccctgttgttggtgtcttgcttcatcgtaaccatagggaatgatgtctttcctctaattacttgtaataattgtgtttgatttatatgttgtcttagctaattaatgaaaggcctttgtttggtgtaataatatggttgccgttttagtgggaggtagtcgtgttgtatgtcataagttagaattaaggcgagtatgtattgtattatgaaactaattagagatgtatgttgtccttgtgagtttttagttgatttaggttttgatgtgcaaattcatattttggccagctagtttaattatggatgaatggatggttaggtgtttgtgttgataatgctcttgtgactaccaagtgtggtgtgaagtgg

SEQ ID NO: 72389 - DNA, 1142 bp, Zea Mays
aaaaaattaaaaacatagcggcggcgtaggcacaacctccccgcaatcgacgctcaatttcctctatagtcttcctcccataaaaactgtgccacttcttcatgctcctcgtaacctcctccagtcgtgtcggtggcacagcaggatagatcacctgagcatgttcgtcacaacctcaagatgccgctgaggaagaaggggccgcgagtcccacggaggcatgcggaagatacagaacctactcctacagactatgagaagcagagagcaattacaatcatgaagaacaatcaaatgaggcaacggctagggctttctcaattacgatcaatgatggctagtattctgagtggaaggataaacgatgctcctccttaggaatctggatcgctgtatgatggtgatgatattgagggctctgacgatgagatggttagtaagaagcaagataaatttaaagatatagaacctagtgcaattgatcttttcaagtagatgcaatgcagcaagaaggacttagcgaaactgtccaaaaaggtttatatggaatcaatggcggcagcctcagttgaagatggacaccgtattcatcaatagaagtggtttcccaagcgctgcctaaatcaacttgattccatcataatgtaggcctagccgtcgccaacagaagctctttaaggattgtttcagcaaagatgcaacaacttgagtcttaattatagactgagaggcaagaaaaagatggactacaggatgaagtccaaagcttgaagtttaagacacagacatctgatgagaccattcctaagcaatctgatgagattgcagaattgaagaagttcatagcaaaaaataatagcctcctttgtttgattttaagcatcaatcgtagccaagtgcctccttaaatatgtatatcaacatgatggtgtcaaggttcatcacataccagatcgaggattaaagttatatgagcttaagttacatgattattaggatttatgttattggagtctaaatttgttttttttgtttaaatacttgtgctggatttttgtttgatgatataattttggtattactatttattttgtttgatgaaatgttgtttgcatgatgaatcaatcatgattaaaaattgt

SEQ ID NO: 72390 - DNA, 1197 bp, Zea Mays
atagcggcggcgtaggcacaacctccccgcaatcgacgctcaatttcctctatagtcttcctcccataaaaactgtgccacttcttcatgctcctcgtaacctcctccagtcgtgtcggtggcacagcaggatagatcacctgagcatgttcgtcacaacctcaagatgccgctgaggaagaaggggccgcgagtcccacggaggcatgcgggctagcaccagcaaagcggctccaggcacctaagcacgaaggcacattgaagatttgaagttcaataaaaagatacagaacctactcctacagactatgagaagcagagagcaattacaatcatgaagaacaatcaaatgaggcaacggctagggctttctcaattacgatcaatgatggctagtattctgagtggaaggataaacgatgctcctccttaggaatctggatcgctgtatgatggtgatgatattgagggctctgacgatgagatggttagtaagaagcaagataaatttaaagatatagaacctagtgcaattgatcttttcaagtagatgcaatgcagcaagaaggacttagcgaaactgtccaaaaaggtttatatggaatcaatggcggcagcctcagttgaagatggacaccgtattcatcaatagaagtggtttcccaagcgctgcctaaatcaacttgattccatcataatgtaggcctagccgtcgccaacagaagctctttaaggattgtttcagcaaagatgcaacaacttgagtcttaattatagactgagaggcaagaaaaagatggactacaggatgaagtccaaagcttgaagtttaagacacagacatctgatgagaccattcctaagcaatctgatgagattgcagaattgaagaagttcatagcaaaaaataatagcctcctttgtttgattttaagcatcaatcgtagccaagtgcctccttaaatatgtatatcaacatgatggtgtcaaggttcatcacataccagatcgaggattaaagttatatgagcttaagttacatgattattaggatttatgttattggagtctaaatttgttttttttgtttaaatacttgtgctggatttttgtttgatgatataattttggtattactatttattttgtttgatgaaatgttgtttgcatgatgaatcaatcatgattaaaaattgt

SEQ ID NO: 72391 - DNA, 1089 bp, Zea Mays
taggcacaacctccccgcaatcgacgctcaatttcctctatagtcttcctcccataaaaactgtgccacttcttcatgctcctcgtaacctcctccagtcgtgtcggtggcacagcaggatagatcacctgagcatgttcgtcacaacctcaagatgccgctgaggaagaaggggccgcgagtcccacggaggcatgcgggctagcaccagcaaagcggctccaggcacctaagcacgaaggcacattgaagatttgaagttcaataaaaagatacagaacctactcctacagactatgagaagcagagagcaattacaatcatgaagaacaatcaaatgaggcaacggctagggctttctcaattacgatcaatgatggctagtattctgagtggaaggataaacgatgctcctccttaggaatctggatcgctgtatgatggtgatgatattgagggctctgacgatgagatggttagtaaggtttatatggaatcaatggcggcagcctcagttgaagatggacaccgtattcatcaatagaagtggtttcccaagcgctgcctaaatcaacttgattccatcataatgtaggcctagccgtcgccaacagaagctctttaaggattgtttcagcaaagatgcaacaacttgagtcttaattatagactgagaggcaagaaaaagatggactacaggatgaagtccaaagcttgaagtttaagacacagacatctgatgagaccattcctaagcaatctgatgagattgcagaattgaagaagttcatagcaaaaaataatagcctcctttgtttgattttaagcatcaatcgtagccaagtgcctccttaaatatgtatatcaacatgatggtgtcaaggttcatcacataccagatcgaggattaaagttatatgagcttaagttacatgattattaggatttatgttattggagtctaaatttgttttttttgtttaaatacttgtgctggatttttgtttgatgatataattttggtattactatttattttgtttgatgaaatgttgtttgcatgatgaatcaatcatgattaaaaattgt

SEQ ID NO: 72392 - DNA, 1172 bp, Zea Mays
cacaacctccccgcaatcgacgctcaatttcctctatagtcttcctcccataaaaactgtgccacttcttcatgctcctcgtaacctcctccagtcgtgtcggtggcacagcaggatagatcacctgagcatgttcgtcacaacctcaagatgccgctgaggaagaaggggccgcgagtcccacggaggcatgcgggctagcaccagcaaagcggctccaggcacctaagcacgaaggcacattgaagatttgaagttcaataaaaagatacagaacctactcctacagactatgagaagcagagagcaattacaatcatgaagaacaatcaaatgaggcaacggctagggctttctcaattacgatcaatgatggctagtattctgagtggaaggataaacgatgctcctccttaggaatctggatcgctgtatgatggtgatgatattgagggctctgacgatgagatgaagcaagataaatttaaagatatagaacctagtgcaattgatcttttcaagtagatgcaatgcagcaagaaggacttagcgaaactgtccaaaaaggtttatatggaatcaatggcggcagcctcagttgaagatggacaccgtattcatcaatagaagtggtttcccaagcgctgcctaaatcaacttgattccatcataatgtaggcctagccgtcgccaacagaagctctttaaggattgtttcagcaaagatgcaacaacttgagtcttaattatagactgagaggcaagaaaaagatggactacaggatgaagtccaaagcttgaagtttaagacacagacatctgatgagaccattcctaagcaatctgatgagattgcagaattgaagaagttcatagcaaaaaataatagcctcctttgtttgattttaagcatcaatcgtagccaagtgcctccttaaatatgtatatcaacatgatggtgtcaaggttcatcacataccagatcgaggattaaagttatatgagcttaagttacatgattattaggatttatgttattggagtctaaatttgttttttttgtttaaatacttgtgctggatttttgtttgatgatataattttggtattactatttattttgtttgatgaaatgttgtttgcatgatgaatcaatcatgattaaaaattgt

SEQ ID NO: 72393 - DNA, 2074 bp, Zea Mays
caacctccccgcaatcgacgctcaatttcctctatagtcttcctcccataaaaactgtgccacttcttcatgctcctcgtaacctcctccagtcgtgtcggtggcacagcaggatagatcacctgagcatgttcgtcacaacctcaagatgccgctgaggaagaaggggccgcgagtcccacggaggcatgcgggctagcaccagcaaagcggctccaggcacctaagcacgaaggcacattgaagatttgaagttcaataaaaagatacagaacctactcctacagactatgagaagcagagagcaattacaatcatgaagaacaatcaaatgaggcaacggctagggctttctcaattacgatcaatgatggctagtattctgagtggaaggataaacgatgctcctccttaggaatctggatcgctgtatgatggtgatgatattgagggctctgacgatgagatggttagtaaggtaacattcatattttcctccaatgatttatcattacctttgcttccacaatcaaatatatagtatattgtgttgtacctatgcatgaatccctagttgataaggttgtacgtagccacaccctccgacaatggcgtcgaactctcttcaaaaaatacaatagcctctaaaagggttgttgcacatgaagtacaataacaaccaattatagtcactagacgaaggagtactaccataaaccaagagtccaaccaaagcataatggccggtacactgccaaattcttgtggtgccacaaaccaggattgcacccaaagcatgtatgccgctatacaacttagttcaccaagacagactgagagcaaggatcccacttgagaccaaggcaagtggttccgtggttgtctatatattgatttcttatgatttttctataccaataaaactacaaatttttaatgctcgtgctaattgttcatgtccaagcttgcaaataagtattctgttgttagaaaaaaattatgcattatgctaatatccatgtactagctaaaacatgaattttttgaatgcttcgactacctaatgtgtatttacaagtactgctcttgattaaatatgttatagctgcagcatatacttggttactcttataatggtaatgctcataatacatacatttttacatctaagatattgtggatgcttctacatgcagatcttcttgcatacatgtaattaagtctttgtatttaatatctaatacatacaatgctttgttaattcatttgttgtacgaatgttcttgtaatcttatactgcatgcttcaccaaatcaatgtccaacatgtgataaatgttctttgctgataataataaattcacaccatttcagaagcaagataaatttaaagatatagaacctagtgcaattgatcttttcaagtagatgcaatgcagcaagaaggacttagcgaaactgtccaaaaaggtttatatggaatcaatggcggcagcctcagttgaagatggacaccgtattcatcaatagaagtggtttcccaagcgctgcctaaatcaacttgattccatcataatgtaggcctagccgtcgccaacagaagctctttaaggattgtttcagcaaagatgcaacaacttgagtcttaattatagactgagaggcaagaaaaagatggactacaggatgaagtccaaagcttgaagtttaagacacagacatctgatgagaccattcctaagcaatctgatgagattgcagaattgaagaagttcatagcaaaaaataatagcctcctttgtttgattttaagcatcaatcgtagccaagtgcctccttaaatatgtatatcaacatgatggtgtcaaggttcatcacataccagatcgaggattaaagttatatgagcttaagttacatgattattaggatttatgttattggagtctaaatttgttttttttgtttaaatacttgtgctggatttttgtttgatgatataattttggtattactatttattttgtttgatgaaatgttgtttgcatgatgaatcaatcatgattaaaaattgt

SEQ ID NO: 72394 - DNA, 2346 bp, Zea Mays
atggacagagagcagtggatgtatggaattgatcggtctgatatcaattatttccttcatgtgcaagggttcataaaggtggctgaaaaacatcgattagataataaggcaacagctatcttatgtccttgtgtggactgtagaaactttgatccaattatcgactcacgtgtaatcctcggacacttgataatgcgtggttttacatctgggtacacatgctggacaaatcatggcgagtgttctattggtgataacaatggaaacactgagggtcctttagatactaatggcggtcctatggatactaatgaggcgaatgaccattatgtgcatatccaagatacaaaaagtcattttgcggacgcgacgattgttgatgtgcccgtcgatcatctggaatacatgatacatgatgttactgtaactcgtaatttgagtgaggctcaagcatcacaagatcaaatgagttctgagtcatcttctgatacatctgggtcatcaacttcaaaaacctctgggtccacaagtacctcatcctccactagcttgcattcagaggacattgtcgaaaaaggttcttgtacttctgccaggcatagaacgaaacgaggtcacgccaaatgcaagaagctagaaaaaggaggtccccgtcgtcttacgtttgataaaaatgggattgcccagtcaccagtaaaacatgtcaatgaattctcaagttattgtggttatatagcacgcatgcgtgttgatattaggataaaggattggcgaaaagtgcctacagtggtaaaatcaaacctatgggaggatgtttcaaagaaatttgtcatgccaagagatgaaacccataccctcaatgtgaagaaggtcgctttgaaatctatgattgtcatgagtggacatgttgcacccccaaagtcatcgaacttctttgttgaatttgggatggacagtggatatcacaaaaaatatacatccagttcatccaaagtgcaggggatactttttacctacacttttgtacaacatatgctctacagaatccttcaagtagcaggaactgtcacaaaggcaatgggtgccagatattgtatcatcccaataccaacctcttcacagaactccactatctctttgttcaggatcttgccaaagacttccttagcaaatctgcggatggagctcctcggtattagaagattcagccaaggatgtggaacttctccaagctcaccttctggacgaatgacaaatatgaaatgaggttgagatattacaagagcagctttttccacgagactggctgttgacgggccagttgtgaaactactgatgtcataaaggagtaatgcatgtgccttcttagctcctattcaatgttctgcgtgcaatgcataaaagagagttggatgaaaaggttcgtgatgcacttcatctttacattgaagcccgcggcataaatgagaagctcttccgttttctccaagcttggcttcatgtaaaggatcaccgcaatcttgtacgctggttcaagagcgttggttcattcatcagtgaccaaagccaaagcaagatgacaaacactgtgacaagcatgaaccagtatattctttcattatcagatgacaaacaattggtccccgggctcatttctctaatagaacagggaactgatgttctgcgtgtgaagccccttttgtttgttgctctgctttgcaagaatagtcgaaggtggcttcctcatttcttttgcaatgcaaaattaatatcagctgttgatagactgggaaaggagaaggagggttttattcatcattgtacagaagcatttgtgcagttggttgcttccttggtccctggtattcttgacactgtctccagcgatatacaacaggttatggttggcaagcgccatggacctgttactgctttagctgggcgagctcatccaaagagcacaattcatctgttccctgttattcttcatcttctgggaagtgcatccttcaagcatagagttgtgacagggcatgtattgcttcagttggcaaatcttattaagattttggaggcaccatttcaggtgctatttaagaaccttactgttgacataaaggatgtgaaaccaacgtccctgctcaaagatcgtctgcgtgaagttgagggaaatccaaagctcggctcccttggtccacaacttcaatatagcaaaattatggatttggctttggataaggctaatagggagataatacataggcaaggatcatcaagtttgacgtcggcaacgtggtcatggtgactggccggaggaacaccgggcgtgtaggagtcatcaagaac

SEQ ID NO: 72395 - DNA, 1060 bp, Zea Mays
ctccaggccgccggcttctgctcatcaaatcccctctactcaccaggaccagtcgcctgaccgtacatcggtcggttcagcttcagcgccgaaaaagcatagcgcttcctcacggggccgacgccgtaacttctcgtcgtcaacgtgcaaggattttctccgcaagtttgtggacagcgagcttctgacgtcaagcctagaggactggttctccggtcacagcgaagattgtggtttcaggaagccaggtttcaacgttcctttcgagcttacagagttacagaatttcgattacgctctggagggcgttacttttcagcagctatttggcggagtggtaaaagtgcaaggtgatttgaacaagctggattttgatctcaacaacgtttttgattgtgccgctgaatggataaagaaacattccagaatttcagtctgttccgtagaccgagtatggaacaaacttgggaatgctaactggggagacattgggacccttcaggttctcatcgcaatatttcactcgatgatccaattttacggagagcctaagtattctctcgatgaactggcaacggaacatagttcaaggctacaaagccgaagatcagaaagacatctggttgacagacaagctaatggcaatggtttatttcgattccaacagcgaagtcattctcctgaaattgttgagttacaggaggaagcagcagttgatgtgaaaccacatgaaaccttaaggcttgaaatagggtatgttgtattgatggatgatgcttacacacagaaaggttttcaaatcagtgacatcctaacaggcagtgatcctcctatttatacttctgctcctgtggaagaacctaccaaaacttgttactgctagggtcggaaaggaccttgtttccaacttggtgtctggattattgacgattggtccctgtttcggtggagcaattgatgatgcagcccgatacttcaaagatgcatgtgataggttgagccaacttagattttcctttaggtttaagcatctccatgtatcttagatcgtttaatcact

SEQ ID NO: 72396 - DNA, 3347 bp, Zea Mays
gaaggagggcgcaaatttctccttttttttcgcagtgcttctctttcttgccgtgcccccactccgctcgattctcgactctagtcaccccgccggaccgccgtctcacgttctacacccacccactcctgactccgacgacgccgttcaaacccacgcaatccagcagaggagaccatctccgccgccgacgacgccgttcaaaccctagccgatccgctggctctgccatcgcaagccaatgccccacaccgaaccctagcaacaccatagtccttccacaaccggtgcgaacagtactgcccgaatatggcggccgaacccgccgctacggccgctgcttcggcggcggccgctatctccgctgtcatggactggcgctcctcccccgacgcccgcgccgctgccttcgcgtacctcgaatcagttaagagtggggacgtccgagccttggcaagcacatcatttttcttggttcggaaggaccagacgtcagagatccgcttgcacgggttcaagatgttgcagcacctggtaaggttgaggtgggaggagctcagtgctgcagaacggaatgaatttgctaatatgacaattaatttgatatcggatgttgttggccctcatgaggtgtgggccttgaagagtcaaacagctgctttagtagcagaggtggttcgaagggagggagttgatttgtggattactttactcccatctattgtttctctctctaacaatggccctactgaggctgagttagttgccatgattctaaggtggcttccagaggatatcactattcataatgaagatttggagggtgataggcggagatctctgttgcgcggccttactgagtcactgtcacaaattctgcctctgttgtattctctacttgagaaacattttggtgctgctttaagtgagcatgcgaagcagcaaatggatttggctaaacaacatgcagggacggtgactgcagttctaaatgctgtcaatgcatatgctgaatgggttcctgtgacagatctagccaaatatggtttaattcacggatgtgggtccttgctttcttacagcgattttcgcctccacgcttgtgagttttttaaagtgatatgtcagaggaaaagacctgtggatgtggcagttgctgagtatgatgctgcaatgtgcaacatattccaggtgttgatgaacatttcacaacaatttttgaccagatctggcatgcaacccagttctattgatgagagcgaatatgagtttgcatcatgtgtttgtgagacaatggttgctctaggatcttcaaacatgcaatgcatactagccgatggagccaggactttccagttcttacaacaaatgctggagtattaccaacactacaaaatcacacttcatttccagtctctattattttggctggtggtattgagagaaccatcgaaatctaagtctattgcacgtgtttctggtgataattctgctgctggtaattctgcatctactggtgacttatcaacagaaaagaagaaaggggtatcggtatttgtcactgatgaaatatacagtacaattttggatgtttctttcaagagaatgctgaagaacaatggaagtgcaacttctgggttgttagaaatatggagtgaagagcttgaggggaagagcgacttctgcaactaccgcaccaaattgttggatctcattaaagtcattgcttctcaaagatctgtgattgctgcagcaattgtagttcagagaataaatgttgtctttggagatgctaatcaagcaactaagtccccacaggatcttgatgcaatggaaggggctcaactggggcttgaagcagttgtcaatgctattttcgatggctcagttgattgtgggaaaactgatttggatacgaaatcccaactgcacaagatttttgaaggcttacttcaacagcttctttctttaaagtggacagaacctaaccttgcagttattcatggtcattatttggatgctttgggccctttcttgaagcatcatccagatgcagttgccagtgttgttaataagctttttgaactgttgacgtctctcccaatcacatttcaggatccatcaaacaattctcgcctagcaaggttacagatctgctcatcattcattcgtatatcgagagctgctgataaagcacttctgcctcacatgaagaacattgctgataccatggcttaccttcaaggagagggtcgcttactacgtggtgaacataatcatttatgtgaagcgtttcttgtgatgtcatcctctgctgggattcaacagcaacaagaagttcttgcttggttacttgaacctcttaataaaatgtggactcaagtggaatggcaaactgcatacttgtctgatccttctggtttgacaaacatgtttgctgatagccaattcatgtggtcaatttatcacacagttacattctttgaaaaggcactcaagagaagtggaaccaaaaagtcttcagcaactccacaagcacccaccacaacagtacctggttatctgcatccgatgtcttcacatctagcatggattgtgccccctctcttgaggctgctgcgatgcatacatgtcctttggtctgagccatttgcccagtctcagacggccgaaatcaaagcagcaaaaagcatgactgttgcagagcaggctagccttctaggagagacaggtaaacttaccaaaggtcaggttgctccagctgatggtttgctggatgttcaaagagatggagaatctaaagaaaacaatataaaaaactggttgcgtgggatccgagacagcgggtacaatgttttaggactagcagctactcttggggaagcattctttcgatgcatagagggttcttctgtcacccttgctattatggagaatgtgcaagttatggagtttcggcatctgcgccaacttatccaccttgttattattccatttgttaaatattgccctgccgatttatggctgtggctagtgaaccttttgcagccgttatttgtccactgtcagcaagctcttaattattcatggtccagtcttcttcatgagggtcgggctaaggttcctgacagcattggtaatctttctgggtcagaactgaaggtagaggtaatggaagaaaagttgctacgtgacttgactcgtgaagtatgttctgtcctttgggctttatcatcaccaggcttaaataatggacttccatccttggaacaacttggaccttccaaccggatggattctgttttgaagaatctggagtcctttgcttcaagttctctaactggatt

SEQ ID NO: 72397 - DNA, 3867 bp, Zea Mays
gaaggagggcgcaaatttctccttttttttcgcagtgcttctctttcttgccgtgcccccactccgctcgattctcgactctagtcaccccgccggaccgccgtctcacgttctacacccacccactcctgactccgacgacgccgttcaaacccacgcaatccagcagaggagaccatctccgccgccgacgacgccgttcaaaccctagccgatccgctggctctgccatcgcaagccaatgccccacaccgaaccctagcaacaccatagtccttccacaaccggtgcgaacagtactgcccgaatatggcggccgaacccgccgctacggccgctgcttcggcggcggccgctatctccgctgtcatggactggcgctcctcccccgacgcccgcgccgctgccttcgcgtacctcgaatcagttaagagtggggacgtccgagccttggcaagcacatcatttttcttggttcggaaggaccagacgtcagagatccgcttgcacgggttcaagatgttgcagcacctggtaaggttgaggtgggaggagctcagtgctgcagaacggaatgaatttgctaatatgacaattaatttgatatcggatgttgttggccctcatgaggtgtgggccttgaagagtcaaacagctgctttagtagcagaggtggttcgaagggagggagttgatttgtggattactttactcccatctattgtttctctctctaacaatggccctactgaggctgagttagttgccatgattctaaggtggcttccagaggatatcactattcataatgaagatttggagggtgataggcggagatctctgttgcgcggccttactgagtcactgtcacaaattctgcctctgttgtattctctacttgagaaacattttggtgctgctttaagtgagcatgcgaagcagcaaatggatttggctaaacaacatgcagggacggtgactgcagttctaaatgctgtcaatgcatatgctgaatgggttcctgtgacagatctagccaaatatggtttaattcacggatgtgggtccttgctttcttacagcgattttcgcctccacgcttgtgagttttttaaagtgatatgtcagaggaaaagacctgtggatgtggcagttgctgagtatgatgctgcaatgtgcaacatattccaggtgttgatgaacatttcacaacaatttttgaccagatctggcatgcaacccagttctattgatgagagcgaatatgagtttgcatcatgtgtttgtgagacaatggttgctctaggatcttcaaacatgcaatgcatactagccgatggagccaggactttccagttcttacaacaaatgctggagtattaccaacactacaaaatcacacttcatttccagtctctattattttggctggtggtattgagagaaccatcgaaatctaagtctattgcacgtgtttctggtgataattctgctgctggtaattctgcatctactggtgacttatcaacagaaaagaagaaaggggtatcggtatttgtcactgatgaaatatacagtacaattttggatgtttctttcaagagaatgctgaagaacaatggaagtgcaacttctgggttgttagaaatatggagtgaagagcttgaggggaagagcgacttctgcaactaccgcaccaaattgttggatctcattaaagtcattgcttctcaaagatctgtgattgctgcagcaattgtagttcagagaataaatgttgtctttggagatgctaatcaagcaactaagtccccacaggatcttgatgcaatggaaggggctcaactggggcttgaagcagttgtcaatgctattttcgatggctcagttgattgtgggaaaactgatttggatacgaaatcccaactgcacaagatttttgaaggcttacttcaacagcttctttctttaaagtggacagaacctaaccttgcagttattcatggtcattatttggatgctttgggccctttcttgaagcatcatccagatgcagttgccagtgttgttaataagctttttgaactgttgacgtctctcccaatcacatttcaggatccatcaaacaattctcgcctagcaaggttacagatctgctcatcattcattcgtatatcgagagctgctgataaagcacttctgcctcacatgaagaacattgctgataccatggcttaccttcaaggagagggtcgcttactacgtggtgaacataatcatttatgtgaagcgtttcttgtgatgtcatcctctgctgggattcaacagcaacaagaagttcttgcttggttacttgaacctcttaataaaatgtggactcaagtggaatggcaaactgcatacttgtctgatccttctggtttgacaaacatgtttgctgatagccaattcatgtggtcaatttatcacacagttacattctttgaaaaggcactcaagagaagtggaaccaaaaagtcttcagcaactccacaagcacccaccacaacagtacctggttatctgcatccgatgtcttcacatctagcatggattgtgccccctctcttgaggctgctgcgatgcatacatgtcctttggtctgagccatttgcccagtctcagacggccgaaatcaaagcagcaaaaagcatgactgttgcagagcaggctagccttctaggagagacaggtaaacttaccaaaggtcaggttgctccagctgatggtttgctggatgttcaaagagatggagaatctaaagaaaacaatataaaaaactggttgcgtgggatccgagacagcgggtacaatgttttaggactagcagctactcttggggaagcattctttcgatgcatagagggttcttctgtcacccttgctattatggagaatgtgcaagttatggagtttcggcatctgcgccaacttatccaccttgttattattccatttgttaaatattgccctgccgatttatggctgtggctagtgaaccttttgcagccgttatttgtccactgtcagcaagctcttaattattcatggtccagtcttcttcatgagggtcgggctaaggttcctgacagcattggtaatctttctgggtcagaactgaaggtagaggtaatggaagaaaagttgctacgtgacttgactcgtgaagtatgttctgtcctttgggctttatcatcaccaggcttaaataatggacttccatccttggaacaacttggaccttccaaccggatggattctgttttgaagaatctggagtcctttgcttcaagttctctaactgggcaacagtactcgttccatcgcatgttgttgcattgtccaagcaagcctgaaacgaagtgacacaaagctgtaaagtatagacgagccgttacctttggaggacaccagggacaagcgctattttaacggatcctttggcgcatgctgctggagataaaaaggacacaagcacacgctaaatatagaggagaggagcatatagcgcaccttgctggagagagcctaaaactggtgttgggcagttgggctattgggttgattgattgtgggcttttttctttttatttttttcctgtttttccctactactaggctgaaatggacctactagacttgtgctagcttgcttattaatttcgaattagtgttatataaataatatttggtctaatctttcgcattactatataattataatatataattaaggcgtcgcctcaacttacgccttaccgcctaaaaggtaaaaaggggggggggggcgctcgccttaccgccttaataactatggttgggtttttt

SEQ ID NO: 72398 - DNA, 3365 bp, Zea Mays
ctcgattctcgactctagtcaccccgccggaccgccgtctcacgttctacacccacccactcctgactccgacgacgccgttcaaacccacgcaatccagcagaggagaccatctccgccgccgacgacgccgttcaaaccctagccgatccgctggctctgccatcgcaagccaatgccccacaccgaaccctagcaacaccatagtccttccacaaccggtgcgaacagtactgcccgaatatggcggccgaacccgccgctacggccgctgcttcggcggcggccgctatctccgctgtcatggactggcgctcctcccccgacgcccgcgccgctgccttcgcgtacctcgaatcagttaagagtggggacgtccgagccttggcaagcacatcatttttcttggttcggaaggaccagacgtcagagatccgcttgcacgggttcaagatgttgcagcacctggtaaggttgaggtgggaggagctcagtgctgcagaacggaatgaatttgctaatatgacaattaatttgatatcggatgttgttggccctcatgaggtgtgggccttgaagagtcaaacagctgctttagtagcagaggtggttcgaagggagggagttgatttgtggattactttactcccatctattgtttctctctctaacaatggccctactgaggctgagttagttgccatgattctaaggtggcttccagaggatatcactattcataatgaagatttggagggtgataggcggagatctctgttgcgcggccttactgagtcactgtcacaaattctgcctctgttgtattctctacttgagaaacattttggtgctgctttaagtgagcatgcgaagcagcaaatggatttggctaaacaacatgcagggacggtgactgcagttctaaatgctgtcaatgcatatgctgaatgggttcctgtgacagatctagccaaatatggtttaattcacggatgtgggtccttgctttcttacagcgattttcgcctccacgcttgtgagttttttaaagtgatatgtcagaggaaaagacctgtggatgtggcagttgctgagtatgatgctgcaatgtgcaacatattccaggtgttgatgaacatttcacaacaatttttgaccagatctggcatgcaacccagttctattgatgagagcgaatatgagtttgcatcatgtgtttgtgagacaatggttgctctaggatcttcaaacatgcaatgcatactagccgatggagccaggactttccagttcttacaacaaatgctggagtattaccaacactacaaaatcacacttcatttccagtctctattattttggctggtggtattgagagaaccatcgaaatctaagtctattgcacgtgtttctggtgataattctgctgctggtaattctgcatctactggtgacttatcaacagaaaagaagaaaggggtatcggtatttgtcactgatgaaatatacagtacaattttggatgtttctttcaagagaatgctgaagaacaatggaagtgcaacttctgggttgttagaaatatggagtgaagagcttgaggggaagagcgacttctgcaactaccgcaccaaattgttggatctcattaaagtcattgcttctcaaagatctgtgattgctgcagcaattgtagttcagagaataaatgttgtctttggagatgctaatcaagcaactaagtccccacaggatcttgatgcaatggaaggggctcaactggggcttgaagcagttgtcaatgctattttcgatggctcagttgattgtgggaaaactgatttggatacgaaatcccaactgcacaagatttttgaaggcttacttcaacagcttctttctttaaagtggacagaacctaaccttgcagttattcatggtcattatttggatgctttgggccctttcttgaagcatcatccagatgcagttgccagtgttgttaataagctttttgaactgttgacgtctctcccaatcacatttcaggatccatcaaacaattctcgcctagcaaggttacagatctgctcatcattcattcgtatatcgagagctgctgataaagcacttctgcctcacatgaagaacattgctgataccatggcttaccttcaaggagagggtcgcttactacgtggtgaacataatcatttatgtgaagcgtttcttgtgatgtcatcctctgctggcaacaagaagttcttgcttggttacttgaacctcttaataaaatgtggactcaagtggaatggcaaactgcatacttgtctgatccttctggtttgacaaacatgtttgctgatagccaattcatgtggtcaatttatcacacagttacattctttgaaaaggcactcaagagaagtggaaccaaaaagtcttcagcaactccacaagcacccaccacaacagtacctggttatctgcatccgatgtcttcacatctagcatggattgtgccccctctcttgaggctgctgcgatgcatacatgtcctttggtctgagccatttgcccagtctcagacggccgaaatcaaagcagcaaaaagcatgactgttgcagagcaggctagccttctaggagagacaggtaaacttaccaaaggtcaggttgctccagctgatggtttgctggatgttcaaagagatggagaatctaaagaaaacaatataaaaaactggttgcgtgggatccgagacagcgggtacaatgttttaggactagcagctactcttggggaagcattctttcgatgcatagagggttcttctgtcacccttgctattatggagaatgtgcaagttatggagtttcggcatctgcgccaacttatccaccttgttattattccatttgttaaatattgccctgccgatttatggctgtggctagtgaaccttttgcagccgttatttgtccactgtcagcaagctcttaattattcatggtccagtcttcttcatgagggtcgggctaaggttcctgacagcattggtaatctttctgggtcagaactgaaggtagaggtaatggaagaaaagttgctacgtgacttgactcgtgaagtatgttctgtcctttgggctttatcatcaccaggcttaaataatggacttccatccttggaacaacttggaccttccaaccggatggattctgttttgaagaatctggagtcctttgcttcaagttctctaactgggtaatgcaaatattttgagcaccttgcgtgatttacctaatacatttctatgccttttaaaccaaatgttattgaccttcccattctttgagctttg

SEQ ID NO: 72399 - DNA, 1261 bp, Zea Mays
gcagctcgtagccgccgaccgtcttctccggtggaacattgctgataccatggcttaccttcaaggagagggtcgcttactacgtggtgaacataatcatttatgtgaagcgtttcttgtgatgtcatcctctgctgggattcaacagcaacaagaagttcttgcttggttacttgaacctcttaataaaatgtggactcaagtggaatggcaaactgcatacttgtctgatccttctggtttgacaaacatgtttgctgatagccaattcatgtggtcaatttatcacacagttacattctttgaaaaggcactcaagagaagtggaaccaaaaagtcttcagcaactccacaagcacccaccacaacagtacctggttatctgcatccgatgtcttcacatctagcatggattgtgccccctctcttgaggctgctgcgatgcatacatgtcctttggtctgagccatttgcccagtctcagacggccgaaatcaaagcagcaaaaagcatgactgttgcagagcaggctagccttctaggagagacaggtaaacttaccaaaggtcaggttgctccagctgatggtttgctggatgttcaaagagatggagaatctaaagaaaacaatataaaaaactggttgcgtgggatccgagacagcgggtacaatgttttaggactagcagctactcttggggaagcattctttcgatgcatagagggttcttctgtcacccttgctattatggagaatgtgcaagttatggagtttcggcatctgcgccaacttatccaccttgttattattccatttgttaaatattgccctgccgatttatggctgtggctagtgaaccttttgcagccgttatttgtccactgtcagcaagctcttaattattcatggtccagtcttcttcatgagggtcgggctaaggttcctgacagcattggtaatctttctgggtcagaactgaaggtagaggtaatggaagaaaagttgctacgtgacttgactcgtgaagtatgttctgtcctttgggctttatcatcaccaggcttaaataatggacttccatccttggaacaacttggaccttccaaccggatggattctgttttgaagaatctggagtcctttgcttcaagttctctaactgggtaatgcaaatattttgagcaccttgcgtgatttacctaatacatttctatgccttttaaaccaaatgttattgaccttcccattctttgagctttg

SEQ ID NO: 72400 - DNA, 1261 bp, Zea Mays
tgcctcctaaccgcaggcttacaaaggtagaaagaacattgctgataccatggcttaccttcaaggagagggtcgcttactacgtggtgaacataatcatttatgtgaagcgtttcttgtgatgtcatcctctgctgggattcaacagcaacaagaagttcttgcttggttacttgaacctcttaataaaatgtggactcaagtggaatggcaaactgcatacttgtctgatccttctggtttgacaaacatgtttgctgatagccaattcatgtggtcaatttatcacacagttacattctttgaaaaggcactcaagagaagtggaaccaaaaagtcttcagcaactccacaagcacccaccacaacagtacctggttatctgcatccgatgtcttcacatctagcatggattgtgccccctctcttgaggctgctgcgatgcatacatgtcctttggtctgagccatttgcccagtctcagacggccgaaatcaaagcagcaaaaagcatgactgttgcagagcaggctagccttctaggagagacaggtaaacttaccaaaggtcaggttgctccagctgatggtttgctggatgttcaaagagatggagaatctaaagaaaacaatataaaaaactggttgcgtgggatccgagacagcgggtacaatgttttaggactagcagctactcttggggaagcattctttcgatgcatagagggttcttctgtcacccttgctattatggagaatgtgcaagttatggagtttcggcatctgcgccaacttatccaccttgttattattccatttgttaaatattgccctgccgatttatggctgtggctagtgaaccttttgcagccgttatttgtccactgtcagcaagctcttaattattcatggtccagtcttcttcatgagggtcgggctaaggttcctgacagcattggtaatctttctgggtcagaactgaaggtagaggtaatggaagaaaagttgctacgtgacttgactcgtgaagtatgttctgtcctttgggctttatcatcaccaggcttaaataatggacttccatccttggaacaacttggaccttccaaccggatggattctgttttgaagaatctggagtcctttgcttcaagttctctaactgggtaatgcaaatattttgagcaccttgcgtgatttacctaatacatttctatgccttttaaaccaaatgttattgaccttcccattctttgagctttg

SEQ ID NO: 72401 - DNA, 1748 bp, Zea Mays
cttcaagctgccactctaagccgatctctatcttctaacgctctctctctctctctcccttctgatattttgcaccgccgtgcacaggtttctggtgttttctccaatgcgttcatctccctctgcgctcctccctgtcgcgccctccctggtgcacgcgcgcagctccctctgccttccatggccgcgccggtttggagctatcttcacgcgccctggttcctgcacccagtcatcttctcctaccgcaactctctcctccctccatctctcctgcgcgcgcccagccccagtgcccggccgagatccctggccgccgcgccctgctctcggttgctgctcgccggtgctccagcttgtcgggcgcgcccctgctcctcgcccctccccagccgaggcccctccttcccgtttcccatggccaagcgtccggccggagcttcttttgctcagctctctgctgttgagctcctccggctgtgcttccctgctcagcgcgtttctccctactctctccctcctctggacatggatgcttaggagaagtggtagccccagctcggcaacaccaataggctccctggaaccagcctccctttcgagtccctccgcgtgccactggtctctgcttctcccacggccgccgtcgagtcgtcggactcgtccattccccgctcgcccctgcgctcgcccagctccctgtgcctgccattccagcaactctggcgtcaacgctccctgttcttgttgcttagagtgctccagcatctcgccctcgtggccttcgagttagattaagttattggtgagcgccgtgctgtcggactccatcatgcagccggtgttcgacaaagaaaaatctagtctaggattctgactcggcctcgaccctgtcgtccttgaaggtcctactatccctatgttgttcgtcgttatcttggtcatgtggtggccgcaacttcctatgttagtccctagtccacatcgtcgtccagctcagtagccgtataccatcgacagaggagagaaatcactggattgcgtgacaaagaagcgtagtccaatatgacacctgccagccaagcactcgacaaattccctgaatcggagaaccattaccgatctcgtgtattcgagtcagctattggaatggtcgcaagcgctcaatgtggaagaatggaattagatgaagaagaaagagaggttcagcgcgatgctcactaggtgctcaataaattgcgagtcacggaactctcgtcgacttcgaggttcttgcgtttatcgagccagattcagttatagcaagttatttcgctattccagtcaattagctgaattggtggaccgagtagaatattagtaggcctgtgtgatgataaaatattttaatcacttataaagatgtgtatatatttacgataaaaaatcgttgatatatgaactaaaatttgaattactactttcagtgaaaagaatattggtagatatatatatggtatgatggtgttcgcgatggtgaagtagttgtgtcgtgtgaagcttaggattgtttttaatttaggattgttattaaaatatgatgtgtaacacgggatatgggaaattatgaaataaaatgacttgtgatgatgaacccattgtggccatgatggtttcatcattcaagtagggtacctctctcaggtatcaagctctgggaaataatatgtaatgtagaccagacgttgagtaggaaagttcgcccgtta

SEQ ID NO: 72402 - DNA, 1220 bp, Zea Mays
gttttctccaatgcgttcatctccctctgcgctcctccctgtcgcgccctccctggtgcacgcgcgcagctccctctgccttccatggccgcgccggtttggagctatcttcacgcgccctggttcctgcacccagtcatcttctcctaccgcaactctctcctccctccatctctcctgcgcgcgcccagccccagtgcccggccgagatccctggccgccgcgccctgctctcggttgctgctcgccggtgctccagcttgtcgggcgcgcccctgctcctcgcccctccccagccgaggcccctccttcccgtttcccatggccaagcgtccggccggagcttcttttgctcagctctctgctgttgagctcctccggctgtgcttccctgctcagcgcgtttctccctactctctccctcctctggacatggatgcttaggagaagtggtagccccagctcggcaacaccaataggctccctggaaccagcctccctttcgagtccctccgcgtgccactggtctctgcttctcccacggccgccgtcgagtcgtcggactcgtccattccccgctcgcccctgcgctcgcccagctccctgtgcctgccattccagcaactctggcgtcaacgctccctgttcttgttgcttagagtgctccagcatctcgccctcgtggccttcgagttagattaagttattggtgagcgccgtgctgtcggactccatcatgcagccggtgttcgacaaagaaaaatctagtctaggattctgactcggcctcgaccctgtcgtccttgaaggtcctactatccctatgttgttcgtcgttatcttggtcatgtggtggccgcaacttcctatgttagtccctagtccacatcgtcgtccagctcagtagccgtataccatcgacagaggagagaaatcactggattgcgtgacaaagaagcgtagtccaatatgacacctgccagccaagcactcgacaaattccctgaatcggagaaccattaccgatctcgtgtattcgagtcagctattggaatggtcgcaagcgctcaatgtggaagaatggaattagatgaagaagaaagagaggttcagcgcgatgctcactaggtgctcaataaattgcgagtcacggaactctcgtcgacttcgaggttacgagtcactttgattgtgattgatgttaagtgccggtgggctcg

SEQ ID NO: 72403 - DNA, 1315 bp, Zea Mays
cagattgcttgctgagtgcctaccgcatgcacgacttatatttaaacacccactcgctcactagctcattgtctctctagtgtatttgcaacgtcaattagacagcagaagttgcaggaggtccagccgtccagctatggctctagaaaaaattgcctccatcgttcaagtgactccgttcaacgtgacgtcggactcatacgccacgttcatccagaacgtacgtgtagctctggccggcgcgaagcctgacacggtggtagggcccaaatccaaggtaagtcggccggtgctggccaaagaggcgtcgtcgtctggcctgcagccgccgaagtggatccacgtcgtgctcaacggcaagggcggcgccgcgcccacggtggccatccgcagcgacaacgcctacatcgtcggcttcaccaacagcaaggggacgtggtaccagctcagcaggacgggcgcccaggagaagctcgtcgacgacaaccccgtgatggcgggcttcgacggcaactacaacacgctcatcggcggcagcgacaagctgctgaccctgaacgtcgccaagtttagcgtggcggccgcggccgccacgttctggaaccacaaggccggaaacacatcatatggtgacgactgcggcagcgacgaggaagaagaaagcggcatgctccgcgctggcgacccgctgaaggtggcggtggcgaccctcgccgtggccatctgcgaggcggcgaggttcgtccccgtctccacggtcatcggcaaaggttggggcgagcaacgggtgagcgtcacggccaaggaggtaagctacatcatggactggggtgacctgtcccgcgcactgctcaagtggaagagtggcggttataaggacgacaagcctttccagccattcaagggtatcgggataaataacggggaggaagccttggctgtggtggcccttctgaagctcatgtcgggaagccagagcctgttggcctggctcaagtgcttctgggggcttctggtgaagaagctcaagcgggaggacatgaattacgagaagccaaagactgcagccatcgttaacccactttaatctgttatagcatacactcgtcatccgagaataaatgtgttgttaattgcttaattccaagggaagtatataatcctttaatgcgtattgcatgtgacatgttcacaagagtgtcttcaaatgtgatggtgtatccataaatatggagtacgaattaaacatgtttgtcactttctcgcaaaacaattaattaatgtggtattgtgtctatgaaagtgaatccaaaac

SEQ ID NO: 72404 - DNA, 1949 bp, Zea Mays
atctcttcccaccgtctttggctcaagcaaaaaaaaatctcctcatgtcttctaccacacaactctctagacttctcacacggcgctctttgctcctcgcctctcttctggctgcatggcccttgcgctcgctcagcttgctagtgaccagcacatggcgctcggcctcaatttcgccatgactgtgtccctgcagcagcgccgtccggccatcagcagcatcggcgagctcgcttcgagctccgtccatggccgcgagtccacctccgctgagctgccagtttccagctcctctatcatttgctccggcgtgcgggcgtcactcgtccgtgatcccagccgtgctagttgacatggtcggccattttagccggcatcgccaccagccgtccgtcgccttcctgctccccacgccgacgtccagtgcatcgtcgccagggttcgacttgcagcttgtgcaagctgctatcgagctcgcccggccatggcgctcacgccccagccttttgcctgctcctcgcaccgtgattgccgagttcaccggcaacagcagtctcgtcgtgccgcaaactgtgagctgggtctccgctgttttcggcggtcgactagctcgccaaggcgtttttcaccagtgaagcatacttgtcatgcccagtgtcctcgccgtgtctgtaaagccgttgtggagttgttgttgttcgcctccacgccatgtgagacagcgtcgtcgatcccttcaaggtgctcgtcgtcgtctcctcatcgccttgccgaacgtctcggaccacaccagcctgtcgctggagaaacatagtgcagtacgatgccccatcaagtgttcggtgttatgcgcgaactagaagtcgttgctgatatcgcggtcttcaagttgagtttattttattggtacgctagtttatcacgtgatgcagaaaacgagtcaactcgactgtaagatgatgtaatgggtgggctactccacaaggtaatgctgatggatcaacctgaagaagaaccgactgaacaagtgccaacacaaaaggatggtcgtcaagtggtcgtcatctaacaaacacttacgtagtgttattccaggcaagccccggtgcatgcaaccccttctgttggtaacttgttctcaaatgctatgagttaagaacaaggcaacacaaaatgttaatggttaaagacattcgtccttcaaagcattatttcccttaggatataatgatctttagacaaaggttatgaaaggacgtaccatcatcatcacagtatataataatggaagtagaagcatatgaaacatgggaaataacataaataatcatatgatattgtcagtatctcttttttatatcatcatgaataaacacgcatcatattgaattacatttataccttcatcttgacagaaggcgagaatccagatgtgacgtgcgagtgaataccagtcagcgtgaacagtacgatgtcactgttcatctatttataagcacagaacgcagcctgtgtagaattacaaccatgcccttaacatttactattgacttagggataatatatcgaggactagacagtcttttcccctttaagtcagtttcattttccaccgctaagccgaagcttttccacaggtggcttcggaactggttcatgcttctctcgaaccacgctcttcatatcatgtacaacttcatcccatgtccgaaggttcctgtacatatattatacttgggaaacatgttagttgtgttttgaggaccttcggaagacgaaggcccccaatagtagcccctcgcagtattaatttgttataacaacgaatttagacagcgacgtggacgaaggccttaagccgaaggtccaaaaaaacaccttcccttcgctagaatagcgacagtcaatgacagacgggacccgcctagttgcaaagcactaggcgtata

SEQ ID NO: 72405 - DNA, 2284 bp, Zea Mays
gcctccggggctctcttgcgctcacactcccaccgccgcatatccgagtagagcgccacgaactccacgagctctccgcccagcgagactgtccgatgccccctccttcacccgcctcgcaagtgcgcacttgcgatgctggcgccgcgtagtcgcccacgcgcgggacggtgagtgagatggcgcgctacttccgcagcagcaacctcgcctctaggatcttcgaccgtcagctcatctccccgctccctggcgctaccgttaacacgattagacagttttatgaaaatttggtcccaagctatactatatatgacatagattgcccagattattcgtttcgcaagttcactgatgatgggaaatatcttgtggcttttagccgaaaccatcaagatttgattgtataccgtccaatctggttcacatattcatgcaatgaagaatgtgaaactcatgagcttccgccaaaggcaaagaagtttgacagcttctttaagcagctttattcaattcctcttgcatctagcaatgagtatatttgcaaggactttttcctgtacatggaatgccatcgatttggtttatttgcaacatctactgcacaaagtaacgaatcaactgccactgagggtgcaatacatggggtgccattgattgagaaaataactttccatcttgtgaggctagaagatggtgtgatcctggatgaaaaggctttctgcaatgattttatcaatctggcacatagtattggtgcttacatgtatgaggacctgctttgtattgtttctttgcgataccaaacaatacatatcctacagatacgagattcaggcaaccttgttgaggtacgcaacattggtgcattctgtcgggaagatgatgagctatttcttcactcacatattcagactggttatgggggttcttttcttcctggcataaagcaacggttgttgtcatatattttttgcaagacgtggaatgaggttccagatcagactttgagggtccaacatctaaagaagaagttctattttcacttccaagattatgttgatcttatcatatggaaggtacagtttttggatcgccatcacctatttgtcaagtttggtagtgtggatggaggggtttctcggagtactgaccaaaacctagcattctttgccgtgtacaacatggagacaacagatatcgtttcacttcatcagaattcttcggaggatatctatgccttgtttgaacaattttatgatcattttcatgcaaatccacaagcttcatcacatggaaaatttatctcctctcattccaatgatattcatgctttggatcaacttcgggttataaaaaacaaagcaagtagctcctcacagtttgtgaaaaagatgatgacgtcattaccttacacttgccaatcacaaagtccttcaccgtacttcgacctgtctctttttagctgatttcagcaattgatcggcatcggcattgcacagagcatccaataaaatttatgtcagtgaggcaaaatgttgtcaaatttaagatcaagccaggttcagattctggtgcttctgacagcagagcaaaaagaatctcgtccttcttgtttcacccatttttcccgcttgcactttcgattcagcagacttatatgcagccaactgttgtcaacatccatttcaggagatagaaaagatggacaaatcttggatcaacagtaggctttttagcgagcaatatatcacaggagtgaggggttttatgaagttaatttcagagcgatttgatgatagtgaggaggtactatgtccatgtagaaagtgtttgaatcggcttgccaaacctaagtcacagatacaggatcatttatatattcatggaatggcgagcacatacactacgtggatacatcatagggaggaacagttggatgctgaactgagtgaacaagctggccatctacatgaacattatagtatgaatgaggatgtttgtatgaatgggcctgaaaaccctgaagatagattgcctgatatggtacaagattttttcagagctgaagagggaggtgcacaaaagattatgcaaaaaataatgagtgcccaaaaaaactctgaggatgcacaatggcacaagttgaagaggaaagaagtggaaaatgagcttagccatccagctgatggtcaggcatggaaagactttgatagaaaaacataattggtttggagaagatcctagaaatataaggcttgggcttgccacagacggttttaat

SEQ ID NO: 72406 - DNA, 1769 bp, Zea Mays
gcctccggggctctcttgcgctcacactcccaccgccgcatatccgagtagagcgccacgaactccacgagctctccgcccagcgagactgtccgatgccccctccttcacccgcctcgcaagtgcgcacttgcgatgctggcgccgcgtagtcgcccacgcgcgggacggtgagtgagatggcgcgctacttccgcagcagcaacctcgcctctaggatcttcgaccgtcagctcatctccccgctccctggcgctaccgttaacacgattagacagttttatgaaaatttggtcccaagctatactatatatgacatagattgcccagattattcgtttcgcaagttcactgatgatgggaaatatcttgtggcttttagccgaaaccatcaagatttgattgtataccgtccaatctggttcacatattcatgcaatgaagaatgtgaaactcatgagcttccgccaaaggcaaagaagtttgacagcttctttaagcagctttattcaattcctcttgcatctagcaatgagtatatttgcaaggactttttcctgtacatggaatgccatcgatttggtttatttgcaacatctactgcacaaagtaacgaatcaactgccactgagggtgcaatacatggggtgccattgattgagaaaataactttccatcttgtgaggctagaagatggtgtgatcctggatgaaaaggctttctgcaatgattttatcaatctggcacatagtattggtgcttacatgtatgaggacctgctttgtattgtttctttgcgataccaaacaatacatatcctacagatacgagattcaggcaaccttgttgaggtacgcaacattggtgcattctgtcgggaagatgatgagctatttcttcactcacatattcagactggttatgggggttcttttcttcctggcataaagcaacggttgttgtcatatattttttgcaagacgtggaatgaggttccagatcagactttgagggtccaacatctaaagaagaagttctattttcacttccaagattatgttgatcttatcatatggaaggtacagtttttggatcgccatcacctatttgtcaagtttggtagtgtggatggaggggtttctcggagtactgaccaaaacctagcattctttgccgtgtacaacatggagacaacagatatcgtttcacttcatcagaattcttcggaggatatctatgccttgtttgaacaattttatgatcattttcatgcaaatccacaagcttcatcacatggaaaatttatctcctctcattccaatgatattcatgctttggatcaacttcgggttataaaaaacaaagcaagtagctcctcacagtttgtgaaaaagatgatgacgtcattaccttacacttgccaatcacaaagtccttcaccgtacttcgacctgtctctttttagctgatttcagcaattgatcggcatcggcattgcacagagcatccaataaaatttatgtcagtgaggcaaaatgttgtcaaatttaagatcaagccaggttcagattctggtgcttctgacagcagagcaaaaagaatctcgtccttcttgtttcacccatttttcccgcttgcactttcgattcagcagacttatatgcagccaactgttgtcaacatccatttcaggagatagaaaagtctatacagaaaggagttacagaatgagggaggatttcctgatgttgaaaaacaagtagaaaaac

SEQ ID NO: 72407 - DNA, 2575 bp, Zea Mays
gcctccggggctctcttgcgctcacactcccaccgccgcatatccgagtagagcgccacgaactccacgagctctccgcccagcgagactgtccgatgccccctccttcacccgcctcgcaagtgcgcacttgcgatgctggcgccgcgtagtcgcccacgcgcgggacggtgagtgagatggcgcgctacttccgcagcagcaacctcgcctctaggatcttcgaccgtcagctcatctccccgctccctggcgctaccgttaacacgattagacagttttatgaaaatttggtcccaagctatactatatatgacatagattgcccagattattcgtttcgcaagttcactgatgatgggaaatatcttgtggcttttagccgaaaccatcaagatttgattgtataccgtccaatctggttcacatattcatgcaatgaagaatgtgaaactcatgagcttccgccaaaggcaaagaagtttgacagcttctttaagcagctttattcaattcctcttgcatctagcaatgagtatatttgcaaggactttttcctgtacatggaatgccatcgatttggtttatttgcaacatctactgcacaaagtaacgaatcaactgccactgagggtgcaatacatggggtgccattgattgagaaaataactttccatcttgtgaggctagaagatggtgtgatcctggatgaaaaggctttctgcaatgattttatcaatctggcacatagtattggtgcttacatgtatgaggacctgctttgtattgtttctttgcgataccaaacaatacatatcctacagatacgagattcaggcaaccttgttgaggtacgcaacattggtgcattctgtcgggaagatgatgagctatttcttcactcacatattcagactggttatgggggttcttttcttcctggcataaagcaacggttgttgtcatatattttttgcaagacgtggaatgaggttccagatcagactttgagggtccaacatctaaagaagaagttctattttcacttccaagattatgttgatcttatcatatggaaggtacagtttttggatcgccatcacctatttgtcaagtttggtagtgtggatggaggggtttctcggagtactgaccaaaacctagcattctttgccgtgtacaacatggagacaacagatatcgtttcacttcatcagaattcttcggaggatatctatgccttgtttgaacaattttatgatcattttcatgcaaatccacaagcttcatcacatggaaaatttatctcctctcattccaatgatattcatgctttggatcaacttcgggttataaaaaacaaagcaagtagctcctcacagctgatttcagcaattgatcggcatcggcattgcacagagcatccaataaaatttatgtcagtgaggcaaaatgttgtcaaatttaagatcaagccaggttcagattctggtgcttctgacagcagagcaaaaagaatctcgtccttcttgtttcacccatttttcccgcttgcactttcgattcagcagacttatatgcagccaactgttgtcaacatccatttcaggagatagaaaagtctatacagaaaggagttacagaatgagggaggatttcctgatgttgaaaaacaagtagaaaaacaattttcttcctggtttaaaaattatattggaacactttggcatgagcgaggagaagatctctgttctgatctattagctttgtcatgtgaacctgatctgcgaataagagtttattcagcatgtattgttgatggtgttcgataccacactgtcgaccgtgagaaatataggaggacacaaaatagtggtgtaatggcacaaggcacacataatggtgaagatattgaattttatggttccttaagagaaataattcagttgcaatataatgcagacaagggtggacaccggtgagtggttatttttcgatgtgattggtttgacacagaaagcaagaagggaagaataaaagatgatggattattgaaaagcatcaaccgttctagttgttggtacaaaaatgatcctttcattcttgcgccacaggctactatggtttttatttgcaagacaccaaatatggaggtagctggagtgtagttcaaaaatttgcgcatagacacctttggaatgttgatgaaaattgtagtgatgaaataccaaatggtgtgtcgctttcttaccaagacgatgaatgtgttgcttctaatattcagcatactgaagtggatataaacaatgatattgttggggtacaaaatgttgatattatagatgcaagtgtagttgaagatctacatagacaaagggatgaagaagattattttgaggacgaagaagatgaaacaggatggcaatatgccagtgataatgacgagagcaatatcccaaatgttgttgatgataatagcgatgacgactagatgggtgatcttgaatgagttagcaacagacataactgtggacactctgagttctgtttttagttgtagtgtgttggactgagg

SEQ ID NO: 72408 - DNA, 1070 bp, Zea Mays
cgtccctcttcttcgcaacggcggtcgcagatgtcgctgccatagccgggctgtggatgacctcccccctttctccgaactgggaccccgagagataaatgggcactcctgtgacctgttccttcccactgctaccttcttgcgcaagctcaatgccctagaacaaaccgtcgctgctagtaccgagcccacggaaagtgagatccgccgtcgtcacctcgagccgttggcgtcgcccgagctcaggaaaggggtccaaggacttcgtttgacgctgttgatgctcgccggtgaccgaacgcagcgttgaatcgactgcgccgtcgacaattgctcgccggagttcaaatttcatcccgggccgcaccgtgttgaggacgggtgcctgctagtcgcatttctttccagtgagtctccgtgctcatccgtactttccttcccttcgaaatggtgtaggtctctcttgggttaggtcagtatttgaccgtgttgagagcacgccggcgaggttgtcgcctcggccgcacccgcgtagcgcaccgtcgcgggaggaagacgatggtccgcggccgttggatctagcgcctgcggccgagattagctaaccgagcgtactcctctcgggcgaacagatctgggccgtagatgcaggatcgtgcaaacggggagtcaatcgcagtcgtattctgtaacaccataaaagccatcaattaaaataataaatttagacattatattaattagggtaataaatttatttgcatcgtttttctttgcatgcacgtgatttcttatcggatgtttaaatatcaatccattttaaaaagaagtactagtaattaaataataattaagtattatagtaattattagtctaaaaataagtacttcatttataaatatttttggtaatttttttatgatttttagagttctttaaaaatgaatttcggaatttaaaaataaaaaaaaaacctaaaactacccagccggcccacctaggggcccatgccccaaaccctagcactagcaccgcgcgcgcacgctccccagccaaaacagccgccgcc

SEQ ID NO: 72409 - DNA, 430 bp, Zea Mays
cgtccctcttcttcgcaacggcggtcgcagatgtcgctgccatagccgggctgtggatgacctcccccctttctccgaactgggaccccgagagataaatgggcactcctgtgacctgttccttcccactgctaccttcttgcgcaagctcaatgccctagaacaaaccgtcgctgctagtaccgagcccacggaaagtgagatccgccgtcgtcacctcgagccgttggcgtcgcccgagctcaggaaaggggtccaaggacttcgtttgacgctgttgatgctcgccggtgaccgaacgcagcgttgaatcgactgcgccgtcgacaattgctcgccggagttcaaatttcatcccgggccgcaccgtgttgaggacgggtgcctgctagtcgcatttctttccaaggattgtgcggtagacgatccg

SEQ ID NO: 72410 - DNA, 433 bp, Zea Mays
cgtccctcttcttcgcaacggcggtcgcagatgtcgctgccatagccgggctgtggatgacctcccccctttctccgaactgggaccccgagagataaatgggcactcctgtgacctgttccttcccactgctaccttcttgcgcaagctcaatgccctagaacaaaccgtcgctgctagtaccgagcccacggaaagtgagatccgccgtcgtcacctcgagccgttggcgtcgcccgagctcaggaaaggggtccaaggacttcgtttgacgctgttgatgctcgccggtgaccgaacgcagcgttgaatcgactgcgccgtcgacaattgctcgccggagttcaaatttcatcccgggccgcaccgtgttgaggacgggtgcctgctagtcgcatttctttccaaagaggattgtgcggtagacgatccg

SEQ ID NO: 72411 - DNA, 8516 bp, Zea Mays
attatgtatatgtgtatgagcgttatggaattgtttggtagtttcaagcgattattcgtacaccttgttatttcatgttaatcgatgcgttgaattttggattaggaatatgacaacatttagtagtcacactttggcaataaaaatgctagataggaatttttgtagttaaattgggttacaataaattttagaaactacttggagaattataggtgcatttttgatggattagaaaatggtaatagaactcatgtcatttgaataatataggattttagatgatttatctaattattttattggcatatttttttataaagaaaggagaaaatatcattggtagatggcaaaataggtttttgttagtcaaataaacatgttcacagatttagaacttaaaattgttagaatactagtttatgtcaaataacctcgcttgtgttagaaaatgttcaattaatagtttatgtagatttttagaatattaatattattgatttcatttttgctatactaactaatttgtgttagaagtaataaaaggtattaatttatttattaggattaaaagttaataagtattatttatctccattgatgatgttaaaataaattaatattagttaaaattatatttattacacccactcataaattcaccattaggattcatattaatagccacaattgaattaataagtatttacgcgattagtacgtaattaagatatgattagtgcgataggttaatgtgtgcttaatgacatattggtgtatgtttatgaatggtgcatgtttatttattggtgtatgttttatttttgtatgtgcgctatgcgactctattagaagaggattgtgcggtagacgatccgaactcgttcgaggacgatccgcaggactcgcttgagcaaggcaagtggattctccctctgcatattctgtttgtacctattcattgcatataataatgtttattgtttttatatatattgcataatttgatgggatagcctaattaaggatttcctagatttactacctgtattccttgtttaacctgggaaaataattaagctgtgcaagattcatgctaccgctcaacttaatgattcttaatgtcactcttgaattggttttaatgttccaaaaatgttaatttgcaattatgacattaacccgatggttaaagataactttattacaaattaattggaacatggagtgaccacccaggataacagtgcaaccacgagtgctatcatggctctggctttggtaaatagctctatatgcttagtgcctagcaaccttacctgaaagatgggcaagagggggagcggtaggtgctggcagcccacgttaacatggggtcgtattcttggctaaggtacttcacccagggggccaccaccatcgtcttagaaaccttagcgggttgcttcgtattaagtgtattttgtgaaaacctcataatggatccctagccattcacctcggcagtgtctaagggtccgatcaacccgggctagatgggatacatggcttgtgggtaaagttgtaccacctctgcagagtgtaaaactgatatatcagccgtgctcccggttatgagcgacctggactcctcacatgataattgaacttgaagatggaattaaattgagatccgatgatctgccaataatttgcttaagtggtttcacttaagtgtttttgttatattcatattcctttgtttaagtgggatacttgggattcactcttattagtaagacaggtgttgttaataaaatattgaccaactaaaatgcttactgctcaaccttagcctcaccttgttatacctgcattagtttttcccccacttgctgagccccgaccataagtgagctcacccttgctaatattttgatcagagggtgatgctggagactttgatggagattttatcgacgacgatgatttctaagtctaatgatgagccggtcatcttcctgtgggagattgcccagttgtttatattccgctttactttgatgtgatacttgttaaagatacaatgattcagatgatgtaataaagtattctactctctttacgcctttattgcattgtcttttgatatattacacttgtgacgtcaacatatgtgtggaaatggatcctggcacacatatgctatgcgctcggttctaccccctggaaccgggtgtgacagaagtggtatcagaggctatgctgaccctaggtcattagattagttagaaatggaaagcctagttgttcaaaacttgctattttcattcctataaattcctttatcagtcttacctctttgaaattcaactgagttgacacttctcttgtagatggttcgcactcttcaaactacccgcgtcaacaccagctacgcccctcagccccggcaggtcccggtctacccagtggtagtcgaggaagctccagcgaatctccctcccgtccgagtagagaacgtaatcaacctggaggacagctcggaggagcagctgccgacccccaccccattggccgagtccctggccgtcgcagctgggtcatcgacgtcagcatcgtcggcaccagccttccaagcacctgcacctggaggcaacgaccccgacgactccggagacggcgatgacgaggacgatgacgacgaagacgatggagaagacggacacatcaacgaggaagctgactacgcccagcaggaccacttcatggggattgatccagttgtcgaacattacacatcaatgttcgagacaggacacttcccaaacctgctgcaagcagtgctgcacgagctaggagcctacgcccgccccctgtacgagacgaggcgagtgagcgagcctccccgggcttgctattacatcactcgcatccatgtcagggtgatggatgcaggtgacaggggattcaggactctgtctgctcacgagtccctgataccgctgtccacctacgctgcctcggtcagcgacgctgcccgtcggaccctgtggtcgctcagccacacctaccggcagcagctgcagaacacgaggttcaggcaccttcctcagcgcctatgtggagaaagccagaccaacattgtcccaggtgaacctggtgaggatcgcctcaacaccctagctggtgtagtggccggtctcaacaacgacctggacagtgccactctggacctctacagtgtgcacttggagctggagaatgcccacgccaggattgcagccctggaagcccaactgcaaggactggatctgccagaagctcaggtccccaccgtggcgttgtctcctccccgcaagaggttgcgctatggagagcccggatcagtcactaggctgctttaggagttttgagtcatgatgtaataagttatacttcgcgttagacgatgatactctctttatgttatcatatcaataaatatcaaccatgtgatggtgattgattgaaatgtttgatttggatctttgtttgagtgcaatggtcttatggaatgatggccataagaacatataaaatttttaaaacttaagtcatttcccctctagaatctttctactcttctcttctctaagatgttcactttctaaccaatcagatggtgaaccaacgtcaaggacctaacaaccggaactagcgtggacaacaagcaccaccaccaccaccacctaatcccaacatggagcagttcatcgccgcccaaatgcagattctgcaaggactcactgctgcggttcagcaattacaacagaaccaacagaatcagcaaccccagcagcagcagtatgcaccccggccagagataagcaccgggacttcatgagtcatcactcgccgacattctctcatgcggttgatcccctggatgccgatgactggctcaaagtcattgggaagaagctggacatcgctcagtgcaacgaccgagagaaggtcttgtacgcctcgggaagactcgagggagctgcgtccgattggtgggatgccttcacagcggcacatcccaacgctgataccataacctggcaggagttccaagagaacttccgcgctcaccacattccttcgggaatcatgaagctgaagaagaaggagttcctttcccttactcaagggaatatgtctgtcagtgagtatcgtgatcgcttcactcagctttcacgctacgcaccagaagaagtggacactgatgagaagcgccaagagcgtttcctggaaggattgattggacctctgaactatcaacttcagagtcacacttttcccaacttccagacactgctgaacaaggcaattggccttgagagtaaaaggaaggagctatctgaccacaaaagaaaatttcaaggtcagtccagcaggaacacccggccaaacaatgctcaaggttcgcagttccgctctggaaatcagggtggaaataattatcaagtacagcgctctggacagcaaagccagagaagtaatcaaaaccagtaccagcaaagaagcaactcccagaccaaccagaggtctggtggaaattcacagaaccgtcaaggtggcaccaacaacactcaggccagaaacaacgcacctgtccaacccaatggatgtttcaagtgcggtgagctaggccactatgccaacaactgcccaaggcgcaaccagcagacaccccagaaaggcaataatcagaggaatgaccagaacacccccgctcgtggatctgctcagaacaagacaccacagaaccagagcagaggaagggtcaatcacgtcactgcggaatcagtgcctgaggatgccgacattgtgtatggtatgttccttgttaactccatacctgcatcagttttatttgactctggagcatcacattcatttataactgagtcatttgtggaaaaacataacatacctaagtaccctctgaagaggatattacacattagttcaccgggaggtgacatgaaggccacacactcatgccctcatgttaatatcaagattcaaggaatagattttacagtcgatccagtggtcctaggatccaacgggattgatgtgattcttggatgcaactggttgaaaagttgtgatggagtgatacagtgtgccaatataactattatgttgacaagtcctcaaggtgaaagaatccaagttaacatagacaagtcaacagatgaaaaagggaagacagtgatcaatcacttggaagaaaagcccttggaaaatatcaaagtagtgtgtgaatacccagacgtatttccggaggaattaccaggtatgccacctgaccgtgatatagagttttctattgaattagtacccggaaccgcacctatcttgaaaagaccttatagaatggatggcaaagatttagtagaactgaagaaacaaatagaagaattactagaaaaaggttttattcgcccaagttcatccccttggggagccccagtgctgtttgtgaacaagaaggatggttcgagaagaatgtgcgttgattatagaagtttgaatgaagtaaccgtcaagaataaatacccactacctcggattgaagatttattcgatcaaatgaagggagctaagatattctcgaagatagatctgagatcgggatatcatcagttaaagattcgagcagaagatgtaccgaagacagccttcacaacgagatatggattatatgagtttttggtcatgtcatttggactgactaatgcaccagcatactttatgaacttgatgaataaagtattcatggaatatctggatcagtttgtggtcgtattcattgacgacatactgatatattctccgaatgaagaagcacacgaagatcatctaaggctagtcctacaaaagcttcgtgacaaccaactgtacgcaaaattctcgaagtgtgatttttggttgaaagaagttgctttcttagggcatattgttaccgatcgtggaattaaagtggacccaggaaagataagtgagatactagattggaagcaaccaaaggatgcgtccaagatcagaagttttcttggattggcgggatactatagaagatttattgaaggtttttccaagttagtaaaaccacttacttctctactagagaaaggcaaagagttcaaatgggatgaagcttgccagaattgttttgaagaactcaagaaaaggttaaccactgcaccaatattggtaatgccagacatccacaagggatttgatgtgtattgcgatgcatcacaccttggacttggatgtgtgctaatgcaagaaggaaaagtgattgcttatgcttcaagacagttgaggaaacatgagaagaattatcctacgcatgatttggaactagctgccgtagtgcatgctttgaagatttggaggcactatatgattggaaacaagtgcaaaatcttcacggatcacaaaagcttgaaatacatattcactcagaaggaactcaacctcagacagagaagatggcttgagttgattaaggactatgatttggagatacaatatcaccccggaaaggcaaatgtagtagctgatgctttgagccgtaagggtcaagtgaacaacatcactactcatttgatgtcacaagaattgtgctgggaaatggaacgactcaaccttggattgctcaataatgtagaggcaacggtgatggaagtcgaatctactttggaagaagagattcgtaaaggacaagagtctgatgagaaaattaaggaaattaaagctttgattagtttgggtaaagccccatatttcacggaagatgatcaaggcacagtatggtttaaaaagagaatctgcgtaccagaaatcgagcacttgcgccaacttattttgagagaagctcatgattcagcttactctattcaccctggaagtacaaagatgtaccaggatcttaaggaaaagtattggtggtatggtttgaaaagagatgttgctactcatgttgcattatgtgacgtgtgtcaacgagttaaagccgaacaccaaagaccagcaggattgctacaacctctcaagataccggaatggaaatgggaagaaatcagtatggatttcatagttggactaccccgtactcgagatggctatgattcaatatgggtcatagtagacaggttaactaaagtagcacactttatacctgtgaagacaacctactcaggagcccagttagcagagttgtacatgtcgaggattgtttgtctgcatggagtaccgaagaagatcgtatcagatcgaggaacccagtttacctcgcgcttttggaaaagacttcatgagtccatggataccaagctaaattttagttcagcttatcatccgcaaacgaatgggcaaacggaaagaacaaaccaagtgttggaagatatgctaagagcttgcgctctaaagcatggtagaagctgggataaaagtttgccttatgcagaattttcgtataacaacagttatcaagcaagtctcaaaatggcaccgtttgaagcactatatggacgaaagtgtagaacaccgctttattggaatcagtctggagaaagtcaagtatttggtccagaaattctccaagaggcggaaaaacaagtgcagattatcagagaaaatttgaagacagcacagtcaagacagaagagctatgctgataatagaagaagagagttgatgtttgaagtaggagactttgtctaccttaaagtttcaccgatgagaggaatgaaaaggtttaaggttaaaggaaaattatcacctcgctatattggcccattcaagattttggaaagaaaaggtgaagtagcctaccagttagagctacccgatagattatcggatgtgcatgacgtatttcatgtgtcgcaactcaagaagtgcttaagagtaccagaagaacagttacccatggaagaactgaatgttaatgaagatttgacttattcggagtacccaatcagaattctggaaacatctcgcagaattacacggagtaaagtcattaacatgtgcaaagttcagtggagtcatcattcagaagatgaggccacttgggaaagagaagatgaactcaaagcagaattcccccagttattctcggaaggttcttaatctcgaggacgagattatttttaagaggggtaggtttgtaacaccataaaagccatcaattaaaataataaatttagacattatattaattagggtaataaatttttcttagtgtttaactatttatttgcatcgtttttctttgcatgcacgtgatttcttatcggatgtttaaatatcaatccattttaaaaagaagtactagtaattaaataataattaagtattatagtaattattagtctaaaaataagtacttcatttataaatatttttggtaatttttttatgatttttagagttctttaaaaatgaatttcggaatttaaaaataataaaaaaaaacctaaaactac

SEQ ID NO: 72412 - DNA, 355 bp, Zea Mays
ttggacaagtgcagggatacctgtccaacttctgctgccttaaaggacatggtctagtagagtttttctcctaccttgagttctaaccatagtctgcagcttgggtgtggtaattcttgtgttcatggtgatgataatcctcttcccagccagcaaattggtattgtccagagctgagcatgctattccctgttcctggtgaccacactcgcaatttgtccatctcaccgtggccaggacgtccccagagatttcatgcccaacggggttgcgccgccgtagaccggagccgtggacagctccatcgtcgaccgaccaacttgcatcttccccaagcgattacgtgcacgcacag

SEQ ID NO: 72413 - DNA, 3749 bp, Zea Mays
aaacaacataaaattctcgtacagggcgccaaatataaaatatgccactccatttgcccccaaattgattttagtcttaaatcccctgcgaggctgcgtctctcgaagtccaaaacgccccgccctggaaccctaaccctacctttcctctcccgccaccgcccgccccaatggcgaagccgatgaagtacgacgatgaggaggagatctcgtcctccgccgaggaggaggaccagtccgacgccgccggctccgtatctggcgaggaaggggatgacgacgacgaggatgctgcggcgccgcccgcggaggaagctgagggcgaggggcagcaggaggaggaggtcgacgaggaagagatcgaagccgtcactaccggcgctggagctgaggacgaggaggacgccggtgccgttaccgccgctgaaggcgacgacgagtcccagtccaccgaggacgacgagcccgtcgcgagggacaaggacgatgacgacgagactgatgcagtggttgggaagcgagagaaagcaaggctaaaagaactccagaagatgaagaaacataaaatccaagaaatattagatactcaaaatgccgccattgatgctgacatgaacaataaagggaagggacggttgaagtaccttcttcagcagacagaaatatttgctcactttgcaaaaggaagtcagtccaacgagaaaaagccacgcgggaggggacgccatgcatcaaagatgactgaagaagaggaagatgaagaatacctcaaagaggaagaagatgcccttgctggtgcagggggaacacgtttagtttcacagccttcatgcatcaagggaaagatgcgtgattatcaattagctggacttaattggcttatacgattgtatgagaatggtatcaatgggatattagctgatgagatgggacttgggaaaacacttcaaactatttcattgctgggctatctgcatgagttcagaggtataactggtcctcacatggtggttgcgccgaagtccacccttggcaactggatgaaggaaatccaacgtttttgccctatcctacgtgctgtgaagttcttgggcaatccagaagagcggaaccatataagggacgatttgctacagcctggaaaatttgatgtgtgcgtgactagttttgaaatggcaatcaaagaaaaatctgcgttgaggcgcttcagttggcgctacataattattgatgaagctcaccggataaaaaatgagaattctcttctatcgaagactatgaggatttacaacactaattatcgtctcctcatcacaggcactccactccagaataatctccatgagctctgggctctcctcaatttcttgctccctgaaatatttagctctgcggaaacctttgatgaatggtttcaaatttctggggaaaatgatcaacaggaggtggtccagcagcttcataaggttcttcgcccatttcttcttaggaggctcaagtctgatgtagaaaagggtctacctccgaagaaggaaaccatacttaaagttggaatgtctcagatgcaaaagcagtactatcgcgctctgcttcagaaggatttggaggttattaatgccggtggtgaacgcaagcgattgcttaacattgccatgcagctgcgcaagtgctgcaaccatccatatttgttccaaggagctgaacctggcccaccctacacaactggtgaacatctagttgagaatgcaggaaaaatggttctactagataaattgctgcccaagctaaaggagcgtgattccagagtcctaattttttcacagatgaccaggcttttggatatcttggaagattatcttatgtatagaggttatcagtattgtcgaattgacggaaatacaggtggagaagatcgtgatgcatccattgaagccttcaataagccaggaagtgaaaagtttgttttcttactttcaactagggcaggtggccttggtatcaacttggccactgctgatgttgtggttctttatgacagcgattggaatccacaagctgatctgcaagctcaggaccgtgcacataggataggtcaaaagaaagaagttcaagtgttccgcttttgcactgagtacactatcgaggaaaaggtgattgagagagcatataagaagctagcattggatgctttagttattcagcaaggacgattggcagagcagaaaactgtcaataaggatgaccttctgcaaatggtgcggtttggtgctgaaatggttttcagttctaaggacagcacaataactgatgaggacattgaccgtattatagctaaaggagaggagacaacagctgaacttgatgcaaaaatgaaaaagttcacagaggacgccattaaatttaagatggatgataatgccgaactgtatgattttgatgatgagaaggatgaaaacaaggttgatttcaagaaacttgttagtgataactggatcgagccacctagaagagaaaggaagagaaactactctgagtctgattactttaagcaagcgcttcgccaaggtgcaccagcgaagcctagggagccaaggattccaagaatgccgcacttgcatgatttccagtttttcaataaccaaaggctaaatgaattgtacgaaaaggaagtgcggtacctcatgcaagcaaaccagaagaaagataccattgatggtgaagacgaagatcaattggagcctttaacagcagaggagcaggaagagaaggagcagttattagaagagggttttgcatcatggacaaggagagacttcaacacatttattcgtgcatgtgagaaatatggtcgcaatgatattaaaagtatatcctctgaaatggagggtaagacagaagaggaagttcaacgctatgctaaagttttcaaggagagatacaaggagctgactgattatgatagaattataaaaaatattgaaaggggggaagcaagaatatcccgcaaggatgagattatgaaggctattgggaagaagttagaccgctacaagaacccatggttagagttgaaaattcaatatggccaaaataaagggaagttctataatgaggaatgtgaccgctttatgctttgcatggtgcacaaacttggatatgggaactgggatgaactgaaagctgccttccgtatgtctcccttattccgatttgattggtttgtgaagtccagaactacccaagagttggctaggcggtgtgatactcttatcagactggttgaaaaggaaaatcaagaatatgatgagcaagagaggcaggcaaggaaggagaaaaggcttgctaagaatacgactccaacaaagagagcagcactaaggaattcagagggtgagagtgctccgttgagctcattcaagaggcgacggcagtctcttatggacgattatgtgggctcgctctcagcgagatgcagtctctgcaatgctttaagcccgtacgtgctgtgcttagtttcttgtgcacgtgagttgaatgcctcaagggctggtgactttgtagttgctgtagattcggacttcgcaattgcaactgttgctacacttttgattcactttttcatcgtggccctaacactcattccaaattataagattagagattttaacttaacactagagttcgatcaaatttatgcaataaaataataattatccctcctaatatataaggcgtaagcacctttggtt

SEQ ID NO: 72414 - DNA, 3740 bp, Zea Mays
cccaaattgattttagtcttaaatcccctgcgaggctgcgtctctcgaagtccaaaacgccccgccctggaaccctaaccctacctttcctctcccgccaccgcccgccccaatggcgaagccgatgaagtacgacgatgaggaggagatctcgtcctccgccgaggaggaggaccagtccgacgccgccggctccgtatctggcgaggaaggggatgacgacgacgaggatgctgcggcgccgcccgcggaggaagctgagggcgaggggcagcaggaggaggaggtcgacgaggaagagatcgaagccgtcactaccggcgctggagctgaggacgaggaggacgccggtgccgttaccgccgctgaaggcgacgacgagtcccagtccaccgaggacgacgagcccgtcgcgagggacaaggacgatgacgacgagactgatgcagtggttgggaagcgagagaaagcaaggctaaaagaactccagaagatgaagaaacataaaatccaagaaatattagatactcaaaatgccgccattgatgctgacatgaacaataaagggaagggacggttgaagtaccttcttcagcagacagaaatatttgctcactttgcaaaaggaagtcagtccaacgagaaaaagccacgcgggaggggacgccatgcatcaaagatgactgaagaagaggaagatgaagaatacctcaaagaggaagaagatgcccttgctggtgcagggggaacacgtttagtttcacagccttcatgcatcaagggaaagatgcgtgattatcaattagctggacttaattggcttatacgattgtatgagaatggtatcaatgggatattagctgatgagatgggacttgggaaaacacttcaaactatttcattgctgggctatctgcatgagttcagaggtataactggtcctcacatggtggttgcgccgaagtccacccttggcaactggatgaaggaaatccaacgtttttgccctatcctacgtgctgtgaagttcttgggcaatccagaagagcggaaccatataagggacgatttgctacagcctggaaaatttgatgtgtgcgtgactagttttgaaatggcaatcaaagaaaaatctgcgttgaggcgcttcagttggcgctacataattattgatgaagctcaccggataaaaaatgagaattctcttctatcgaagactatgaggatttacaacactaattatcgtctcctcatcacaggcactccactccagaataatctccatgagctctgggctctcctcaatttcttgctccctgaaatatttagctctgcggaaacctttgatgaatggtttcaaatttctggggaaaatgatcaacaggaggtggtccagcagcttcataaggttcttcgcccatttcttcttaggaggctcaagtctgatgtagaaaagggtctacctccgaagaaggaaaccatacttaaagttggaatgtctcagatgcaaaagcagtactatcgcgctctgcttcagaaggatttggaggttattaatgccggtggtgaacgcaagcgattgcttaacattgccatgcagctgcgcaagtgctgcaaccatccatatttgttccaaggagctgaacctggcccaccctacacaactggtgaacatctagttgagaatgcaggaaaaatggttctactagataaattgctgcccaagctaaaggagcgtgattccagagtcctaattttttcacagatgaccaggcttttggatatcttggaagattatcttatgtatagaggttatcagtattgtcgaattgacggaaatacaggtggagaagatcgtgatgcatccattgaagccttcaataagccaggaagtgaaaagtttgttttcttactttcaactagggcaggtggccttggtatcaacttggccactgctgatgttgtggttctttatgacagcgattggaatccacaagctgatctgcaagctcaggaccgtgcacataggataggtcaaaagaaagaagttcaagtgttccgcttttgcactgagtacactatcgaggaaaaggtgattgagagagcatataagaagctagcattggatgctttagttattcagcaaggacgattggcagagcagaaaactgtcaataaggatgaccttctgcaaatggtgcggtttggtgctgaaatggttttcagttctaaggacagcacaataactgatgaggacattgaccgtattatagctaaaggagaggagacaacagctgaacttgatgcaaaaatgaaaaagttcacagaggacgccattaaatttaagatggatgataatgccgaactgtatgattttgatgatgagaaggatgaaaacaaggttgatttcaagaaacttgttagtgataactggatcgagccacctagaagagaaaggaagagaaactactctgagtctgattactttaagcaagcgcttcgccaaggtgcaccagcgaagcctagggagccaaggattccaagaatgccgcacttgcatgatttccagtttttcaataaccaaaggctaaatgaattgtacgaaaaggaagtgcggtacctcatgcaagcaaaccagaagaaagataccattgatggtgaagacgaagatcaattggagcctttaacagcagaggagcaggaagagaaggagcagttattagaagagggttttgcatcatggacaaggagagacttcaacacatttattcgtgcatgtgagaaatatggtcgcaatgatattaaaagtatatcctctgaaatggagggtaagacagaagaggaagttcaacgctatgctaaagttttcaaggagagatacaaggagctgactgattatgatagaattataaaaaatattgaaaggggggaagcaagaatatcccgcaaggatgagattatgaaggctattgggaagaagttagaccgctacaagaacccatggttagagttgaaaattcaatatggccaaaataaagggaagttctataatgaggaatgtgaccgctttatgctttgcatggtgcacaaacttggatatgggaactgggatgaactgaaagctgccttccgtatgtctcccttattccgatttgattggtttgtgaagtccagaactacccaagagttggctaggcggtgtgatactcttatcagactggttgaaaaggaaaatcaagaatatgatgagcaagagaggcaggcaaggaaggagaaaaggcttgctaagaatacgactccaacaaagagagcagcactaaggaattcagagggtgagagtgctccgttgagctcattcaagaggcgacggcagtctcttatggacgattatgtgggctcgggaaggcgaaagagagggtgatgtgatgtttgacatcctgcctttggagctctcagcgagatgcagtctctgcaatgctttaagcccgtacgtgctgtgcttagtttcttgtgcacgtgagttgaatgcctcaagggctggtgactttgtagttgctgtagattcggacttcgcaattgcaactgttgctacacttttgattcactttttcatcgtggccctaacactcattccaaattataagattagagattttaacttaacactagagttcgatcaaatttatgcaataaaataataattatccctcctaatatataaggcgtaagcacctttggtt

SEQ ID NO: 72415 - DNA, 3408 bp, Zea Mays
attttagtcttaaatcccctgcgaggctgcgtctctcgaagtccaaaacgccccgccctggaaccctaaccctacctttcctctcccgccaccgcccgccccaatggcgaagccgatgaagtacgacgatgaggaggagatctcgtcctccgccgaggaggaggaccagtccgacgccgccggctccgtatctggcgaggaaggggatgacgacgacgaggatgctgcggcgccgcccgcggaggaagctgagggcgaggggcagcaggaggaggaggtcgacgaggaagagatcgaagccgtcactaccggcgctggagctgaggacgaggaggacgccggtgccgttaccgccgctgaaggcgacgacgagtcccagtccaccgaggacgacgagcccgtcgcgagggacaaggacgatgacgacgagactgatgcagtggttgggaagcgagagaaagcaaggctaaaagaactccagaagatgaagaaacataaaatccaagaaatattagatactcaaaatgccgccattgatgctgacatgaacaataaagggaagggacggttgaagtaccttcttcagcagacagaaatatttgctcactttgcaaaaggaagtcagtccaacgagaaaaagccacgcgggaggggacgccatgcatcaaagatgactgaagaagaggaagatgaagaatacctcaaagaggaagaagatgcccttgctggtgcagggggaacacgtttagtttcacagccttcatgcatcaagggaaagatgcgtgattatcaattagctggacttaattggcttatacgattgtatgagaatggtatcaatgggatattagctgatgagatgggacttgggaaaacacttcaaactatttcattgctgggctatctgcatgagttcagaggtataactggtcctcacatggtggttgcgccgaagtccacccttggcaactggatgaaggaaatccaacgtttttgccctatcctacgtgctgtgaagttcttgggcaatccagaagagcggaaccatataagggacgatttgctacagcctggaaaatttgatgtgtgcgtgactagttttgaaatggcaatcaaagaaaaatctgcgttgaggcgcttcagttggcgctacataattattgatgaagctcaccggataaaaaatgagaattctcttctatcgaagactatgaggatttacaacactaattatcgtctcctcatcacaggcactccactccagaataatctccatgagctctgggctctcctcaatttcttgctccctgaaatatttagctctgcggaaacctttgatgaatggtttcaaatttctggggaaaatgatcaacaggaggtggtccagcagcttcataaggttcttcgcccatttcttcttaggaggctcaagtctgatgtagaaaagggtctacctccgaagaaggaaaccatacttaaagttggaatgtctcagatgcaaaagcagtactatcgcgctctgcttcagaaggatttggaggttattaatgccggtggtgaacgcaagcgattgcttaacattgccatgcagctgcgcaagtgctgcaaccatccatatttgttccaaggagctgaacctggcccaccctacacaactggtgaacatctagttgagaatgcaggaaaaatggttctactagataaattgctgcccaagctaaaggagcgtgattccagagtcctaattttttcacagatgaccaggcttttggatatcttggaagattatcttatgtatagaggttatcagtattgtcgaattgacggaaatacaggtggagaagatcgtgatgcatccattgaagccttcaataagccaggaagtgaaaagtttgttttcttactttcaactagggcaggtggccttggtatcaacttggccactgctgatgttgtggttctttatgacagcgattggaatccacaagctgatctgcaagctcaggaccgtgcacataggataggtcaaaagaaagaagttcaagtgttccgcttttgcactgagtacactatcgaggaaaaggtgattgagagagcatataagaagctagcattggatgctttagttattcagcaaggacgattggcagagcagaaaactgtcaataaggatgaccttctgcaaatggtgcggtttggtgctgaaatggttttcagttctaaggacagcacaataactgatgaggacattgaccgtattatagctaaaggagaggagacaacagctgaacttgatgcaaaaatgaaaaagttcacagaggacgccattaaatttaagatggatgataatgccgaactgtatgattttgatgatgagaaggatgaaaacaaggttgatttcaagaaacttgttagtgataactggatcgagccacctagaagagaaaggaagagaaactactctgagtctgattactttaagcaagcgcttcgccaaggtgcaccagcgaagcctagggagccaaggattccaagaatgccgcacttgcatgatttccagtttttcaataaccaaaggctaaatgaattgtacgaaaaggaagtgcggtacctcatgcaagcaaaccagaagaaagataccattgatggtgaagacgaagatcaattggagcctttaacagcagaggagcaggaagagaaggagcagttattagaagagggttttgcatcatggacaaggagagacttcaacacatttattcgtgcatgtgagaaatatggtcgcaatgatattaaaagtatatcctctgaaatggagggtaagacagaagaggaagttcaacgctatgctaaagttttcaaggagagatacaaggagctgactgattatgatagaattataaaaaatattgaaaggggggaagcaagaatatcccgcaaggatgagattatgaaggctattgggaagaagttagaccgctacaagaacccatggttagagttgaaaattcaatatggccaaaataaagggaagttctataatgaggaatgtgaccgctttatgctttgcatggtgcacaaacttggatatgggaactgggatgaactgaaagctgccttccgtatgtctcccttattccgatttgattggtttgtgaagtccagaactacccaagagttggctaggcggtgtgatactcttatcagactggttgaaaaggaaaatcaagaatatgatgagcaagagaggcaggcaaggaaggagaaaaggcttgctaagaatacgactccaacaaagagagcagcactaaggaattcagagggtgagagtgctccgttgagctcattcaagaggcgacggcagtctcttatggacgattatgtgggctcgatgtaaatatgtttcag

SEQ ID NO: 72416 - DNA, 3429 bp, Zea Mays
attttagtcttaaatcccctgcgaggctgcgtctctcgaagtccaaaacgccccgccctggaaccctaaccctacctttcctctcccgccaccgcccgccccaatggcgaagccgatgaagtacgacgatgaggaggagatctcgtcctccgccgaggaggaggaccagtccgacgccgccggctccgtatctggcgaggaaggggatgacgacgacgaggatgctgcggcgccgcccgcggaggaagctgagggcgaggggcagcaggaggaggaggtcgacgaggaagagatcgaagccgtcactaccggcgctggagctgaggacgaggaggacgccggtgccgttaccgccgctgaaggcgacgacgagtcccagtccaccgaggacgacgagcccgtcgcgagggacaaggacgatgacgacgagactgatgcagtggttgggaagcgagagaaagcaaggctaaaagaactccagaagatgaagaaacataaaatccaagaaatattagatactcaaaatgccgccattgatgctgacatgaacaataaagggaagggacggttgaagtaccttcttcagcagacagaaatatttgctcactttgcaaaaggaagtcagtccaacgagaaaaagccacgcgggaggggacgccatgcatcaaagatgactgaagaagaggaagatgaagaatacctcaaagaggaagaagatgcccttgctggtgcagggggaacacgtttagtttcacagccttcatgcatcaagggaaagatgcgtgattatcaattagctggacttaattggcttatacgattgtatgagaatggtatcaatgggatattagctgatgagatgggacttgggaaaacacttcaaactatttcattgctgggctatctgcatgagttcagaggtataactggtcctcacatggtggttgcgccgaagtccacccttggcaactggatgaaggaaatccaacgtttttgccctatcctacgtgctgtgaagttcttgggcaatccagaagagcggaaccatataagggacgatttgctacagcctggaaaatttgatgtgtgcgtgactagttttgaaatggcaatcaaagaaaaatctgcgttgaggcgcttcagttggcgctacataattattgatgaagctcaccggataaaaaatgagaattctcttctatcgaagactatgaggatttacaacactaattatcgtctcctcatcacaggcactccactccagaataatctccatgagctctgggctctcctcaatttcttgctccctgaaatatttagctctgcggaaacctttgatgaatggtttcaaatttctggggaaaatgatcaacaggaggtggtccagcagcttcataaggttcttcgcccatttcttcttaggaggctcaagtctgatgtagaaaagggtctacctccgaagaaggaaaccatacttaaagttggaatgtctcagatgcaaaagcagtactatcgcgctctgcttcagaaggatttggaggttattaatgccggtggtgaacgcaagcgattgcttaacattgccatgcagctgcgcaagtgctgcaaccatccatatttgttccaaggagctgaacctggcccaccctacacaactggtgaacatctagttgagaatgcaggaaaaatggttctactagataaattgctgcccaagctaaaggagcgtgattccagagtcctaattttttcacagatgaccaggcttttggatatcttggaagattatcttatgtatagaggttatcagtattgtcgaattgacggaaatacaggtggagaagatcgtgatgcatccattgaagccttcaataagccaggaagtgaaaagtttgttttcttactttcaactagggcaggtggccttggtatcaacttggccactgctgatgttgtggttctttatgacagcgattggaatccacaagctgatctgcaagctcaggaccgtgcacataggataggtcaaaagaaagaagttcaagtgttccgcttttgcactgagataatgcaaacgaaattacagtacactatcgaggaaaaggtgattgagagagcatataagaagctagcattggatgctttagttattcagcaaggacgattggcagagcagaaaactgtcaataaggatgaccttctgcaaatggtgcggtttggtgctgaaatggttttcagttctaaggacagcacaataactgatgaggacattgaccgtattatagctaaaggagaggagacaacagctgaacttgatgcaaaaatgaaaaagttcacagaggacgccattaaatttaagatggatgataatgccgaactgtatgattttgatgatgagaaggatgaaaacaaggttgatttcaagaaacttgttagtgataactggatcgagccacctagaagagaaaggaagagaaactactctgagtctgattactttaagcaagcgcttcgccaaggtgcaccagcgaagcctagggagccaaggattccaagaatgccgcacttgcatgatttccagtttttcaataaccaaaggctaaatgaattgtacgaaaaggaagtgcggtacctcatgcaagcaaaccagaagaaagataccattgatggtgaagacgaagatcaattggagcctttaacagcagaggagcaggaagagaaggagcagttattagaagagggttttgcatcatggacaaggagagacttcaacacatttattcgtgcatgtgagaaatatggtcgcaatgatattaaaagtatatcctctgaaatggagggtaagacagaagaggaagttcaacgctatgctaaagttttcaaggagagatacaaggagctgactgattatgatagaattataaaaaatattgaaaggggggaagcaagaatatcccgcaaggatgagattatgaaggctattgggaagaagttagaccgctacaagaacccatggttagagttgaaaattcaatatggccaaaataaagggaagttctataatgaggaatgtgaccgctttatgctttgcatggtgcacaaacttggatatgggaactgggatgaactgaaagctgccttccgtatgtctcccttattccgatttgattggtttgtgaagtccagaactacccaagagttggctaggcggtgtgatactcttatcagactggttgaaaaggaaaatcaagaatatgatgagcaagagaggcaggcaaggaaggagaaaaggcttgctaagaatacgactccaacaaagagagcagcactaaggaattcagagggtgagagtgctccgttgagctcattcaagaggcgacggcagtctcttatggacgattatgtgggctcgatgtaaatatgtttcag

SEQ ID NO: 72417 - DNA, 3479 bp, Zea Mays
gcgaggctgcgtctctcgaagtccaaaacgccccgccctggaaccctaaccctacctttcctctcccgccaccgcccgccccaatggcgaagccgatgaagtacgacgatgaggaggagatctcgtcctccgccgaggaggaggaccagtccgacgccgccggctccgtatctggcgaggaaggggatgacgacgacgaggatgctgcggcgccgcccgcggaggaagctgagggcgaggggcagcaggaggaggaggtcgacgaggaagagatcgaagccgtcactaccggcgctggagctgaggacgaggaggacgccggtgccgttaccgccgctgaaggcgacgacgagtcccagtccaccgaggacgacgagcccgtcgcgagggacaaggacgatgacgacgagactgatgcagtggttgggaagcgagagaaagcaaggctaaaagaactccagaagatgaagaaacataaaatccaagaaatattagatactcaaaatgccgccattgatgctgacatgaacaataaagggaagggacggttgaagtaccttcttcagcagacagaaatatttgctcactttgcaaaaggaagtcagtccaacgagaaaaagccacgcgggagaaccataagacatagctcaatgaaattcgagatgactgaagaagaggaagatgaagaatacctcaaagaggaagaagatgcccttgctggtgcagggggaacacgtttagtttcacagccttcatgcatcaagggaaagatgcgtgattatcaattagctggacttaattggcttatacgattgtatgagaatggtatcaatgggatattagctgatgagatgggacttgggaaaacacttcaaactatttcattgctgggctatctgcatgagttcagaggtataactggtcctcacatggtggttgcgccgaagtccacccttggcaactggatgaaggaaatccaacgtttttgccctatcctacgtgctgtgaagttcttgggcaatccagaagagcggaaccatataagggacgatttgctacagcctggaaaatttgatgtgtgcgtgactagttttgaaatggcaatcaaagaaaaatctgcgttgaggcgcttcagttggcgctacataattattgatgaagctcaccggataaaaaatgagaattctcttctatcgaagactatgaggatttacaacactaattatcgtctcctcatcacaggcactccactccagaataatctccatgagctctgggctctcctcaatttcttgctccctgaaatatttagctctgcggaaacctttgatgaatggtttcaaatttctggggaaaatgatcaacaggaggtggtccagcagcttcataaggttcttcgcccatttcttcttaggaggctcaagtctgatgtagaaaagggtctacctccgaagaaggaaaccatacttaaagttggaatgtctcagatgcaaaagcagtactatcgcgctctgcttcagaaggatttggaggttattaatgccggtggtgaacgcaagcgattgcttaacattgccatgcagctgcgcaagtgctgcaaccatccatatttgttccaaggagctgaacctggcccaccctacacaactggtgaacatctagttgagaatgcaggaaaaatggttctactagataaattgctgcccaagctaaaggagcgtgattccagagtcctaattttttcacagatgaccaggcttttggatatcttggaagattatcttatgtatagaggttatcagtattgtcgaattgacggaaatacaggtggagaagatcgtgatgcatccattgaagccttcaataagccaggaagtgaaaagtttgttttcttactttcaactagggcaggtggccttggtatcaacttggccactgctgatgttgtggttctttatgacagcgattggaatccacaagctgatctgcaagctcaggaccgtgcacataggataggtcaaaagaaagaagttcaagtgttccgcttttgcactgagataatgcaaacgaaattacagtacactatcgaggaaaaggtgattgagagagcatataagaagctagcattggatgctttagttattcagcaaggacgattggcagagcagaaaactgtcaataaggatgaccttctgcaaatggtgcggtttggtgctgaaatggttttcagttctaaggacagcacaataactgatgaggacattgaccgtattatagctaaaggagaggagacaacagctgaacttgatgcaaaaatgaaaaagttcacagaggacgccattaaatttaagatggatgataatgccgaactgtatgattttgatgatgagaaggatgaaaacaaggttgatttcaagaaacttgttagtgataactggatcgagccacctagaagagaaaggaagagaaactactctgagtctgattactttaagcaagcgcttcgccaaggtgcaccagcgaagcctagggagccaaggattccaagaatgccgcacttgcatgatttccagtttttcaataaccaaaggctaaatgaattgtacgaaaaggaagtgcggtacctcatgcaagcaaaccagaagaaagataccattgatggtgaagacgaagatcaattggagcctttaacagcagaggagcaggaagagaaggagcagttattagaagagggttttgcatcatggacaaggagagacttcaacacatttattcgtgcatgtgagaaatatggtcgcaatgatattaaaagtatatcctctgaaatggagggtaagacagaagaggaagttcaacgctatgctaaagttttcaaggagagatacaaggagctgactgattatgatagaattataaaaaatattgaaaggggggaagcaagaatatcccgcaaggatgagattatgaaggctattgggaagaagttagaccgctacaagaacccatggttagagttgaaaattcaatatggccaaaataaagggaagttctataatgaggaatgtgaccgctttatgaatacgactccaacaaagagagcagcactaaggaattcagagggtgagagtgctccgttgagctcattcaagaggcgacggcagtctcttatggacgattatgtgggctcgctctcagcgagatgcagtctctgcaatgctttaagcccgtacgtgctgtgcttagtttcttgtgcacgtgagttgaatgcctcaagggctggtgactttgtagttgctgtagattcggacttcgcaattgcaactgttgctacacttttgattcactttttcatcgtggccctaacactcattccaaattataagattagagattttaacttaacactagagttcgatcaaatttatgcaataaaataataattatccctcctaatatataaggcgtaagcacctttggtt

SEQ ID NO: 72418 - DNA, 3774 bp, Zea Mays
ctgcgtctctcgaagtccaaaacgccccgccctggaaccctaaccctacctttcctctcccgccaccgcccgccccaatggcgaagccgatgaagtacgacgatgaggaggagatctcgtcctccgccgaggaggaggaccagtccgacgccgccggctccgtatctggcgaggaaggggatgacgacgacgaggatgctgcggcgccgcccgcggaggaagctgagggcgaggggcagcaggaggaggaggtcgacgaggaagagatcgaagccgtcactaccggcgctggagctgaggacgaggaggacgccggtgccgttaccgccgctgaaggcgacgacgagtcccagtccaccgaggacgacgagcccgtcgcgagggacaaggacgatgacgacgagactgatgcagtggttgggaagcgagagaaagcaaggctaaaagaactccagaagatgaagaaacataaaatccaagaaatattagatactcaaaatgccgccattgatgctgacatgaacaataaagggaagggacggttgaagtaccttcttcagcagacagaaatatttgctcactttgcaaaaggaagtcagtccaacgagaaaaagccacgcgggaggggacgccatgcatcaaagatgactgaagaagaggaagatgaagaatacctcaaagaggaagaagatgcccttgctggtgcagggggaacacgtttagtttcacagccttcatgcatcaagggaaagatgcgtgattatcaattagctggacttaattggcttatacgattgtatgagaatggtatcaatgggatattagctgatgagatgggacttgggaaaacacttcaaactatttcattgctgggctatctgcatgagttcagaggtataactggtcctcacatggtggttgcgccgaagtccacccttggcaactggatgaaggaaatccaacgtttttgccctatcctacgtgctgtgaagttcttgggcaatccagaagagcggaaccatataagggacgatttgctacagcctggaaaatttgatgtgtgcgtgactagttttgaaatggcaatcaaagaaaaatctgcgttgaggcgcttcagttggcgctacataattattgatgaagctcaccggataaaaaatgagaattctcttctatcgaagactatgaggatttacaacactaattatcgtctcctcatcacaggcactccactccagaataatctccatgagctctgggctctcctcaatttcttgctccctgaaatatttagctctgcggaaacctttgatgaatggtttcaaatttctggggaaaatgatcaacaggaggtggtccagcagcttcataaggttcttcgcccatttcttcttaggaggctcaagtctgatgtagaaaagggtctacctccgaagaaggaaaccatacttaaagttggaatgtctcagatgcaaaagcagtactatcgcgctctgcttcagaaggatttggaggttattaatgccggtggtgaacgcaagcgattgcttaacattgccatgcagctgcgcaagtgctgcaaccatccatatttgttccaaggagctgaacctggcccaccctacacaactggtgaacatctagttgagaatgcaggaaaaatggttctactagataaattgctgcccaagctaaaggagcgtgattccagagtcctaattttttcacagatgaccaggcttttggatatcttggaagattatcttatgtatagaggttatcagtattgtcgaattgacggaaatacaggtggagaagatcgtgatgcatccattgaagccttcaataagccaggaagtgaaaagtttgttttcttactttcaactagggcaggtggccttggtatcaacttggccactgctgatgttgtggttctttatgacagcgattggaatccacaagctgatctgcaagctcaggaccgtgcacataggataggtcaaaagaaagaagttcaagtgttccgcttttgcactgagataatgcaaacgaaattacagtacactatcgaggaaaaggtgattgagagagcatataagaagctagcattggatgctttagttattcagcaaggacgattggcagagcagaaaactgtcaataaggatgaccttctgcaaatggtgcggtttggtgctgaaatggttttcagttctaaggacagcacaataactgatgaggacattgaccgtattatagctaaaggagaggagacaacagctgaacttgatgcaaaaatgaaaaagttcacagaggacgccattaaatttaagatggatgataatgccgaactgtatgattttgatgatgagaaggatgaaaacaaggttgatttcaagaaacttgttagtgataactggatcgagccacctagaagagaaaggaagagaaactactctgagtctgattactttaagcaagcgcttcgccaaggtgcaccagcgaagcctagggagccaaggattccaagaatgccgcacttgcatgatttccagtttttcaataaccaaaggctaaatgaattgtacgaaaaggaagtgcggtacctcatgcaagcaaaccagaagaaagataccattgatggtgaagacgaagatcaattggagcctttaacagcagaggagcaggaagagaaggagcagttattagaagagggttttgcatcatggacaaggagagacttcaacacatttattcgtgcatgtgagaaatatggtcgcaatgatattaaaagtatatcctctgaaatggagggtaagacagaagaggaagttcaacgctatgctaaagttttcaaggagagatacaaggagctgactgattatgatagaattataaaaaatattgaaaggggggaagcaagaatatcccgcaaggatgagattatgaaggctattgggaagaagttagaccgctacaagaacccatggttagagttgaaaattcaatatggccaaaataaagggaagttctataatgaggaatgtgaccgctttatgtccagaactacccaagagttggctaggcggtgtgatactcttatcagactggttgaaaaggaaaatcaagaatatgatgagcaagagaggcaggcaaggaaggagaaaaggcttgctaagaatacgactccaacaaagagagcagcactaaggaattcagagggtgagagtgctccgttgagctcattcaagaggcgacggcagtctcttatggacgattatgtgggctcgggaaggcgaaagagagggtgatgtgatgtttgacatcctgcctttggagctctcagcgagatgcagtctctgcaatgctttaagcccgtacgtgctgtgcttagtttcttgtgcacgtgagttgaatgcctcaagggctggtgactttgtagtgtaagttatgcaacgatgacatagattagttattataaatcctaaatgaggtatgtatgcgcatgctgtattgtagtgctgtagattcggacttcgcaattgcaactgttgctacacttttggtcagtgatgatgcctttcgctgcaacagttgaggctccagttcaatatttgaagataaatccggtcccttctgtctagggatggccatgggtacctgatacccgttcggtaaaaaccgtattagagcacatgtgatcatttgttatacccctcggctatggtagtcatgggtatgttctttcttgccatatatatgttctttcttgcc

SEQ ID NO: 72419 - DNA, 3604 bp, Zea Mays
tgcgtctctcgaagtccaaaacgccccgccctggaaccctaaccctacctttcctctcccgccaccgcccgccccaatggcgaagccgatgaagtacgacgatgaggaggagatctcgtcctccgccgaggaggaggaccagtccgacgccgccggctccgtatctggcgaggaaggggatgacgacgacgaggatgctgcggcgccgcccgcggaggaagctgagggcgaggggcagcaggaggaggaggtcgacgaggaagagatcgaagccgtcactaccggcgctggagctgaggacgaggaggacgccggtgccgttaccgccgctgaaggcgacgacgagtcccagtccaccgaggacgacgagcccgtcgcgagggacaaggacgatgacgacgagactgatgcagtggttgggaagcgagagaaagcaaggctaaaagaactccagaagatgaagaaacataaaatccaagaaatattagatactcaaaatgccgccattgatgctgacatgaacaataaagggaagggacggttgaagtaccttcttcagcagacagaaatatttgctcactttgcaaaaggaagtcagtccaacgagaaaaagccacgcgggaggggacgccatgcatcaaagatgactgaagaagaggaagatgaagaatacctcaaagaggaagaagatgcccttgctggtgcagggggaacacgtttagtttcacagccttcatgcatcaagggaaagatgcgtgattatcaattagctggacttaattggcttatacgattgtatgagaatggtatcaatgggatattagctgatgagatgggacttgggaaaacacttcaaactatttcattgctgggctatctgcatgagttcagaggtataactggtcctcacatggtggttgcgccgaagtccacccttggcaactggatgaaggaaatccaacgtttttgccctatcctacgtgctgtgaagttcttgggcaatccagaagagcggaaccatataagggacgatttgctacagcctggaaaatttgatgtgtgcgtgactagttttgaaatggcaatcaaagaaaaatctgcgttgaggcgcttcagttggcgctacataattattgatgaagctcaccggataaaaaatgagaattctcttctatcgaagactatgaggatttacaacactaattatcgtctcctcatcacaggcactccactccagaataatctccatgagctctgggctctcctcaatttcttgctccctgaaatatttagctctgcggaaacctttgatgaatggtttcaaatttctggggaaaatgatcaacaggaggtggtccagcagcttcataaggttcttcgcccatttcttcttaggaggctcaagtctgatgtagaaaagggtctacctccgaagaaggaaaccatacttaaagttggaatgtctcagatgcaaaagcagtactatcgcgctctgcttcagaaggatttggaggttattaatgccggtggtgaacgcaagcgattgcttaacattgccatgcagctgcgcaagtgctgcaaccatccatatttgttccaaggagctgaacctggcccaccctacacaactggtgaacatctagttgagaatgcaggaaaaatggttctactagataaattgctgcccaagctaaaggagcgtgattccagagtcctaattttttcacagatgaccaggcttttggatatcttggaagattatcttatgtatagaggttatcagtattgtcgaattgacggaaatacaggtggagaagatcgtgatgcatccattgaagccttcaataagccaggaagtgaaaagtttgttttcttactttcaactagggcaggtggccttggtatcaacttggccactgctgatgttgtggttctttatgacagcgattggaatccacaagctgatctgcaagctcaggaccgtgcacataggataggtcaaaagaaagaagttcaagtgttccgcttttgcactgagataatgcaaacgaaattacagtacactatcgaggaaaaggtgattgagagagcatataagaagctagcattggatgctttagttattcagcaaggacgattggcagagcagaaaactgtcaataaggatgaccttctgcaaatggtgcggtttggtgctgaaatggttttcagttctaaggacagcacaataactgatgaggacattgaccgtattatagctaaaggagaggagacaacagctgaacttgatgcaaaaatgaaaaagttcacagaggacgccattaaatttaagatggatgataatgccgaactgtatgattttgatgatgagaaggatgaaaacaaggttgatttcaagaaacttgttagtgataactggatcgagccacctagaagagaaaggaagagaaactactctgagtctgattactttaagcaagcgcttcgccaaggtgcaccagcgaagcctagggagccaaggattccaagaatgccgcacttgcatgatttccagtttttcaataaccaaaggctaaatgaattgtacgaaaaggaagtgcggtacctcatgcaagcaaaccagaagaaagataccattgatggtgaagacgaagatcaattggagcctttaacagcagaggagcaggaagagaaggagcagttattagaagagggttttgcatcatggacaaggagagacttcaacacatttattcgtgcatgtgagaaatatggtcgcaatgatattaaaagtatatcctctgaaatggagggtaagacagaagaggaagttcaacgctatgctaaagttttcaaggagagatacaaggagctgactgattatgatagaattataaaaaatattgaaaggggggaagcaagaatatcccgcaaggatgagattatgaaggctattgggaagaagttagaccgctacaagaacccatggttagagttgaaaattcaatatggccaaaataaagggaagttctataatgaggaatgtgaccgctttatgaatacgactccaacaaagagagcagcactaaggaattcagagggtgagagtgctccgttgagctcattcaagaggcgacggcagtctcttatggacgattatgtgggctcgctctcagcgagatgcagtctctgcaatgctttaagcccgtacgtgctgtgcttagtttcttgtgcacgtgagttgaatgcctcaagggctggtgactttgtagtgtaagttatgcaacgatgacatagattagttattataaatcctaaatgaggtatgtatgcgcatgctgtattgtagtgctgtagattcggacttcgcaattgcaactgttgctacacttttggtcagtgatgatgcctttcgctgcaacagttgaggctccagttcaatatttgaagataaatccggtcccttctgtctagggatggccatgggtacctgatacccgttcggtaaaaaccgtattagagcacatgtgatcatttgttatacccctcggctatggtagtcatgggtatgttctttcttgccatatatatgttctttcttgcc

SEQ ID NO: 72420 - DNA, 3609 bp, Zea Mays
cgtctctcgaagtccaaaacgccccgccctggaaccctaaccctacctttcctctcccgccaccgcccgccccaatggcgaagccgatgaagtacgacgatgaggaggagatctcgtcctccgccgaggaggaggaccagtccgacgccgccggctccgtatctggcgaggaaggggatgacgacgacgaggatgctgcggcgccgcccgcggaggaagctgagggcgaggggcagcaggaggaggaggtcgacgaggaagagatcgaagccgtcactaccggcgctggagctgaggacgaggaggacgccggtgccgttaccgccgctgaaggcgacgacgagtcccagtccaccgaggacgacgagcccgtcgcgagggacaaggacgatgacgacgagactgatgcagtggttgggaagcgagagaaagcaaggctaaaagaactccagaagatgaagaaacataaaatccaagaaatattagatactcaaaatgccgccattgatgctgacatgaacaataaagggaagggacggttgaagtaccttcttcagcagacagaaatatttgctcactttgcaaaaggaagtcagtccaacgagaaaaagccacgcgggagaaccataagacatagctcaatgaaattcgaggggacgccatgcatcaaagatgactgaagaagaggaagatgaagaatacctcaaagaggaagaagatgcccttgctggtgcagggggaacacgtttagtttcacagccttcatgcatcaagggaaagatgcgtgattatcaattagctggacttaattggcttatacgattgtatgagaatggtatcaatgggatattagctgatgagatgggacttgggaaaacacttcaaactatttcattgctgggctatctgcatgagttcagaggtataactggtcctcacatggtggttgcgccgaagtccacccttggcaactggatgaaggaaatccaacgtttttgccctatcctacgtgctgtgaagttcttgggcaatccagaagagcggaaccatataagggacgatttgctacagcctggaaaatttgatgtgtgcgtgactagttttgaaatggcaatcaaagaaaaatctgcgttgaggcgcttcagttggcgctacataattattgatgaagctcaccggataaaaaatgagaattctcttctatcgaagactatgaggatttacaacactaattatcgtctcctcatcacaggcactccactccagaataatctccatgagctctgggctctcctcaatttcttgctccctgaaatatttagctctgcggaaacctttgatgaatggtttcaaatttctggggaaaatgatcaacaggaggtggtccagcagcttcataaggttcttcgcccatttcttcttaggaggctcaagtctgatgtagaaaagggtctacctccgaagaaggaaaccatacttaaagttggaatgtctcagatgcaaaagcagtactatcgcgctctgcttcagaaggatttggaggttattaatgccggtggtgaacgcaagcgattgcttaacattgccatgcagctgcgcaagtgctgcaaccatccatatttgttccaaggagctgaacctggcccaccctacacaactggtgaacatctagttgagaatgcaggaaaaatggttctactagataaattgctgcccaagctaaaggagcgtgattccagagtcctaattttttcacagatgaccaggcttttggatatcttggaagattatcttatgtatagaggttatcagtattgtcgaattgacggaaatacaggtggagaagatcgtgatgcatccattgaagccttcaataagccaggaagtgaaaagtttgttttcttactttcaactagggcaggtggccttggtatcaacttggccactgctgatgttgtggttctttatgacagcgattggaatccacaagctgatctgcaagctcaggaccgtgcacataggataggtcaaaagaaagaagttcaagtgttccgcttttgcactgagataatgcaaacgaaattacagtacactatcgaggaaaaggtgattgagagagcatataagaagctagcattggatgctttagttattcagcaaggacgattggcagagcagaaaactgtcaataaggatgaccttctgcaaatggtgcggtttggtgctgaaatggttttcagttctaaggacagcacaataactgatgaggacattgaccgtattatagctaaaggagaggagacaacagctgaacttgatgcaaaaatgaaaaagttcacagaggacgccattaaatttaagatggatgataatgccgaactgtatgattttgatgatgagaaggatgaaaacaaggttgatttcaagaaacttgttagtgataactggatcgagccacctagaagagaaaggaagagaaactactctgagtctgattactttaagcaagcgcttcgccaaggtgcaccagcgaagcctagggagccaaggattccaagaatgccgcacttgcatgatttccagtttttcaataaccaaaggctaaatgaattgtacgaaaaggaagtgcggtacctcatgcaagcaaaccagaagaaagataccattgatggtgaagacgaagatcaattggagcctttaacagcagaggagcaggaagagaaggagcagttattagaagagggttttgcatcatggacaaggagagacttcaacacatttattcgtgcatgtgagaaatatggtcgcaatgatattaaaagtatatcctctgaaatggagggtaagacagaagaggaagttcaacgctatgctaaagttttcaaggagagatacaaggagctgactgattatgatagaattataaaaaatattgaaaggggggaagcaagaatatcccgcaaggatgagattatgaaggctattgggaagaagttagaccgctacaagaacccatggttagagttgaaaattcaatatggccaaaataaagggaagttctataatgaggaatgtgaccgctttatgtccagaactacccaagagttggctaggcggtgtgatactcttatcagactggttgaaaaggaaaatcaagaatatgatgagcaagagaggcaggcaaggaaggagaaaaggcttgctaagaatacgactccaacaaagagagcagcactaaggaattcagagggtgagagtgctccgttgagctcattcaagaggcgacggcagtctcttatggacgattatgtgggctcgctctcagcgagatgcagtctctgcaatgctttaagcccgtacgtgctgtgcttagtttcttgtgcacgtgagttgaatgcctcaagggctggtgactttgtagttgctgtagattcggacttcgcaattgcaactgttgctacacttttgattcactttttcatcgtggccctaacactcattccaaattataagattagagattttaacttaacactagagttcgatcaaatttatgcaataaaataataattatccctcctaatatataaggcgtaagcacctttggtt

SEQ ID NO: 72421 - DNA, 3845 bp, Zea Mays
gtctctcgaagtccaaaacgccccgccctggaaccctaaccctacctttcctctcccgccaccgcccgccccaatggcgaagccgatgaagtacgacgatgaggaggagatctcgtcctccgccgaggaggaggaccagtccgacgccgccggctccgtatctggcgaggaaggggatgacgacgacgaggatgctgcggcgccgcccgcggaggaagctgagggcgaggggcagcaggaggaggaggtcgacgaggaagagatcgaagccgtcactaccggcgctggagctgaggacgaggaggacgccggtgccgttaccgccgctgaaggcgacgacgagtcccagtccaccgaggacgacgagcccgtcgcgagggacaaggacgatgacgacgagactgatgcagtggttgggaagcgagagaaagcaaggctaaaagaactccagaagatgaagaaacataaaatccaagaaatattagatactcaaaatgccgccattgatgctgacatgaacaataaagggaagggacggttgaagtaccttcttcagcagacagaaatatttgctcactttgcaaaaggaagtcagtccaacgagaaaaagccacgcgggaggggacgccatgcatcaaagatgactgaagaagaggaagatgaagaatacctcaaagaggaagaagatgcccttgctggtgcagggggaacacgtttagtttcacagccttcatgcatcaagggaaagatgcgtgattatcaattagctggacttaattggcttatacgattgtatgagaatggtatcaatgggatattagctgatgagatgggacttgggaaaacacttcaaactatttcattgctgggctatctgcatgagttcagaggtataactggtcctcacatggtggttgcgccgaagtccacccttggcaactggatgaaggaaatccaacgtttttgccctatcctacgtgctgtgaagttcttgggcaatccagaagagcggaaccatataagggacgatttgctacagcctggaaaatttgatgtgtgcgtgactagttttgaaatggcaatcaaagaaaaatctgcgttgaggcgcttcagttggcgctacataattattgatgaagctcaccggataaaaaatgagaattctcttctatcgaagactatgaggatttacaacactaattatcgtctcctcatcacaggcactccactccagaataatctccatgagctctgggctctcctcaatttcttgctccctgaaatatttagctctgcggaaacctttgatgaatggtttcaaatttctggggaaaatgatcaacaggaggtggtccagcagcttcataaggttcttcgcccatttcttcttaggaggctcaagtctgatgtagaaaagggtctacctccgaagaaggaaaccatacttaaagttggaatgtctcagatgcaaaagcagtactatcgcgctctgcttcagaaggatttggaggttattaatgccggtggtgaacgcaagcgattgcttaacattgccatgcagctgcgcaagtgctgcaaccatccatatttgttccaaggagctgaacctggcccaccctacacaactggtgaacatctagttgagaatgcaggaaaaatggttctactagataaattgctgcccaagctaaaggagcgtgattccagagtcctaattttttcacagatgaccaggcttttggatatcttggaagattatcttatgtatagaggttatcagtattgtcgaattgacggaaatacaggtggagaagatcgtgatgcatccattgaagccttcaataagccaggaagtgaaaagtttgttttcttactttcaactagggcaggtggccttggtatcaacttggccactgctgatgttgtggttctttatgacagcgattggaatccacaagctgatctgcaagctcaggaccgtgcacataggataggtcaaaagaaagaagttcaagtgttccgcttttgcactgagtacactatcgaggaaaaggtgattgagagagcatataagaagctagcattggatgctttagttattcagcaaggacgattggcagagcagaaaactgtcaataaggatgaccttctgcaaatggtgcggtttggtgctgaaatggttttcagttctaaggacagcacaataactgatgaggacattgaccgtattatagctaaaggagaggagacaacagctgaacttgatgcaaaaatgaaaaagttcacagaggacgccattaaatttaagatggatgataatgccgaactgtatgattttgatgatgagaaggatgaaaacaaggttgatttcaagaaacttgttagtgataactggatcgagccacctagaagagaaaggaagagaaactactctgagtctgattactttaagcaagcgcttcgccaaggtgcaccagcgaagcctagggagccaaggattccaagaatgccgcacttgcatgatttccagtttttcaataaccaaaggctaaatgaattgtacgaaaaggaagtgcggtacctcatgcaagcaaaccagaagaaagataccattgatggtgaagacgaagatcaattggagcctttaacagcagaggagcaggaagagaaggagcagttattagaagagggttttgcatcatggacaaggagagacttcaacacatttattcgtgcatgtgagaaatatggtcgcaatgatattaaaagtatatcctctgaaatggagggtaagacagaagaggaagttcaacgctatgctaaagttttcaaggagagatacaaggagctgactgattatgatagaattataaaaaatattgaaaggggggaagcaagaatatcccgcaaggatgagattatgaaggctattgggaagaagttagaccgctacaagaacccatggttagagttgaaaattcaatatggccaaaataaagggaagttctataatgaggaatgtgaccgctttatgctttgcatggtgcacaaacttggatatgggaactgggatgaactgaaagctgccttccgtatgtctcccttattccgatttgattggtttgtgaagtccagaactacccaagagttggctaggcggtgtgatactcttatcagactggttgaaaaggaaaatcaagaatatgatgagcaagagaggcaggcaaggaaggagaaaaggcttgctaagaatacgactccaacaaagagagcagcactaaggaattcagagggtgagagtgctccgttgagctcattcaagaggcgacggcagtctcttatggacgattatgtgggctcgggaaggcgaaagagagggtgatgtgatgtttgacatcctgcctttggagctctcagcgagatgcagtctctgcaatgctttaagcccgtacgtgctgtgcttagtttcttgtgcacgtgagttgaatgcctcaagggctggtgactttgtagtgtaagttatgcaacgatgacatagattagttattataaatcctaaatgaggtatgtatgcgcatgctgtattgtagtgctgtagattcggacttcgcaattgcaactgttgctacacttttggtcagtgatgatgcctttcgctgcaacagttgaggctccagttcaatatttgaagataaatccggtcccttctgtctagggatggccatgggtacctgatacccgttcggtaaaaaccgtattagagcacatgtgatcatttgttatacccctcggctatggtagtcatgggtatgttctttcttgccatatatatgttctttcttgcc

SEQ ID NO: 72422 - DNA, 3600 bp, Zea Mays
gtctctcgaagtccaaaacgccccgccctggaaccctaaccctacctttcctctcccgccaccgcccgccccaatggcgaagccgatgaagtacgacgatgaggaggagatctcgtcctccgccgaggaggaggaccagtccgacgccgccggctccgtatctggcgaggaaggggatgacgacgacgaggatgctgcggcgccgcccgcggaggaagctgagggcgaggggcagcaggaggaggaggtcgacgaggaagagatcgaagccgtcactaccggcgctggagctgaggacgaggaggacgccggtgccgttaccgccgctgaaggcgacgacgagtcccagtccaccgaggacgacgagcccgtcgcgagggacaaggacgatgacgacgagactgatgcagtggttgggaagcgagagaaagcaaggctaaaagaactccagaagatgaagaaacataaaatccaagaaatattagatactcaaaatgccgccattgatgctgacatgaacaataaagggaagggacggttgaagtaccttcttcagcagacagaaatatttgctcactttgcaaaaggaagtcagtccaacgagaaaaagccacgcgggaggggacgccatgcatcaaagatgactgaagaagaggaagatgaagaatacctcaaagaggaagaagatgcccttgctggtgcagggggaacacgtttagtttcacagccttcatgcatcaagggaaagatgcgtgattatcaattagctggacttaattggcttatacgattgtatgagaatggtatcaatgggatattagctgatgagatgggacttgggaaaacacttcaaactatttcattgctgggctatctgcatgagttcagaggtataactggtcctcacatggtggttgcgccgaagtccacccttggcaactggatgaaggaaatccaacgtttttgccctatcctacgtgctgtgaagttcttgggcaatccagaagagcggaaccatataagggacgatttgctacagcctggaaaatttgatgtgtgcgtgactagttttgaaatggcaatcaaagaaaaatctgcgttgaggcgcttcagttggcgctacataattattgatgaagctcaccggataaaaaatgagaattctcttctatcgaagactatgaggatttacaacactaattatcgtctcctcatcacaggcactccactccagaataatctccatgagctctgggctctcctcaatttcttgctccctgaaatatttagctctgcggaaacctttgatgaatggtttcaaatttctggggaaaatgatcaacaggaggtggtccagcagcttcataaggttcttcgcccatttcttcttaggaggctcaagtctgatgtagaaaagggtctacctccgaagaaggaaaccatacttaaagttggaatgtctcagatgcaaaagcagtactatcgcgctctgcttcagaaggatttggaggttattaatgccggtggtgaacgcaagcgattgcttaacattgccatgcagctgcgcaagtgctgcaaccatccatatttgttccaaggagctgaacctggcccaccctacacaactggtgaacatctagttgagaatgcaggaaaaatggttctactagataaattgctgcccaagctaaaggagcgtgattccagagtcctaattttttcacagatgaccaggcttttggatatcttggaagattatcttatgtatagaggttatcagtattgtcgaattgacggaaatacaggtggagaagatcgtgatgcatccattgaagccttcaataagccaggaagtgaaaagtttgttttcttactttcaactagggcaggtggccttggtatcaacttggccactgctgatgttgtggttctttatgacagcgattggaatccacaagctgatctgcaagctcaggaccgtgcacataggataggtcaaaagaaagaagttcaagtgttccgcttttgcactgagtacactatcgaggaaaaggtgattgagagagcatataagaagctagcattggatgctttagttattcagcaaggacgattggcagagcagaaaactgtcaataaggatgaccttctgcaaatggtgcggtttggtgctgaaatggttttcagttctaaggacagcacaataactgatgaggacattgaccgtattatagctaaaggagaggagacaacagctgaacttgatgcaaaaatgaaaaagttcacagaggacgccattaaatttaagatggatgataatgccgaactgtatgattttgatgatgagaaggatgaaaacaaggttgatttcaagaaacttgttagtgataactggatcgagccacctagaagagaaaggaagagaaactactctgagtctgattactttaagcaagcgcttcgccaaggtgcaccagcgaagcctagggagccaaggattccaagaatgccgcacttgcatgatttccagtttttcaataaccaaaggctaaatgaattgtacgaaaaggaagtgcggtacctcatgcaagcaaaccagaagaaagataccattgatggtgaagacgaagatcaattggagcctttaacagcagaggagcaggaagagaaggagcagttattagaagagggttttgcatcatggacaaggagagacttcaacacatttattcgtgcatgtgagaaatatggtcgcaatgatattaaaagtatatcctctgaaatggagggtaagacagaagaggaagttcaacgctatgctaaagttttcaaggagagatacaaggagctgactgattatgatagaattataaaaaatattgaaaggggggaagcaagaatatcccgcaaggatgagattatgaaggctattgggaagaagttagaccgctacaagaacccatggttagagttgaaaattcaatatggccaaaataaagggaagttctataatgaggaatgtgaccgctttatgaactacccaagagttggctaggcggtgtgatactcttatcagactggttgaaaaggaaaatcaagaatatgatgagcaagagaggcaggcaaggaaggagaaaaggcttgctaagaatacgactccaacaaagagagcagcactaaggaattcagagggtgagagtgctccgttgagctcattcaagaggcgacggcagtctcttatggacgattatgtgggctcgggaaggcgaaagagagggtgatgtgatgtttgacatcctgcctttggagctctcagcgagatgcagtctctgcaatgctttaagcccgtacgtgctgtgcttagtttcttgtgcacgtgagttgaatgcctcaagggctggtgactttgtagttgctgtagattcggacttcgcaattgcaactgttgctacacttttgattcactttttcatcgtggccctaacactcattccaaattataagattagagattttaacttaacactagagttcgatcaaatttatgcaataaaataataattatccctcctaatatataaggcgtaagcacctttggtt

SEQ ID NO: 72423 - DNA, 3756 bp, Zea Mays
gtctctcgaagtccaaaacgccccgccctggaaccctaaccctacctttcctctcccgccaccgcccgccccaatggcgaagccgatgaagtacgacgatgaggaggagatctcgtcctccgccgaggaggaggaccagtccgacgccgccggctccgtatctggcgaggaaggggatgacgacgacgaggatgctgcggcgccgcccgcggaggaagctgagggcgaggggcagcaggaggaggaggtcgacgaggaagagatcgaagccgtcactaccggcgctggagctgaggacgaggaggacgccggtgccgttaccgccgctgaaggcgacgacgagtcccagtccaccgaggacgacgagcccgtcgcgagggacaaggacgatgacgacgagactgatgcagtggttgggaagcgagagaaagcaaggctaaaagaactccagaagatgaagaaacataaaatccaagaaatattagatactcaaaatgccgccattgatgctgacatgaacaataaagggaagggacggttgaagtaccttcttcagcagacagaaatatttgctcactttgcaaaaggaagtcagtccaacgagaaaaagccacgcgggaggggacgccatgcatcaaagatgactgaagaagaggaagatgaagaatacctcaaagaggaagaagatgcccttgctggtgcagggggaacacgtttagtttcacagccttcatgcatcaagggaaagatgcgtgattatcaattagctggacttaattggcttatacgattgtatgagaatggtatcaatgggatattagctgatgagatgggacttgggaaaacacttcaaactatttcattgctgggctatctgcatgagttcagaggtataactggtcctcacatggtggttgcgccgaagtccacccttggcaactggatgaaggaaatccaacgtttttgccctatcctacgtgctgtgaagttcttgggcaatccagaagagcggaaccatataagggacgatttgctacagcctggaaaatttgatgtgtgcgtgactagttttgaaatggcaatcaaagaaaaatctgcgttgaggcgcttcagttggcgctacataattattgatgaagctcaccggataaaaaatgagaattctcttctatcgaagactatgaggatttacaacactaattatcgtctcctcatcacaggcactccactccagaataatctccatgagctctgggctctcctcaatttcttgctccctgaaatatttagctctgcggaaacctttgatgaatggtttcaaatttctggggaaaatgatcaacaggaggtggtccagcagcttcataaggttcttcgcccatttcttcttaggaggctcaagtctgatgtagaaaagggtctacctccgaagaaggaaaccatacttaaagttggaatgtctcagatgcaaaagcagtactatcgcgctctgcttcagaaggatttggaggttattaatgccggtggtgaacgcaagcgattgcttaacattgccatgcagctgcgcaagtgctgcaaccatccatatttgttccaaggagctgaacctggcccaccctacacaactggtgaacatctagttgagaatgcaggaaaaatggttctactagataaattgctgcccaagctaaaggagcgtgattccagagtcctaattttttcacagatgaccaggcttttggatatcttggaagattatcttatgtatagaggttatcagtattgtcgaattgacggaaatacaggtggagaagatcgtgatgcatccattgaagccttcaataagccaggaagtgaaaagtttgttttcttactttcaactagggcaggtggccttggtatcaacttggccactgctgatgttgtggttctttatgacagcgattggaatccacaagctgatctgcaagctcaggaccgtgcacataggataggtcaaaagaaagaagttcaagtgttccgcttttgcactgagtacactatcgaggaaaaggtgattgagagagcatataagaagctagcattggatgctttagttattcagcaaggacgattggcagagcagaaaactgtcaataaggatgaccttctgcaaatggtgcggtttggtgctgaaatggttttcagttctaaggacagcacaataactgatgaggacattgaccgtattatagctaaaggagaggagacaacagctgaacttgatgcaaaaatgaaaaagttcacagaggacgccattaaatttaagatggatgataatgccgaactgtatgattttgatgatgagaaggatgaaaacaaggttgatttcaagaaacttgttagtgataactggatcgagccacctagaagagaaaggaagagaaactactctgagtctgattactttaagcaagcgcttcgccaaggtgcaccagcgaagcctagggagccaaggattccaagaatgccgcacttgcatgatttccagtttttcaataaccaaaggctaaatgaattgtacgaaaaggaagtgcggtacctcatgcaagcaaaccagaagaaagataccattgatggtgaagacgaagcagaggagcaggaagagaaggagcagttattagaagagggttttgcatcatggacaaggagagacttcaacacatttattcgtgcatgtgagaaatatggtcgcaatgatattaaaagtatatcctctgaaatggagggtaagacagaagaggaagttcaacgctatgctaaagttttcaaggagagatacaaggagctgactgattatgatagaattataaaaaatattgaaaggggggaagcaagaatatcccgcaaggatgagattatgaaggctattgggaagaagttagaccgctacaagaacccatggttagagttgaaaattcaatatggccaaaataaagggaagttctataatgaggaatgtgaccgctttatgctttgcatggtgcacaaacttggatatgggaactgggatgaactgaaagctgccttccgtatgtctcccttattccgatttgattggtttgtgaagtccagaactacccaagagttggctaggcggtgtgatactcttatcagactggttgaaaaggaaaatcaagaatatgatgagcaagagaggcaggcaaggaaggagaaaaggcttgctaagaatacgactccaacaaagagagcagcactaaggaattcagagggtgagagtgctccgttgagctcattcaagaggcgacggcagtctcttatggacgattatgtgggctcgggaaggcgaaagagagggtgatgtgatgtttgacatcctgcctttggagctctcagcgagatgcagtctctgcaatgctttaagcccgtacgtgctgtgcttagtttcttgtgcacgtgagttgaatgcctcaagggctggtgactttgtagtgtaagttatgcaacgatgacatagattagttattataaatcctaaatgaggtatgtatgcgcatgctgtattgtagtgctgtagattcggacttcgcaattgcaactgttgctacacttttgattcactttttcatcgtggccctaacactcattccaaattataagattagagattttaacttaacactagagttcgatcaaatttatgcaataaaataataattatccctcctaatatataaggcgtaagcacctttggtt

SEQ ID NO: 72424 - DNA, 3485 bp, Zea Mays
gtctctcgaagtccaaaacgccccgccctggaaccctaaccctacctttcctctcccgccaccgcccgccccaatggcgaagccgatgaagtacgacgatgaggaggagatctcgtcctccgccgaggaggaggaccagtccgacgccgccggctccgtatctggcgaggaaggggatgacgacgacgaggatgctgcggcgccgcccgcggaggaagctgagggcgaggggcagcaggaggaggaggtcgacgaggaagagatcgaagccgtcactaccggcgctggagctgaggacgaggaggacgccggtgccgttaccgccgctgaaggcgacgacgagtcccagtccaccgaggacgacgagcccgtcgcgagggacaaggacgatgacgacgagactgatgcagtggttgggaagcgagagaaagcaaggctaaaagaactccagaagatgaagaaacataaaatccaagaaatattagatactcaaaatgccgccattgatgctgacatgaacaataaagggaagggacggttgaagtaccttcttcagcagacagaaatatttgctcactttgcaaaaggaagtcagtccaacgagaaaaagccacgcgggaggggacgccatgcatcaaagatgactgaagaagaggaagatgaagaatacctcaaagaggaagaagatgcccttgctggtgcagggggaacacgtttagtttcacagccttcatgcatcaagggaaagatgcgtgattatcaattagctggacttaattggcttatacgattgtatgagaatggtatcaatgggatattagctgatgagatgggacttgggaaaacacttcaaactatttcattgctgggctatctgcatgagttcagaggtataactggtcctcacatggtggttgcgccgaagtccacccttggcaactggatgaaggaaatccaacgtttttgccctatcctacgtgctgtgaagttcttgggcaatccagaagagcggaaccatataagggacgatttgctacagcctggaaaatttgatgtgtgcgtgactagttttgaaatggcaatcaaagaaaaatctgcgttgaggcgcttcagttggcgctacataattattgatgaagctcaccggataaaaaatgagaattctcttctatcgaagactatgaggatttacaacactaattatcgtctcctcatcacaggcactccactccagaataatctccatgagctctgggctctcctcaatttcttgctccctgaaatatttagctctgcggaaacctttgatgaatggtttcaaatttctggggaaaatgatcaacaggaggtggtccagcagcttcataaggttcttcgcccatttcttcttaggaggctcaagtctgatgtagaaaagggtctacctccgaagaaggaaaccatacttaaagttggaatgtctcagatgcaaaagcagtactatcgcgctctgcttcagaaggatttggaggttattaatgccggtggtgaacgcaagcgattgcttaacattgccatgcagctgcgcaagtgctgcaaccatccatatttgttccaaggagctgaacctggcccaccctacacaactggtgaacatctagttgagaatgcaggaaaaatggttctactagataaattgctgcccaagctaaaggagcgtgattccagagtcctaattttttcacagatgaccaggcttttggatatcttggaagattatcttatgtatagaggttatcagtattgtcgaattgacggaaatacaggtggagaagatcgtgatgcatccattgaagccttcaataagccaggaagtgaaaagtttgttttcttactttcaactagggcaggtggccttggtatcaacttggccactgctgatgttgtggttctttatgacagcgattggaatccacaagctgatctgcaagctcaggaccgtgcacataggataggtcaaaagaaagaagttcaagtgttccgcttttgcactgagtacactatcgaggaaaaggtgattgagagagcatataagaagctagcattggatgctttagttattcagcaaggacgattggcagagcagaaaactgtcaataaggatgaccttctgcaaatggtgcggtttggtgctgaaatggttttcagttctaaggacagcacaataactgatgaggacattgaccgtattatagctaaaggagaggagacaacagctgaacttgatgcaaaaatgaaaaagttcacagaggacgccattaaatttaagatggatgataatgccgaactgtatgattttgatgatgagaaggatgaaaacaaggttgatttcaagaaacttgttagtgataactggatcgagccacctagaagagaaaggaagagaaactactctgagtctgattactttaagcaagcgcttcgccaaggtgcaccagcgaagcctagggagccaaggattccaagaatgccgcacttgcatgatttccagtttttcaataaccaaaggctaaatgaattgtacgaaaaggaagtgcggtacctcatgcaagcaaaccagaagaaagataccattgatggtgaagacgaagatcaattggagcctttaacagcagaggagcaggaagagaaggagcagttattagaagagggttttgcatcatggacaaggagagacttcaacacatttattcgtgcatgtgagaaatatggtcgcaatgatattaaaagtatatcctctgaaatggagggtaagacagaagaggaagttcaacgctatgctaaagttttcaaggagagatacaaggagctgactgattatgatagaattataaaaaatattgaaaggggggaagcaagaatatcccgcaaggatgagattatgaaggctattgggaagaagttagaccgctacaagaacccatggttagagttgaaaattcaatatggccaaaataaagggaagttctataatgaggaatgtgaccgctttatgaatacgactccaacaaagagagcagcactaaggaattcagagggtgagagtgctccgttgagctcattcaagaggcgacggcagtctcttatggacgattatgtgggctcgggaaggcgaaagagagggtgatgtgatgtttgacatcctgcctttggagctctcagcgagatgcagtctctgcaatgctttaagcccgtacgtgctgtgcttagtttcttgtgcacgtgagttgaatgcctcaagggctggtgactttgtagttgctgtagattcggacttcgcaattgcaactgttgctacacttttgattcactttttcatcgtggccctaacactcattccaaattataagattagagattttaacttaacactagagttcgatcaaatttatgcaataaaataataattatccctcctaatatataaggcgtaagcacctttggtt

SEQ ID NO: 72425 - DNA, 660 bp, Zea Mays
ttgcatggtgcacaaacttggatatgggaactgggatgaactgaaagctgccttccgtatgtctcccttattccgatttgattggtttgtgaagtccagaactacccaagagttggctaggcggtgtgatactcttatcagactggttgaaaaggaaaatcaagaatatgatgagcaagagaggcaggcaaggaaggagaaaaggcttgctaagaatacgactccaacaaagagagcagcactaaggaattcagagggtgagagtgctccgttgagctcattcaagaggcgacggcagtctcttatggacgattatgtgggctcggcgaaagagagggtgatgtgatgtttgacatcctgcctttggagctctcagcgagatgcagtctctgcaatgctttaagcccgtacgtgctgtgcttagtttcttgtgcacgtgagttgaatgcctcaagggctggtgactttgtagttgctgtagattcggacttcgcaattgcaactgttgctacacttttgattcactttttcatcgtggccctaacactcattccaaattataagattagagattttaacttaacactagagttcgatcaaatttatgcaataaaataataattatccctcctaatatataaggcgtaagcacctttggtt

SEQ ID NO: 72426 - DNA, 302 bp, Zea Mays
catcattttactagttggttaggaccgcaaagtctaaacaccgacaaaatttataagagagaaattaagtataaaattggttaggctggtttgaaaatagttcgggattcctgatgtaaaattgacttcaatattttaggagcgagttttggaaatcgttgggggaacctaacaaatgtgctcctgacttttttaaccactttggaaactcattgatttgtcattttttgaactattggagatgctcttacataacttccaagtattgactacagagatttcaatatttttttctgttgaag

SEQ ID NO: 72427 - DNA, 2054 bp, Zea Mays
ccatttgccaagggatcatgacttcccatacacctctaccaaggaagcgaggcagagtaacactacgaggcctttacaaagttccactagcttcagaaaacccgctacagtttctaggaaggtccaacgcagggatccctcgcctgaccgccatcgcagcaaaatcaacctaaggaccagcctacacggaccactcccctactgcccttgcccctttcgggtaaggtagtcatccactagctttcctaattagtcagctaagggcgtcccataccacccttgtggtagcactgttttcccgggtggttctacatgttccaattaacattatgatcttatcacgaacagtaaataacaaactgataataatagtatgatcattaataatgtgtatcttcatacccaaaaccacataaagcaatagcaggtattacccaaaaattcagtggtaaacaaggtataaagatagccaaactagggtaacctattgggtcccattaaaagacattattgggtaaaaagaagtgatcaagggcacaacttgccttcaacgagatcctgctcagcagtatccacctgctgaacaccgggagtctctgtggcttgctcgtctactcacaacaatacaaacaggcacatgatagcggaaattaacatcacaccaaacaacagaaacaaaacgcatgataatattctacgcattgtaaccagatcgttgggatcaagaatccctaaaatccgaactacgattatcgtgttatgattttatgaagttattacgtgattggtatagattaaatcaagtgaacaattttaatctatgtttcatgactaaacagagttattaggtgataaacaatattaaaacataattaatgccactggaatggataaaaaaggattaaatatgaattttctatgatttatataagttatgcaattatttttatactcaaaaatcaatttctaaatctctttctctgatttaccaattcactggactgcgcgccaattactaagaagctcgaggtttaacttgcaaaagtctaccagactcagacttaacctgtggtggacagcgggttaattgctaataaacccagggactcttttacaaaacagactcggcgaaggggtatcctcaagtcttggtcgccgattaactttctacggttcagattagatttgtcacaaggctgaaacgacacgagccaatagccactggatccaagatccatgaccgagatccgactacaccaaattctcatctgaacccaccgatccaatctaacggccacgatttaatgcaccgaaacggtttacttgccgctaatcctagccgttcgggtgcacatcgacggacagcaaccgatcaccgcccgatccaccgatcagacggcggcgccgcccgcagcagtggtggcgcaacgccggcgagacccatggccacgccccgagggcccgaatctctcgtcctactgcggctacccaaccctggggtcgatgcgaacatgctagaagcgaaattaccgtggattacgccgcgacgttcactggtcacgggcggcggcggaggatgaagtccggtgagcaattcgaagtcgcgctagtggtcgaacccgcacgaggatctcacgtgtggactcccagtactacgacggagctccccgacacgatttatgggcttcagcggtgacagaattgaatatgggccgcggtggcgcacaggcagatcacacggcggcagaggtggctatgggtgtgctggtccagggttacgaaagtcaaggtggccgcgcagagcttcactttataccagaccaaccatcctccccacatcccccgtgagctgagcatcatggaaatccgttggtcaaccacccgcgccgagacccccgagagtaagatacacagggcctacaaggcgggtctcgcgaaccagtgagacgaggtgacgagcaagcgcgagggagtgactgccaagtgtgatagtcgcctagagggggggtgaatagggcgaaactgaaatttacaaatataaacacaactacaag

SEQ ID NO: 72428 - DNA, 14453 bp, Zea Mays
gacatgtccggtggcacaccggacagtccggtgcgccagaccaggggtgccttcggttgcccctttgctcctttgttgaatccaaaaaacttggtctttttattggctgagtgtgaaccttttacacctgtataatctatacacttgggtaaactagttagtccaaagatttgtgttgggcaatttaaccaccaaaattatataggaactaggtgtaagcctaattccctttcaaagtgggccccgcccgtcagggtgacaacgcgtgcggaggaagggagtttggatggccagtgggggctgcatgtcagcgcaacgcggaggcgcatgaccgagatgtccatttgggtcagaatggtggcagccgacccaagtgcacaatttcatttctttttttattctatttcaaattcctttctatatattcaaattctagtatttggatttcaaacttgatttgcagattgctcactgagtatattgcacaattaaaagtaccagttttggagatatatttatatatattttctttatattttataccctttctccttttcttttctctcctttttcccatttccattttcaaaccctaagctccatttaggcttcaattcaatttccttattattatattttgattaatagtgttgctattattattatatgcacaagcaacaaaactccagcatgatgcacattttattgagatattatttattttaaacatgtctcctaataattcttatgaatgagatggcataaatttttattcctctctttagtttccaaagttgggtattacaaatcctacccccttaaaaagaatctcgtcctcgagattacgaagaactagggaagatgtggggaaagtctactcgtagctcttcttctttttctcaagtagcttcatcctcactgtgatgaatccattgcactttgcacattttgatcaccttactcctcgtgacacgtgtcaaagtatcaaggatcttgataggatactccgtataagtcagatcatcttgaacactaagatcctccataggtagctgctcctcgtgtaccctgaggcacttcttcagttgggacacatggaatacttcatgtacatcagcaagatggtcgggtaattccagttggtaggcaacttctcccactcgctttaggatcaagacagacccaataaagcgaggggataacttccctttgactttaaatctcctcatacctcggatcggtgacaccttttagatacacgtgatcattctccttaaactctaatagtcttctttgggtatcaacatagcttttctgtcttgactgcgcagttctcaagttctcccgtatcaagcgtacttgttcttctgcctcttgtataatttttggcccaaagaactgcctttcaccagtttgattccaatataaaggagtcctgcattttctgccatataaagcctcaaacgcggacatcttcaaactggcctggtagctattattgtaagagaactccgcatagggcaaactcttatcccaattgccaccatgttgaagagcacaagctcttaacatatcttctaatacttggttggtcctctcggtctgcccatcagtttgtggatgataagccgaactgaaatttaattgtgtccaagcactcgtgcaacttctgccaaaaccgagaagtaaattgtgatccccggtctgacacgatcttcttaggcactccatttagacaaactatccgagccatatacaactctgttagcttggctcccgtgtaattagtcctcacagtaatgaagtgagccacttttgttagtctgtgcacaatcacccaaatagagtcataccttgcagaagtgtagggtagaccaacaatgaagtccatgccaatttccacttccactcgggtatcttaagcgggtgaagtaatccaacaggtctctgatgctcggcttttaccctctggcaaacatcacattccgccacatgtgcagcaacatccctttttagtccatatcatcaatacttctgcttcaaatcctggtacatcttggtactgcccggatggatggagtgagctgagtcatgcacttctttcaatatggtttcacgaagaccgtcgatcttaggaacacaaatccggttcttgaaccatatcgtgcactgctcatcctccgtgaagtctgggcctctaccttcagttatcagatctttgatctcttaaattttgacatcaccgatctgaccctttcgtatttcttgttctatggtaggttccacttctatgttaattcctttagtatgagcaactatccccagattgagcttctcaaagtcttctgctaactcatcaggtaactgggctacaatggctgcatgaacatggtccttccgactcaaggcatccgcaaccagattcgtcttgcccggatgatagtgaatttccaagtcatagtccttgatgagcttcaaccaatagcgttgcctaaggttgagatccttctgagtgaagatatactttgagctcttgtgatcagtgtagacttggtatttagtccccataatataatgcctccatatcttgagagcatgcactacggctgccagttctaagtgttgagtggggtagttaaactcatgtttccgcaactggcgagatgtgtaggcgatgacatgtccttctttcataagcacacatcccaagccctggcggcacacatcacaatatatgtcaaatcccttctgtaggtctggcataataaacactgggggtgacatcaacttaaaccttaattgattgaaactctcttgacattcccaggtccaattaaactcctttcccttctctaacaatgaggtcataggcttggctatcttagaaaatccttcaataagtcgccggtaataacctgcgagtcccaggaaactccgaacctcagtgactgtcttttgtatcttccaacccactatctcttttactttagctggatccattcagattcttcctttggagatgatatgcccaaggaatggtacttcatcaagccagaactcacacttgctaaatttggcatagagctgattatcacgtagcttttgtagcaccatccgcaaatgttcgtcatgatcattatcattcttgtaataataagaatgtcattgatgaataccacgacaaatctataagatactccatgaacaccatgttcatcagattcatgaagtaggctggtgcattagttaagccaaacgacatgactgtgaactcatatagaccatatcgggtagagaaagctgtcttgggaatatcagatggcctaatcttcatttggtgataacccgacctgaggtcaatcttagagaacaccctagctcctctcatccgatcaaataaatcttcaatacgaggtaaagggtaattgttcttgattgtcacatcattaagtgatctatagtctacacacatcctttgcgaaccatactttttctgtacaaacagtaccggtgctccccaaggtgaggaactcggacgaatgtaccctgcttcttgcaactccgttaattgtttcctaagttcttttaattcttccactgacatcttatatggcctttttgaaataggagcggttctaggtaagagatcaataacgaattcaacttccctattcggtggcatcctgggtaattcctctggaaagacatctggaaagtctctaaccacacagatgtttcttcccacaaattttccatctattaaatatatggcgggtctgatagaggcggttatggtaatctcaacttcaaatctttttcctttagaactggtgagttctacggtcccctttccataaccaggatatcccgagtatcaggtctatgctgctttcttctaatactataggtgtagaccagaattcccttcccataattgtcagtgttaatctgtgtgtcatgtaatttgcttcaacgggccctttaggggtaattactatcagtggttttttcatagtttgaagtggtaacttatttgtggtggcatagctagcagaaataaatgaatgcgtagctccagaatcaaataatatgactgctggaattgaattaatgtaaaacataccgatagcgatgtcagctccattagcagtagcctcagcactgacttggttgaccctagcaatgctgaatcccttgtcagaggttggagtctgttgcttgttctgagctggtgtgttggaattccccatcggacaagcgtttgcatagtgcccaacctgactacacttgaagcatgtggggcctgttctctgtctgcgggcctcgccggggtgccagtgggggcaacctgacgagtgtggggtgtctgtggagtctcctgagctggacgcggtcctcctccaggacgagctggtgtaccctggggcggaacatagcgaggacgaatactgctgctaccctgcccctgtgtaatggccttcctcttcatttctcccagttgaacacgcttgtgctcaatagctagagctttgtctaagagtatctaaaatgatggaaaggtgtgagcaaccagtgcatactatagtggtctattaagtccctttatgaagtgctcttgctttctctcatcatcagccacttcatctggagcatatcttgatagttgaataaatttgtctcgatattcgctgactgacatattgtcttgtttcagagacaaaaattcctttttcttaatcttcatcagtccagtaggaatgtgataatttctaaactgtgtggtgaattctgcccaagtgatagtatcaacagcatcatgggcagcagtataagaatcccacaaatcagcagcgggtacagtaagacgaccagaagcatagagcaccatctcccggtcagagcattgagcaatatttaacatattctctactgactttaacaaattatcggcgtgcagaggatctggagagctggcgaaggtatgtggcttgtggttcatgaactcccggtgcttgtcccggggtggaactggtggtggtggtggaggcattggtgcttgctgctgtcgcactattatctcttgtcgcattttctccctcatgtcttgcctttcctggcgcatctcttggcgttcctgccgcatctacgcttgcatatccttcatagtattggccatttgttgcagcatctgcatctgggctgcaaccacttgaccagtcctggtcggtggaggatttggaggattcatctctgcttgctgttgtctaataattctccagttgtgggggttggcaggtttagatcgattccgtctcccttcctggtattgaccatttgggttagaaatacatggtaagatagaattgtagaatagacgagtaattgtgaggcagaatcttttgggtgttttattagctaagtagattagtgtgtcatctactcattctaattaccttatggtggtacatgctagaatgctctgctatactatttcaatcaatcaaagaaatcaagcatttttcatcagaacaaccatccaattacttcaagtagagaaaataattttaattttgtcttaggtctcctatctctttagagggtcataaatgtaggattccaaagtgtgaaatcctccttgtcttagagtggaacaggtaatagtaatcagagtagaacagtagaaggtgagacaggatcaagtaaagtatagaaagaatcagagtaaggtaagtaggtaagggttttgtccagttctatctaggtttcgtcctacagtcaatatttcctctgataccacttctgtcacacccggatttaagggataaagtcgggtgcgtctcatatgtacgtcaaagaagaacatcagatataatgacaaagtgtatagagttaaatctcacaagtatcattattacatagcggaagtcttacaaaaataaatgataacaataaaacgaactaaatagttattccttggcgctatcaagctgactgggagacgccacctagatcaactcgtactcctcattatagggctcttctttgaccacctgctcttcacctgtggggggattatatgtcgcaagagtgagctcacaaaagatcatagctcaacaagttgtggggaataatgtgtatgaactcaccaaaggtgagagctcatgtgaagtgtaagtttgaacaacaaataagtgttaaagcttagcattgcttttaataagttggttaaattttattagcagttactaaatgtaagtaaataacaaaccagagtaataaatagatcaaattaataataaaccacaatgcgaatgcaaatgacaaattgaatataaatttataaattaatcatgtgagtgttcgagccgctcattacaatataccaattttacactctgcaggggttgcccatctttccccataagtcatgttacccatctgccaaaggatcgcgacttcccatacacctctaccaaggaagcgaggcagggtaacactacgaggcctttacaaagttccactatcttcagaaaacccgctacagtttctacgaagctccaatgctgggatctctcgcctgaccgccatcatagcaaaatcaacccaaggacctccctacactgagcactcccgtactgcccttgcccctttcgggtaaggtagtcatccattagctttcataattagtcagtcaagggcatcccataccacccttgtggtagcactgttttcccgtgtggttctcaatgttccaattaacattatgatcttatcatgagcagtaaataaaaaactgataataacaatatgatcattaataatgtgtatctccatacccaaaaccacataaagcaatagcaggtactacgtaaaaattcagtggtaaacaaggtataaagatagccaaactagggtaacctattgtgtcccatcaaaattaacctatgcagatcataatgattaaaaggaacattattgggtaaaaagaagtgatcaagggcacaacttgccctcaacgagctcctgctcaacagtctccacctgctgaacaccgggatcctctgtggcttgctcatctactcgcaacaatacaaaaaggcataggatagcagaaattaacatcacaccaaacaacagaacataatgcatgataatattctacgcatcgtaaccagatcgtagaaattatcatcacaccaaacaattcggagttacgattatcgagttatgattttctgaagttattacgtgattggtatagattaaatcaagtgaacaattttaatctatgttttatgactaaacagagttattaggtgataaacaatattaaaacaaaattaatgccactggaatggataaaaaaggattaaatatgaattttctatgatttatataagttctgcaattatttttatactcaaaaatcaatttctaaatctctttctctgatttaccaattcattggactgcgcgccaattactaacaagctcgaggtttaacttgcaaaagtctaccaggctcagacttaacctgtggtggacgacgtgttaattgctaataggcccagggactcttttacaaaacagactcggcgaaggggtatcctcaagtctcggtcgcctggtcaactttctacggttcagactagatttgtcacaaggctgaaacggcacgagccaatagccattgggtccgagatccacggtcgagatccaactacgccaacttctcatctgaacccactgatagagctggagtgcccgatctttcggtgagtggagataattccgatttggtggaagtagaccctcacgatccgactacgacgagcgatcccgaagcgccaatgcaatcgctgaaccaacttccaatggttaccgaccttgctgatgcgagatcggcctgatcatgaagatcgtttcttgtgcgcaatcgaagaacgaacaagaaaaagatgcgagcaatcttaatatcactcgaggtggagttctgaatcacagaggacagcacatatttgtgcgtgttctggggtagctgaagctagatgtaaaacaaaactcgaagaacaaaggaggcgcaactcctatataaatagagagatggggcgcagcccctaggggcggccaaccctaggtcttccactatgggccgcaattgggctggtcgtctattcttctgggccctcattcttcagtagcatgacgaagttaagatctctggcacgtgcccgagtgattggcccagctaatgaaggaagtggcgcttgatgtggaggtgctgctgatgtagtcgtactcatagtgatgtcctcatcatcctcccttcttgaagtgaagtcgtcctcgacggcaactcctcatcctcggccatatatggtttcaaatctgcaacattaaaactagtggaaacaccaaattccgcaggcaggtcaaggatataagcattatcattaatctttgttagcaccttaaaaggaccagcagcacgaggcattaatttagaacggcgcaaagtaggaaaccgatcctttctcaagtgcaaccaaaccatatcacctggctcaaaagtaacaagttttcttcctttactaacagcaacctgattttttgcattagtagcagcaatgttttgttgagtttgttcatggaggttaatcatttgttcaacatgtgcaacaacatctatgtgtgcagcatcaagcgaaaacaaagcaataggcgccctaggaatgtaaccataaacaatttgaaaagggcacatctttgtagaagaatctgttgcatgattataagcaaactcaacatgaggcaagcaatcctcccaacgtttcaaatttttgtctaaaacagccctaagcatggtagacaaagttcgattaactacctcagtttgaccatcagtctgagggtgacaagtggtgctaaacagcaatttagttcccaatttattccacagagatctccaaaaatgactgagaaacttagcatcacgatccgagactattgtattgggaataccgtgcaaacgaataatctctctaaagaacaattcagcaacattgctagcatcatcagtcttatgacaaggtatgaaatgagccattttggagaatcaatcaacaaccacaaaaatgctttccctccccttcttagttctaggcaatcccagaacaaaatccatcgaaatatcaatccaaggggaagtaggaacaggcaaaggcatatacaaaccatggttgttcaaccgtgacttagctttctgacaagtagtgcagcgtgcaacaaggcgctcaacatcagcgcgcatccgaggccaaaagaagtgggcagccaacacctcatgtgtcttgtagacgccaaaatgccccatgagaccgcctccatgcgcttcctgtaacaacaaaagacaaaccgagctagctggaacacacagcttgttagcgcgaaacaggaacccatcctgtatgtgaaatttgccccatggtttcccattaatacaatggccgaaagcatctttaaaatcagcatcgtcaacatattgatctttcacagtgtgcaaaccaaagattttaaaatctaactatgacagcatggtatagcgacgagacaaagcatcagcaataacattgtccttcccgttcttgtgtttaataatgtaacgaaaagacttaatgaattctacccatttagcatgactacagttcagatttgtttgggtacgaatatgttttaaagcctcatgatcagaatgaattatgaactcacgatgccaaagatagtgctgccatgtatgcaaagtacgcactaaagcgtaaagctccttatcataagtagaatatttcaaactagcaccacttaatttttgactaaaataagcaacaggttttccttcttgtaacaaaacagcacctagcctaataccgctagcatcgcattcaagctcaaacactttattaaaatcaggcaattgcaataggggagcttgggttaacttatctttcaaagtgctgaacgcttcctcctgcgaatcactccaagcaaacgacacatctttctttgtaagctcatgtagaggcgctgcaatggagctaaagtcacgaacaaatctgcggtagaaaccggcaagtcaaagaaagctccgaatttgtgtgactgtcgtcggtgtaggccactcccgaatggcagcaatcttgctgctatccacctcaatgccctgtggagtaacaacataaccaagaaacgagacacgtcgtgtgcaaaagatgtatttttccatgttagcaaataactgggcagcacgcaatgcatcaaaaacaacacttaaatgttccaaatgctctttcttagatttgctgtaaataaggatatcatcaaaataaacaaccacaaacaatcctatgaagggcctcagaacttcattcattactcgcataaaagtgctgggagcattagtcaatccaaacggcataaccaaccattcatataaaccaaatttcgttttaaaagccgttttccattcatcacccattttcattctaatctggtggtaaccactacgcaaatcaatcttagtgaaaataatggcaccactaagctcatctagcatatcatcaaggcgtggtataggatattgataacaaatagtgatgttattaatagcacgacagtctacacacatacgccatgacccatctttcttgggaacaagtaacacaggaacaaagcaagggctaagagactcacgaatgtatctcttgtcaagcaatgcctgtacctggcgctgaatctccttcgtctcatccggatttgtacggtacggtgcgcggttcggaagctgtgcgccggggatgaggtcgatctggtgctcaatgccacgaagcggtgggagacccggtggtaagtccttgggaaagacatcagcgtactcctgcaaaaggttagcaaccatagggggaatagccaaagatggtgcatcatcaagtgaaatgaggacactagagcatacaagtgcatagcatggcaaatgagcaccgtgtagattatcaaaatcagcacgtgtagcaagtaaaacaggagccttcaacttgatttcagaaggaacatagggcgatggatctagttgtttagcagttatagtagctcgggcaagatcatctttaacaatttgttcaggtgtcattggatgtataactattttctgacccttaaaaataaaagaataatgattcgaacgaccatgatgcaagctatcagtatcatattgccaaggtcgaccaagtaacaaagagcatacttccatgggaataacatcacaatcaacaaaatcagaataagcacccatggagaaaggaacacgcacggaacgcgtgatttttattttaccaccatcattaagccattgaatgtgatatgggtttggatgcttacgagtgtgtaacgacaacttttcgaccaacatggtactcgccaaattgttgcaactgccgctgtcgataatgatgcgaattgaccgctcctgcacaacaccctttgtatggaacagagtgtgtcgctgattcttctcgggcaaagcgacctgtgtactaagaacacgctgcacaacaagactttcatacctatcagcgtcgcccgggttgacatgtacctccgcttgagctgcatggttagtggcaagtagtgcatgttcaatttcttcagaatcactagcggaagagtactcaccatcgtcacgaatgagcaaagtgcgcttgtttgggcagtctcgaatcacatggccaaatcctctacaacgatgacactgaatatcccgtgtacgacctgtgggtggggcagtgctggctggtttggtcgtcttctcgcgtggagtagtggtggacgtgggtggcgcagggggaactggtgctgaggtggatgtcgaccttcgtcctgcaaaagggttagaatatgtcttcgagcggcgtccctgcacttcacgttcagctttgcaagcatattcaaataaagtagtcatatcataatattccttataatcaagtatatcctggatttcgcggtttaaaccaccacgaaaacgtgccatagcagcgtcgttgtcctccaatatcccacaacgaatcatacctttttgtaactcctgaaaatagtcctcaacagattgagaaccttgctgaaaacgctgcattttattaagcaaatcacgagcataatacgaaggcacaaatcgatgtcgcatcgcagctttcaactgatcccaagtggttggaatggcagtgggatgtttcattttatactcacgccaccaaattaaagcaaaatcagtaaattcactaatagcagctttaacctgagaatgtgcagcaatattatggcatgaaaatttttgttcaacctctaactcccaatcaagatatgcagcaggatcatatttgccattaaaaggtggaattttaaatttaatcttagaaaataagtcattagggggatgacgaaccacacggcgtgcccgaccacgacgatctccatcgtcctgctcagtgtcaccaccatagtcctgctccatctttgtggtcaacacatcaaggcgtgccaggatggtgtcgagtgtggtgcgagtcgccgtttgagcaaggtcaagctggttgaaacgctcggtcgtcgaagtgaccgttgaatcaagccgttcatgcatcgtcctagtgtcagcagcaagtccatcaacttgtccccttacttccagcaactgggcatccaccgtgtcgtgtgctcctgccatagttagcgcaaacaccaaaacaccaaaaggagaaaaaccgacgacaacagggaaatggtggtgacaacttgctcaatgaaatgctgttatcaaattcttatccgttcttaccaagccacagtggtgaactgcaaccaacaggtggaactgatgaaagattggatgagcgattgcctggagaaacagaattcttctcgtcgtagaaatatgtggagttttgggtaggctgcactcaagtcaaggattagcacgatcaaacaataatgcaaagttgaattatagtgcaaaacacgaaactatattgctggccacaagtgcaaaggacggatggaactagcagaatgacagtaccgtaaatattgttctagcgaggcaaaaaaggcactagtaggaatcacaggtgattttgtttttcttttttgtatgattttttgatatttttctcagcacaaggagcaacaaacgaggagctacacgaaatttcacctaaaacagagttcagatgtggtctacagaaaatcaggaagttctctgaaaagcgtgcgagaactttgacgaaatttttctttatttttctgatttttttttacaattttgtcgaaacccaaacagaccgaaggtgagtttggccggcctcagaatggtgtcaacaagcccctgtaaaaatttcagattttttgaacaatcgagcgaaaagttatgcccggtttaaggaaggtatgtttaaaacgaccgagatgagacaaccgctttgtatcctttctccttcgttttctttttttttgtttctgtttttttacgtaaccgaaggagaaaaacaaggaagcggcgttgactcggtttgtttttttttctgttttttttgacgtaaccgaaggagaaaaataaggaagcggcgttgactcggtttgtggcgttgactcggtttgatgtaaccgaaggagagaaacaaggaagatggttgcagtgcgctagggtttgatgtaacaaaaggagaaaaacaaggaagctggttgcggcgcgctagggtttgatgtaaccgaaggagaaaaacaaggaagaaagaaggatggtgagaaaaaacagatgtgaccagcaacaaatgacgcgaaagcacacaaattcaacaatgcagattattgaaagaaggtgtgaggctcaaaagggtgctggtataaggtctaacctgaatttttatgtggttttgtggactgtaagagaaaaaaaacatcgataaactcaccgatcaacctggaaatctgataccacttgatagagctggagtgcccgatctttcggtgagtggagataattctgatttggtggaagtagaccctcacgatccgactacgacgagcgatcccgaagcgccaatgcaatcgctgaaccaacttccaatggttaccgaccttgctgatgcgagatcggcctgatcacgaagatcgtttcctgtgcgcaatcgaagaacgaacaagaaaaagatgcgagcaatcttaatatcactcgaggtggagttctgaatcacagaggacaacacgtatttgtgcgtgttctggggtagctgaagctagatgtaaaacaaaactcgaagaacaaaggaggcgcagctcctatataaatagagagggggcgcagcccctaggggcggccaaccctaggtcgtccactatgggccgca

SEQ ID NO: 72429 - DNA, 5681 bp, Zea Mays
catggccacgccccaagggcccgaatctcttgtcctactgcggctacccaaccctggggtcgatgcgaacatgctagaagcgaaattaccgtggattacgctgcgacgttcactggtcacgggcggcggcggaggatgaagtctggtgagcaattcgaagtcgcgccagtggccgaacccgcacgacgatctcacgtgtggattcccagtactacgacggagctccccgatgcgatttctgggcttcaacggtgacatgattgaatatgggccacggcggcgcacaggcagatcacacgacggcggaggtggctacgggtgtgctgatccagggttacagaagtcaaggcggtcgcgcagagcttcactttataccggaccaaccatcctccccacattccccgtgagccgagcatcacggaaatccgttcgtcaaccgcccacgccgagatccctgggaggaagatacacagggcctacaaggcgtgtcccgcgaaccagtgagaggaggtcaggagcaagcgcgagggagtgactgccgagtgggccctgcccgtctgggtgacaacgtgtgcagaggaagggagtttggatggctagtggggcccgcatgtcggcacaacgcggaggcgcacgaccgagatgtccaattgggccagaatggtggcagccgacccaagtgcatagtttcatttcttttttttattctttttcaaattcctttctatatattcaaattctagtatttggatttcaaacttgatttgcagattgctcactgattatattgcacaattaaaagtaccaattttggagatatatttataaatattttctttatattttataccctttctccttttcttttctcttctttttcccatttccattttcaaaccctaatctccatttatgcttcatttcaatttccttattattatattttgattaatagtgttgctattattattatatgcacaagcaacaaaactccagcatgatgcatattttattgaggtattatttattttaaacatgtctcctaataattcttatgaatgagaaggcataaatttgtatacctctctttagtttccaaagttgggtattacacggtcacccatcccaaattatttcaagccaagcatgtttaacttggagactctttcgagataggcttccgaaaaaaagatacaccttgttggtctggatactctattaattctattaagccttaggccaggatatcaccatagcaggggctaggatatcacaatccaccccccttagaagaccgatgtcctcgtcgatcaaccccaatccaggaacctcccctcttagccacatctgtgtgtctagtgtcgtcatatgccaatgccatgtgaccactttgggcccacatgtgccatatacccgaacccctaaccgacatacgcccgtgaaaccgcgagggtcggctctgataccacttataacaccctgcccaatccctggcccgacgatacttgctcctggcagctctctagtatcatatattgtccccacagaccaacacgagttatttgtgcacactttgtcctcactcatgcgcacccgagaaaactttccagtcggtcacccatctcaaattgctacaagccaaacacgcttaacttggaggttctttcgagatagtcttccggaaaagaagatgcaccttgttggtttggatactctaataattatattaagccttgggccaggatatcaccattccagaggccaggatatcactcttagagatgctctagtgcatgatttgcttctgggtacatgcatctataaaatagtgcaaaaatgttttataacttggatttctagggctttgagcatttattctcttataattttgtttaaactttaattgaatttaattgagagaaggagatatgctatagaattggttcatgaatagaagcacagaggttttcaagatatatagaggagatctagcggcttatagaaatatggcctgattgatctcctagaatcaggactacctaaacaggaaggtgtcctatctatcggatccccaatcagaggaccttccaaacaagaaggataacctatcctaccagatcctgggcagaatattttctgctgtaatactcactggcttctatacatggcatggacattacccaaggcctgcccaatacaagcagtattgctaacaccccctcccccgcagtcggagcgtcgaagccttggacattcagactggaccgaaactctgtgaacactgaagaaaataaccccttggtgaaaatgttggcttattgcgaggatgtcgggacgtgaagaacaaaaatacaaggttatattaagcgctaggcgttaggcgggcgttaggccactgcttagcgcctataaagcttaagcgtagattaatcgtgcttaagcgtttgtaggaatattacaatataatatatatatttgcacagaaaaacagttgtacctaggaattaggggtacttacctggattaatggacatgtttttgcagccttgctgcacgttcccagcttcttaccttcagcccttcaccaaacataacagaagaggtggaggagcagcagaaaaatagcaaaggagggagagggaagaacgcctggaatactggattattgggggaagagaagggctgtgctgacctggacgattggggaagagcctaagaggacaatccggcaggcggcaacaacagacttggataaagtggaaatgcagcagctcccgcttttttccctcctctgtcctctccacagcagctcccaccacttttccctactctcaaatgcagcagcagctcccgagcagataaagtggaaatcccgccactttatttcccgccacgctcaaggttaggattaatggataaagattaggttagataagattgagttagttacttgggattagattaagttgaggtagttacttgggggccaagtcttcctatctatataaggatgtgttgtacctccttaagggggaatcaatcaatgaagacgaattagtcctagatctctctaatactctattctcccccaagccaacttcgctcgcctatcttcctggccctatgaactaggaatcataacatctggtatcaagagtggtatcaagagtcagggatcctttcccatgacttataccgcggacgatgtacgcacctagcgtgaggagctcgctcgtgccagggcagatctagagcaggcccgatcagctatcctccagctctgtgatctactcgtggcaaaggtggagtttgaccgccgatcagtggcaacaacgcgacaacaggcgactgcacgcggcgtccaggtgcggcatccagtgcggcaagttgtggcagcggcgcgactgtagacaacggcttgccgtcatcaggctgcgacatgtggcttcctggcgcggcgtcaagcacatcaagcggcggcgcgacttgccatcttcaggctgcagcacgtggcttcctagcgcggcgtcaagcacggctgcacactgcggtccacagttccctgacacatagacttgcatcgatattgcgcgttgaacaacacacgacatgtggggcggcaaggcctttagcagagttggccaatcctccactctagttcattgtcctattccatagccatgtggacaacaaggacatgtctggttgggtggcgatgtctccgctggaacatacggtagctctggcagtaggactagtgagctgccacgtcttggcctttgcagcctggacgaggttgttcccatgggatctagggggatcaaccttggcatatgttaggttgtttattttatttgcaaataaattaaagccgagatgtaaaaggcttctagttagtgttgcactttcacgtgcagatcaagttagacagcaaggctattgccatgcaccccattaaagctggaggactagttgtcttcgaagggtgggggaatgtcatggggcggcagcccagagcatggaggccatatggataggctcagggttaggattggtggataaagcttagactagataatattgagttagttacttgggattagattagataagattgagttagttaattgagattagattagattgagttagttacttggggccaagtcttcctatctatataaggatgtgttgtatcttcttaagggggaatcaatcaatgaagaagaattagtccctctaatactctagtctcccccatgctgactccgcccggctatcttctcggcgctatttattcccctatggactaggaatcataacagtgctgatgttgatggggttggaagacatatagacagtactgatgttgtcagagtagaccagagtggtgcggcgcagaggagcttgcagttcttggagtaactggcgcaaccaggtggcgtcagcgacggctttcgccacacctcagtattcagcctcggcgctggatggggagaccgtgtttaacgctcaaaggactaggagatgagactgtcacccaagaacacggcgaagcccgaggtagacttgtgtgtatcaggacaacttgcccaatcaacatcgtagtaaacctctagctcggtctgtgtacaaggtcggatcaacaagccgagacgtagagtgtcatgaacgtaacgaacgatgcgcttcagagcagctagatgaggctcacgaggatcatgcatatgaagacagatctgctgaactacataggcgatggcagacctggtgaagatgaggtaatggagagccctgccaggctatggaaatccacagggtcagccactggatcaccaacagtaccaggcaactttggattgacattaacgggggtggagcagggcttgcactcaaccatgtcgacacagtcgaggatgtcaatcatgtactggcgctgagacatgaacaatccatctgccatgtgttgaacctgcatccttaagaagtgatgaagtttgccgagatcctttatagagaattcttgctaaagcggggtgatggtgcgacagagaagaacaactgaagaagctgtcagaacaatgtcatcgacatataacattaggtacaccatatcatcgccgcgacgataaacgaatattgaggtgtcagacttcgcttcaacaaaaccaagtgagagcagaaatgaggcaaactgactgtaccaggctcggggtgtttgcttgataccgtataaggaccgattcagccgacagacaaaattcagatgagcaacatcagcaaaacccgacggttgtgagcagtatactgtctcaatagagtcccatgaggaaaagcgttcttgatgtcaagctgatgaatgggccagttgcgggacagagccaaggagaggactgtgcgcactgtagcaggcttcacaacaggactaaatgagacaattagggcgggttatagggagtagccatgcggacggaaacgtttccgctcccgccccgtcggaacccaccccttggcgctacctctcccgccgacgcctcgatccttgctccccaccacagccacacggcggcgcttgctccaagcccggcggccaccacttctctctccccggcgtcggtgggttctccttctccttcgtttcctctctctggtgggcgatcgtctcttctgggcgggtcttc

SEQ ID NO: 72430 - DNA, 5318 bp, Zea Mays
taggctttctatctacgctgatgatgtggtcctgtttgttaaacctattgaggaagatctgaaatgtgttagattaattctgaattgttttgggtcagcctctggattggttaccaatttgaataagagttatgctattcctatcagatgtgaggagcatgtggttcaagagggctgcaatgtgctgaggtgcagtttggcctcatttccttgctcttacttggggctgccaatctcagacaggaagctgaagcgaaatgatcttaagatgtggatagataaaattgcagacagactccctaactggaaggctcgtttattgaacctggccggcaggacaacattggtgcggtttgtcttatcagccatcccaatttatctccttattgcaattaaaattcccaaatgggttattaaatcaattgacaagattcgcagagggtttctttggaaagggcgaaaggaggtgaatggtggaagttgtgctgttccctaggagagtgtgacaaggccactaagtttagggggtcttggtgttcctaatttgcaattgatgagttgggcactgcaggctaagtggctttggctagagaagactgatccaactcggccgtggcttggtttgtgtatccctgtgcagcagcaagttagacaattttttaatgcttcggtgatctctgttgttgggaatgggaccaatacttttttctggtcagacagatggctgaatgggcagaggatacaggattttgcacctgaagttgttaatatggtgagcagcaagccatttagttcgagaactgttgctcaggcgttgcataatgggcaatggattcgcgatatcacgaatcctttatctttgattggtcttcatcagtatttgcagctgtgggatgctttaagtggagtggtgcttaatctggaggaggacagacatgtgtgggtgcactcgagctctggtgttttctcttccaaatcttgttattcggcgttgtttatgggagctattattttccagccatggaaatgggtgtggaagtcgtgggcaccccccaaatgcaaattttttatttggctggcgataaggataaatgttggactgcggatagacttcagaggaaaggattacctcacccggtggtctgtccactttgtgatcaagagcaggaaactatattgcacctcttgtgctcctgcagtttcgctagacaattttggcatattatattttcagctttgaggatgggtcatcttacgcctactagggaggcgggctcttttgtggattggtggggcaaggtgcatagaagggtccccaaacatatcagaaaaggtttccatagtctcattatcctgggggcctggtgtttatggctgcatcgcaatagggcggtttttgatggtgtcaatccgtcattaagcaccattcagaggcttttcttggatgaggtggagtgctggtgtttggctggtgcgaagcagctcgagagtcttgggcttctggctgcatttgctaggggggctagggcttttcctagtgtatgaggctacactgttttagtttctttgtatttttgcctgttagggctttgtactttggtccatttcggacctttctctctttcaatataatgacgcgcagttctcctgcgtgttcgagaaaaaaaaaacaacaggactaaaagtctcatcaaagtcaatactagggcgctgcgaaaaaccacgaagaagccacattgccttgtacctctcaagagaaccgtcaacattgaatttgcgtttgaaaatccacttgcaagaaacaatattggcagactggggacgaggcactagaccccatgtatgattacctagtagggaggagaactcttcctccatagcctttcgccaatttggatcagcgagagcggcgcgataggtccgtggtaccggtgacagggccttcaaaaaataatattacattatatagtgaactaatagtctataaatgtgaaataaataatcataatgcgacattacaagtaatctaaattataattgtatccaatatcaatcgttgattaattttgagtagttagcgagctagagcgactcggctctttgcctcaatgagcacgaaaacctagctcggcttggctcgctcgaggctcgcgagccgctccgagctgagctaagtcgctccgtgctcgagccagctcgcgagcttcgagttttttcagccctagacgcccacctctctttccagcatgcgtcccgcgcttggagctgctagggggatgctgcagcagcggtggctttggcttgctgattggagtcttgttggcgccggtggcgaggcgggtagaagctggtactgaggagtgatgtacaagggttagttcctcaagtaacaagtcatttcgaacctctaggaaggtagggaggggtcacctgcaccgatggtgaagcccaatgctggcgaagcactcatttagaccacgaatgacgttgaggacgagagtgtcgtcatggaccggctcgccgagatcgccgagaccgagagcgtcagccatctctttgagcttgcggcagtagtcggtgatggagaggtcgccttggcggaagttgcgaaactccgcgtcaaggaagagagcccgagtttcgtgattctcgaggaactgggacccgatggcgagccaatcgtcgcgagcagaggcgtcacatatgagcatggcagcaccaagctcggtggtgatggtgccgacgatccatgacttgacgacgcagtccatttgcacccaacgagaagaggatgcagatgtgtcagtgagcacgtgatctgtcagcgtgtacttgccgacaacaagcagggaggagtcgcgccacctagtgtagaaggaggagatgtcaagaacaacaggggtgagagccgagaggttctgaaccgccacggcctgtgcatggaggttgaggagggtggctgcctcgtggatgaggagggcagcgtgtgcatctcctgatgcatggagattagactgggtggaggtagcgtcgtcttcaggcgcggctcggcgtcaggaatgagtccaatggcggcacaagcctaggccgtgtgcgctagagcggtgcggatgcaggtgtcaatggcgttgcgctccctggtggctgcggccgcttcgcgctcagcgtcgtgagcgagttgggcggcgcggaggcgcatgtcctcttcggtggcgttggtatgatctgtagcgagagcgctgtcggaagtgatagggatggacaacgtctgtacaccggccatgggatagtgcgcatgaagcagcaactgccaaggagcagcgctaggaggcgcgatacagcagcgccggagaggcgcgctaaacagtggaagagtgaggaacgagaacccaaactcgtgataccatgaggggagatatgctgtagatatggttgatgaatagatgcacagaggttcacaggatatatagagatcaaacggcttatagaaatagggtctgattgatctcctagaaccaggactacctaaatagaaaggatctcttatctattagacccccaatcagagaaccttccaaacaagaaggatagcctatcctatcagatcctgaactgaatatctcctgctttaatactttttttctcgaatacacaggagagctgcatatcatttcattaaaaggaggatgaaaggaaagaaattacacacgcccagccaaaggctaaggcacacagacaaacacactacccacaggttggactacagagagccggttaggaaaaaaaccagcaacagcagccagcaacctgatgactctaaggtaaaaaacctacatcctccacatcctgcaccaactggagctggaggccttttacaccagccttgctccaacaccaggcctcctctccagcattggagagagcagtagagagatggggagtggcaccgttgaagataatatcattcctgtgtttccacaagatccaggcccctaaaatgatgagagaatttaatccccatttcaaagctttatcggtcacagacactgcctgcagccaccactccaaggactccgacccgggttgaggtgagaggacagacagacccaacctttgcagaaagtagaaccaaaattgcctagcaaaaacacttagctagaaggtggttaatagtttccttttcctgatcgcatagcacacaaagagtggggtgggggagattccttttagccaaccggtctgctgtccagcaacggttatgagcaacaagccacatgaagaaggaacattttggggtagcccaccctttccacaataggtcagctgtcccaaataaggttaaacctagaaaaaggcatcataggctgatttggccgtgtattgccctgaattagagagcctccacaggtgtttgtcaggaattccttgctgcaggattattccctctaactgctccaagataagcaagaactcctgtaggatttgcaaagtaagggttccatgaatgtccctcaaccatctccaatcagccaaggccttggctacagttcttttattgataattctcttggaaaccgatctgagaagatgaggagcccaatcttgtaaacgtttgccccacagccacctaccttttcaaaatagcgttgacttaccatcacctagcttagttaccgtggccaaagagaagaaactgtggaccgtggaagctgcatgcagtttgaaaacagcccaaggtttgtccggctcggttttcctgagccacaaccatcttaatttgagagaccagttaaggcattgaagattcgaaatcccaagaccaagctccttaggccttgttactttcttccaagcagcaagacaatgccctccttcagcattctttctgcctcaacataagaatcctcgcctgattttatcaatgacatgaattattccctgaggaagatccagagccatagcatgataaattatagttgcagttagcacatactgaaccagaacagctctcccagctgtagtcattagatcagccggtccagccaggaaaaaggtcagctaccttgactaccagaaattgctgttgtgccttggacaacttcttcaaagataggggcaacccgggatatttgaagggaagccatccaccttacaagggggctgattctgaatggattctattagttttggcgcacaatgaataggaagcacactactcttctgaatgtttgtcttcagtccataggcctccccaaatagttgtaagatctttagaatcagctcattctctgcaggtgaaggtctcaggaagggttgag

SEQ ID NO: 72431 - DNA, 962 bp, Zea Mays
aagaccagcttcggctgctctagaaatcagcagagtagcagcttcaaattggaatggaaaaggctctttcctattcacctcgagtactgctgtgtatgactgcagtgacaatggattctgcagtgaggattctccttgtgtacccattggtcaaagcactcgtactgatgtgcttctaaaagctgaaaatgttgtccttgaggcaggcggctgtgttcttaggctagtaggactttataaatcagatcggggtcctcatgtttactggctgtcaaaaggaaccttggatgtgcgtcctgatcatatactcaatctgatacattatgaagatgcagcctctcttgtaatttccatcatgaaaaagagattacggagctgcatctttgtgggttgtgacaacgagcctctgtccaggctagagatcatggaccgtgtcaacagaagcaggaaatttgacacacagtttcatggcttcactgggactgatggtccgctggggaagaggatggacaactccaaaactcgggcaaagcttggatggcagcccaagtatccgagctttacagagttccttggtctcagcaatctctaactttcatgcgatgtcactaaatacctgttattaaagatgaatatactgatacataaaagagatgatgacagatttggaagtggaatgttgtttgcttataccgcagttttcgactatcttttgatttcttctgttagatcttgtaaagcattgcagcatggtgtggcatgtacctgtgttgccttctattcgcttctgttaactcatgaaagcattgacttcaatacctgttaattgtttccatggcttcaatctatcgaaccaactgtctctctcgatgttctctagaattgtaacaaaaattccaatggtactttttggataagaacaagttttgatgaaaacattctctactggaaattttgatttt

SEQ ID NO: 72432 - DNA, 10580 bp, Zea Mays
cctcaaccctctatgatgagagatgtagtcacctgggacaccattcaacaggatatgtgttgaggaagtagaaaggatgccactaataatatctctccacacatatccaaaccccaattttttcaacacctccaaaagaaagggccaagatacgatgtcgaaggccttagaaatgtctaatttaaggaggattctgggctgtttctaagcatgaagatatctagcagtttgctgcaccatcataaagttatcctgtataaatctacttttaatgaaatgtcacacccggtttttaagggcaaaactgaatgcatagcatatgtgtaccaggatctattttccacacatatgttgacgtcacaagtgtaatatatcaaaagacaatgcaataaaggcgtaaagagagtagagtagtctttattacaacattcagacaatagtatcttaaacagtatcatcaaagtaaatcagaaataacatgagtaatctcccacaggaagatgaccgacgcatcgttagactcagtattcatcgaaatatctatcaaggttttcttcatcaccctctgatcaaaatattagcaagggtgagctcacttatggtcggggctcaacaagtgggggaaaattaatgcaagtttaacaagataagactaaggttaagcggtaagcattttagttggtcaatattatattagcaacacctgtcttacaaatcagtgtgtatcccaagtatcccaattattaaacaaaggtataagagtatattaaaaacacttaagtgaaaccacttaagcaaattattggcagatcatcagatctcgatttattgtccatctttaagttcaattatcatatgagggtctagtttgctcttaaccgtgagcacggctgacatatcagttttacactctgcagaggtggtacaactttacccacaagatgtgtatcccatctagcctgggttgtacagacccttaaacactgccgaggtgaatggctagggatccactatgaggttttcacaaaatacacttaatacaaagcaacctgctaaggtttccaagtcggtgtggaggccctttgggcgaggtaccttagccaagaatacgtccccatgttaacattagctgccaccactgccgctccccctcttgccttgcttgtaagtgtcctgtgggtcgtcctcgaacgagtttggttcgtctaccccacagtcaacttctagcatcgatttgcgtatcgtacatacaaaaagaatacatacgccgaataaataacatacaccatcacatgaacaacattcaccattacatgaacaagcatacaccacacaacctatacgtataatagtgcctagaataaaaccaaatttgtattcacagcattagtctacatgtactgacatatgtgaattttaactcctactttggatcactactggtgaaagttacatggacatgtgattatgaaagtattttatatatgttatggtcgctaaatcggtgagggattggagagaggtatcgatggacaggaacgtcggtcgggggtctctgcccacgctcgagcaagaggagggtttctcccttctaattcatgcctgctttatttcttatccattgattacataaataggccggctggccgccctatctagctagagatccttatctccttaaaactctcctaaaaactctcaacaaactactaactgataacttttctagataatctcaactaatctcctaaataatctcaactaatcttttaatcttatctttaactatccttatctaatcccccttggagggccgatggctgttgctgctgcagcccctccatgggcctccttagaccctaacgctacacccctcctggacaagcagctcgtcctcgagctgcagcatgacaggtgctcaaagaccgaatctactcgacctaaaacgagaaacctagaagacaaaccttttacatctcggcttatcttattattccgaatctgattttttagaccccataagataaggcggacaccctccgcgcattggacttgcacgtgtgcagccacctggatcccatggacgccatctggacgaaaggagagcacatagacggacacatggaataggtcgtaacaataaccagcggaggcgccctcgtggcgaccggtagcggaatgtggtggcgctaaatagtgcgcccttgccgatgacaaagggagtgccttccttaccgccgctgccgtagagttgaagttcgtcgtccgcgggacacgtaccatgctcgcacttggagatagcggcccggtgcctgaagcgtcccagatcctctgggactcaaatgtgatataattactagtcccaggaggctagtaaacacatttatacatcagatgattacaaatctgcttaaacgacacaaatctataaaggtggcgaacaactttaagagttggtccacaactcgggacatatcattagagtggggctgaagcagcccgatatacgcagcgaagcaaatcagcggtccaacagacacaggcaaggttgggaacaagcataactcttactcgatctcctttttctgaaaaacaacaaataagcaagggtgagtacaaacgtactcagcagcccaccttcacccgcggaatggggaaatcagatataatgcatggaatatgtggagctcaggatattttgcagaaacaacaatattttatgcagggttgttttgtaaaacattttgtattttgcaaaccacatcctctcccaaaggagcaggaagtttttcaatatagaacaaaatcccctagactaaaccatccaggtatctcagcagtttcccactggttttcattttcaaaaatagctactggacttctcgtccaccatagctgacggctcaaccgccggaaccacttttcaaaagcacttctttttggaaaacaaaacactaattgtcataccacaccagactcgtccattccagtggatacggattattcgaataggttttcaaactctgcgcagaggtgtacactttacccactagtccggttctgcgatctcatggccaatgagacccgaaaccgaatctctttctttcctcgcacgtccttatcttaacggttataccggaaggagtcaggccaccgccatgtccaaaccggacaaaactttccccctccttatcctcccggtgctccccagccttcataaccctagggtttggaccgtacgagttcagattgagtgactgcccatacagtctcgagtggttgtacttatcatgagtataggtagtgaaggatgacaaaccggtccttatatgagaggacaatccttctgctcacacctaacccggctgagccatcaccttaggccctcccctaaactagggagtccctgatcatccctactcaaaggtgataagggttaaaacccttcatcatactcattttggaaaacattttcttttgaaaactcacaccttttctcaaatcatttgtaacaaatatatcaaggattgattgcggcaagcggctgggtggccataataacttgtctcaaaatcatatcatgcataaaataacaggctgagggttgtggtttaaaaagcataggtaatttatgcatcaaaatgatccagtgagcttgtcgtgcttatccggcgaagggggaaggggagctcgcggaactggcttctagctccactgcctggcgtagacttgcagatctggcctccacgagacggcacgaatgctccgataactatgcaacatggataagcaaacatacaaaccagcaagtatatcaacagatatttagtatagtggtcagaatagcgatatatggatgggtagagtcttgagtagaatctgtgtcatgtggtgttgagatactacttgtggtggagcggaggtgcttaccaggagggtggactagaggcgaagcgacactatgcatgtagccggcagagcggagtaactgagtgggtggggtgtttgccttggctgagggtgttgagtgtgtgtggagagggagatggtagctgagtgtatttatagctgggtgtatgtggtgtagcacatgcgaagttcactgttggtgagaatagtgacgaatgaatcgtttgacttagtatgaacaggagagctataggcagaatacgggacaagagtattttgggagttttctggaacatgaaccatgcttaagggatgacatggttggatagggaatagtttgataagaatttagaaacaagaattattggaatctgagtttggaagcctggttcgaaggaatctcaaagttaagcgtgctcaacttggagaaacctgtgatgggtgaccagatgggaagttccctactgcaaggaaaatcacagtcaccgtagttcgtatgactggaatattggtctggctggtcttaggtggactggacagcatgacggatgagtaattgaaatttggggtgatcggatgatcgatgaatagtaacgatgaatagtgactatgaacgaacgatgaacgatgaataggaactatgaacgaacggacaaacgatcgaatgatcggacgaacgaacgatcgaaacttcggtagcataacggcaagacaaagattatctagacgaacgatgaatagttactatgaacgaacgatgaataggaactatgaacgaacgatgaacgatcgaatgatcgaacgaacgaacgatcggaatttcggcagcataacggcaggaaaaagattatttggacgaacgaacggacgaacgatcgaacgatcggacgaacggatgaacgaaccatgaacgatcggacgaacgatcgaacgatcagacgaacgaacgaacaaactaagaacaggtggacgaacgatcgaaaaacgactgaacgatccttgtgctagtgtgtgcttgtgtgggaagtggagtgggcgtgtgtgggggggggaggagagagttgccatgaaatgacttggggtggcttgagaggaggcccttgcccctctatttatagccatgttggggggattagggggagggatgagaggattagtgggaggatgggaggattagtgagagattagcatgtatttgtcttgtataagtgagattagcttgtagagttcaacgtatgacaccggaggcatacatatacgtatgagcatgaggaaagttatgaagaaaatatttgtagggcctgtaaaaattattttgaaggtatctctcaggaggaaaatacttagagaagtattggtggaatatttgggcagtatttctgaacagaatttgacggggatcactggggtaatatctgggtagtatttctggaaagaatttgacaggagtcactggagaaacatttgtaggatattttgaggaggattttggagaaaatatagaccactatattttatttgttgatatcaactcacaaacaaacattttgaaatgaaatttaaaattcattttgaatttagagcgagtttgagaaaattctaagatttgaatttttgggatgctacagtgccgctgctgatggccatccgacaaggcgaggttgcgcccccgtgtgccgagatcaactgtcaccaaggctgcctcaagcattcgccgatgcatctcctgcactctccgtcgtgcaaggaagccacgagcagcagcttgtatgcccacagccgcttacgtctggagccgtgcggacaacgccagctggtgctgctcatgttgcactgctgccttgatttgcagcagcccttgcttaaccttctggagcgtggcttacatctttgcgagatcagcccttatgttggtccacaaatccctcatcgatgaatctggtgattgttgagccggggctgcccctagtggtgtcgcccatggggatgggacggagatgccatcaacgaagatgatgtgacaaaatttggcgttgtacctggggatgggcacgccggcgtccagaaacgtcggctgggggcctctgcccacggccgagcaagaggaggatttctcctttctaatttttgtctgctttatttctcatccattgattacataaatagatcggctggccgcccctatctagctagagatccttatctccttaaaactctcctaaaaactctcaacaaactactaactgataaccttcttagataatctcaactaatctcctaaataatctcaactaatcttttaatcttatctttaactatccttatctaatcccccttggagggcccatggctgttgctgctgcagcccctccatgggtctccttaggccctaacaatataacttagatgaaatgacttaaccaattctacagaaataaattaattaccaattaattatttctattatgaataaacatatccttttaatcttatcctttctaaaagaaaatgtcattataataatcagaggtccaaacatctaataataaattaaaccactgattagactataatatttgtattgctatgaattctataccacttactaattctatgttaagaaaatcttctattatctatttagggggtttaaatgaacctataattataaacttttagataaattctaaaattcaacgtaaacaaatttaactatgaaattacttatcgagtgtttttattaccaacatatgtctaccaattttgtcatagttcatttcaatcccaaattctaaagaaatcgtaaaccaatatcatgtctaataataatccactaattcatcgcatatataccaaaaatcaatagttcacatacgcatgaattctgaatcacaacattctcatattacaacacaataattacaaattcataaactaattcaaaacacgctttgaaaaataaatcaaaattttgggttgtcttcaaccttggacgaacagacggtggtgaggcacgggggcacggtgcgggcacgacgcggtcgacgacggactgcgcgggcacgactaggttcagcggggctcgggcacgtctccagcaaccgaacgacgaacggcgaggcacgacggcgagttccggcggcgagcagggcgcggctccggcgacggcgcgggtaggggagagagacagggagcacgggtagggagggagagagaggagagctcggtcgagtccttttatagagagggagagggcgccagggggagagaaaacggtcggccggccattaatggaggcgaccattacctcaacgttgatggcagccatttcttcactaactaagagattaagtggggagggagtgggggaggtggcggcggctgttactggtgcagggaagaggaggggacgcgggcgcggcgcgcgcacggccaggcggcggcgctgggtggaaaaagagaaggggccgcggggccctgacgggtgcggcccgcgcgccatagagagagcggtgggggggaatgggagaggggtcggctgggccggttagtgggctggcggctagggtttgtgtttttttccttttcttttctattttaaaaatataaatatatattttttaaaataattcaaaaatcataataattataccgaaatttatttataactaaaatatttatttttggaccattatttctatattaatcaattggattttcgttaagaaagaaattctactaaacatccaaaaatcgaatatgagcaaacaaaaattattctagatgcaaataaaaatcaaaaattaggaagaaaatttattaccattaataatctaaatgcattattttagttgatggtttttatagtgttatatgaaagcactttggttttttgaaattaagcaatccagcttttccccgagcctgttggccaagatctttgtcatgaacttagcaaaactgtgaatcaggctaatggggcgaaaatcagcagcaccatgagcgccctccctttttggcaacaatgtgataaaggcagagttgaggaggcgaaggtttctgaagtgaaggatgaaagatcacatttggccacagtttctgaagacaactctgaaatccaacaagattccccgagcattttgtctactgtagacttactccatgcgtgagctgggatgccacaaagttccacatccaccaaaactggcaaggaaacaccagtggaatgagcaaaccgtgaccatttcttgaacttcaactcaaaatccgggcagtgaagcactcttccattatcaaacacccgtactgcagtatcctcatcttgaaaaactagcatgaaatcttctggccaggccttgtgaatggtgaaacttgattcaggcagatcatatatttgtgcaacttccaaaattacctcagaaggtgttactgatggccttgtacccacaacggtgacgaacaaagctgcccttagcctgatttcttcgcgtgcgatggcagggtagaattccatcacacatctgcgtcccggagcagccggaaccgtggtgctactatctaccgggtgcggatcacactggagatcagcacccacctccacctccaaagcaggctgcctgagagaggtgtgcttccgtgctcttatggtgagggcgcctccgtcgctttcttccacgcttggaaggggaggcttgatcctaaaaagaggcccttccctgaacagaggcccctgccgacataggggaggtgtgcactaccctatcctgtccagctgacaggggggtaattctcttccacacttgtttacgtttctccatcacttgtggctgaggcatgaccttgatgcgctgccaggaaggctctttatgcgtagcccgccacttgagacgttgccacaccggaacacgaaccggcagagcaacttgcatgggtgagtccaccggactaggtacaactggacagatagcaacccggtgaccagggagcctgcatatgatacagcgcgtggcctggcggcattgggatgcacgatgggttgtggcggcgaggcagttgaagcatctacctcggaggtccaaagggacttgacgacctgccacccatcatcactcgagcggacgttgctcgaggccttccactggcgacgccaggagggaatggaggccttgaccgcaatcccgggcgacttcggaagctcccgcaccgaacccgccggggagcgtccactgccgtcgtcctcaggagcgcgtccttgaaagttccaggcatggcggcaggcaactcatctccatacgacccaactagagggctgcatgaggatgagcctccgccaatccaagccgggctgacttctgcctaacgttggagcttggaccgtcccttagggagaatcggttccgcggacgaagacaaggaggaggtggagcacgacacctgaagggagggaggaaccgcatgggagcaagcggcagggtaggtggttgccggaacctgggcggcagacggcgagctgttggtggaatgaggggcgccgggtgaggtgggaggcaagggggtgggagacgagggggcgggagccttttttttgcagtgtgtgaactcaacatcatggtggaaactgtacaccctctctcctgaactcaacatcatggtggaaacttactgtacaccagtgactggaaggagcgtcattttcaggcaattgttgtataaaaagagtggagaacattgatggatggttcaagtgtccttgcaagtagcagcttcaaattggaatggaaaaggctctttcctattcacctcgagtactgctgtgtatgactgcagtgacaatggattctgcagtgaggattctccttgtgtacccattggtcaaagcactcgtactgatgtgcttctaaaagctgaaaatgttgtccttgaggcaggcggctgtgttcttaggctaaaatcagatcggggtcctcatgtttactggctgtcaaaaggaaccttggatgtgcgtcctgatcatatactcaatctgatacattatgaagatgcagcctctcttgtaatttccatcatgaaaaagagattacggagctgcatctttgtgggttgtgacaacgagcctctgtccaggctagagatcatggaccgtgtcaacagaagcaggaaatttgacacacagtttcatggcttcactgggactgatggtccgctggggaagaggatggacaactccaaaactcgggcaaagcttggatggcagcccaagtatccgagctttacagagttccttggtctcagcaatctctaactttcatgcgatgtcactaaatacctgttattaaagatgaatatactgatacataaaagagatgatgacagatttggaagtggaatgttgtttgcttataccgcagttttcgactatcttttgatttcttctgttagatcttgtaaagcattgcagcatggtgtggcatgtacctgtgttgccttctattcgcttctgttaactcatgaaagcattgacttcaatacctgttaattgtttccatggcttcaatctatcgaaccaactgtctctctcgatgttctctagaattgtaacaaaaattccaatggtactttttggataagaacaagttttgatgaaaacattctctactggaaattttgatttt

SEQ ID NO: 72433 - DNA, 10569 bp, Zea Mays
cctcaaccctctatgatgagagatgtagtcacctgggacaccattcaacaggatatgtgttgaggaagtagaaaggatgccactaataatatctctccacacatatccaaaccccaattttttcaacacctccaaaagaaagggccaagatacgatgtcgaaggccttagaaatgtctaatttaaggaggattctgggctgtttctaagcatgaagatatctagcagtttgctgcaccatcataaagttatcctgtataaatctacttttaatgaaatgtcacacccggtttttaagggcaaaactgaatgcatagcatatgtgtaccaggatctattttccacacatatgttgacgtcacaagtgtaatatatcaaaagacaatgcaataaaggcgtaaagagagtagagtagtctttattacaacattcagacaatagtatcttaaacagtatcatcaaagtaaatcagaaataacatgagtaatctcccacaggaagatgaccgacgcatcgttagactcagtattcatcgaaatatctatcaaggttttcttcatcaccctctgatcaaaatattagcaagggtgagctcacttatggtcggggctcaacaagtgggggaaaattaatgcaagtttaacaagataagactaaggttaagcggtaagcattttagttggtcaatattatattagcaacacctgtcttacaaatcagtgtgtatcccaagtatcccaattattaaacaaaggtataagagtatattaaaaacacttaagtgaaaccacttaagcaaattattggcagatcatcagatctcgatttattgtccatctttaagttcaattatcatatgagggtctagtttgctcttaaccgtgagcacggctgacatatcagttttacactctgcagaggtggtacaactttacccacaagatgtgtatcccatctagcctgggttgtacagacccttaaacactgccgaggtgaatggctagggatccactatgaggttttcacaaaatacacttaatacaaagcaacctgctaaggtttccaagtcggtgtggaggccctttgggcgaggtaccttagccaagaatacgtccccatgttaacattagctgccaccactgccgctccccctcttgccttgcttgtaagtgtcctgtgggtcgtcctcgaacgagtttggttcgtctaccccacagtcaacttctagcatcgatttgcgtatcgtacatacaaaaagaatacatacgccgaataaataacatacaccatcacatgaacaacattcaccattacatgaacaagcatacaccacacaacctatacgtataatagtgcctagaataaaaccaaatttgtattcacagcattagtctacatgtactgacatatgtgaattttaactcctactttggatcactactggtgaaagttacatggacatgtgattatgaaagtattttatatatgttatggtcgctaaatcggtgagggattggagagaggtatcgatggacaggaacgtcggtcgggggtctctgcccacgctcgagcaagaggagggtttctcccttctaattcatgcctgctttatttcttatccattgattacataaataggccggctggccgccctatctagctagagatccttatctccttaaaactctcctaaaaactctcaacaaactactaactgataacttttctagataatctcaactaatctcctaaataatctcaactaatcttttaatcttatctttaactatccttatctaatcccccttggagggccgatggctgttgctgctgcagcccctccatgggcctccttagaccctaacgctacacccctcctggacaagcagctcgtcctcgagctgcagcatgacaggtgctcaaagaccgaatctactcgacctaaaacgagaaacctagaagacaaaccttttacatctcggcttatcttattattccgaatctgattttttagaccccataagataaggcggacaccctccgcgcattggacttgcacgtgtgcagccacctggatcccatggacgccatctggacgaaaggagagcacatagacggacacatggaataggtcgtaacaataaccagcggaggcgccctcgtggcgaccggtagcggaatgtggtggcgctaaatagtgcgcccttgccgatgacaaagggagtgccttccttaccgccgctgccgtagagttgaagttcgtcgtccgcgggacacgtaccatgctcgcacttggagatagcggcccggtgcctgaagcgtcccagatcctctgggactcaaatgtgatataattactagtcccaggaggctagtaaacacatttatacatcagatgattacaaatctgcttaaacgacacaaatctataaaggtggcgaacaactttaagagttggtccacaactcgggacatatcattagagtggggctgaagcagcccgatatacgcagcgaagcaaatcagcggtccaacagacacaggcaaggttgggaacaagcataactcttactcgatctcctttttctgaaaaacaacaaataagcaagggtgagtacaaacgtactcagcagcccaccttcacccgcggaatggggaaatcagatataatgcatggaatatgtggagctcaggatattttgcagaaacaacaatattttatgcagggttgttttgtaaaacattttgtattttgcaaaccacatcctctcccaaaggagcaggaagtttttcaatatagaacaaaatcccctagactaaaccatccaggtatctcagcagtttcccactggttttcattttcaaaaatagctactggacttctcgtccaccatagctgacggctcaaccgccggaaccacttttcaaaagcacttctttttggaaaacaaaacactaattgtcataccacaccagactcgtccattccagtggatacggattattcgaataggttttcaaactctgcgcagaggtgtacactttacccactagtccggttctgcgatctcatggccaatgagacccgaaaccgaatctctttctttcctcgcacgtccttatcttaacggttataccggaaggagtcaggccaccgccatgtccaaaccggacaaaactttccccctccttatcctcccggtgctccccagccttcataaccctagggtttggaccgtacgagttcagattgagtgactgcccatacagtctcgagtggttgtacttatcatgagtataggtagtgaaggatgacaaaccggtccttatatgagaggacaatccttctgctcacacctaacccggctgagccatcaccttaggccctcccctaaactagggagtccctgatcatccctactcaaaggtgataagggttaaaacccttcatcatactcattttggaaaacattttcttttgaaaactcacaccttttctcaaatcatttgtaacaaatatatcaaggattgattgcggcaagcggctgggtggccataataacttgtctcaaaatcatatcatgcataaaataacaggctgagggttgtggtttaaaaagcataggtaatttatgcatcaaaatgatccagtgagcttgtcgtgcttatccggcgaagggggaaggggagctcgcggaactggcttctagctccactgcctggcgtagacttgcagatctggcctccacgagacggcacgaatgctccgataactatgcaacatggataagcaaacatacaaaccagcaagtatatcaacagatatttagtatagtggtcagaatagcgatatatggatgggtagagtcttgagtagaatctgtgtcatgtggtgttgagatactacttgtggtggagcggaggtgcttaccaggagggtggactagaggcgaagcgacactatgcatgtagccggcagagcggagtaactgagtgggtggggtgtttgccttggctgagggtgttgagtgtgtgtggagagggagatggtagctgagtgtatttatagctgggtgtatgtggtgtagcacatgcgaagttcactgttggtgagaatagtgacgaatgaatcgtttgacttagtatgaacaggagagctataggcagaatacgggacaagagtattttgggagttttctggaacatgaaccatgcttaagggatgacatggttggatagggaatagtttgataagaatttagaaacaagaattattggaatctgagtttggaagcctggttcgaaggaatctcaaagttaagcgtgctcaacttggagaaacctgtgatgggtgaccagatgggaagttccctactgcaaggaaaatcacagtcaccgtagttcgtatgactggaatattggtctggctggtcttaggtggactggacagcatgacggatgagtaattgaaatttggggtgatcggatgatcgatgaatagtaacgatgaatagtgactatgaacgaacgatgaacgatgaataggaactatgaacgaacggacaaacgatcgaatgatcggacgaacgaacgatcgaaacttcggtagcataacggcaagacaaagattatctagacgaacgatgaatagttactatgaacgaacgatgaataggaactatgaacgaacgatgaacgatcgaatgatcgaacgaacgaacgatcggaatttcggcagcataacggcaggaaaaagattatttggacgaacgaacggacgaacgatcgaacgatcggacgaacggatgaacgaaccatgaacgatcggacgaacgatcgaacgatcagacgaacgaacgaacaaactaagaacaggtggacgaacgatcgaaaaacgactgaacgatccttgtgctagtgtgtgcttgtgtgggaagtggagtgggcgtgtgtgggggggggaggagagagttgccatgaaatgacttggggtggcttgagaggaggcccttgcccctctatttatagccatgttggggggattagggggagggatgagaggattagtgggaggatgggaggattagtgagagattagcatgtatttgtcttgtataagtgagattagcttgtagagttcaacgtatgacaccggaggcatacatatacgtatgagcatgaggaaagttatgaagaaaatatttgtagggcctgtaaaaattattttgaaggtatctctcaggaggaaaatacttagagaagtattggtggaatatttgggcagtatttctgaacagaatttgacggggatcactggggtaatatctgggtagtatttctggaaagaatttgacaggagtcactggagaaacatttgtaggatattttgaggaggattttggagaaaatatagaccactatattttatttgttgatatcaactcacaaacaaacattttgaaatgaaatttaaaattcattttgaatttagagcgagtttgagaaaattctaagatttgaatttttgggatgctacagtgccgctgctgatggccatccgacaaggcgaggttgcgcccccgtgtgccgagatcaactgtcaccaaggctgcctcaagcattcgccgatgcatctcctgcactctccgtcgtgcaaggaagccacgagcagcagcttgtatgcccacagccgcttacgtctggagccgtgcggacaacgccagctggtgctgctcatgttgcactgctgccttgatttgcagcagcccttgcttaaccttctggagcgtggcttacatctttgcgagatcagcccttatgttggtccacaaatccctcatcgatgaatctggtgattgttgagccggggctgcccctagtggtgtcgcccatggggatgggacggagatgccatcaacgaagatgatgtgacaaaatttggcgttgtacctggggatgggcacgccggcgtccagaaacgtcggctgggggcctctgcccacggccgagcaagaggaggatttctcctttctaatttttgtctgctttatttctcatccattgattacataaatagatcggctggccgcccctatctagctagagatccttatctccttaaaactctcctaaaaactctcaacaaactactaactgataaccttcttagataatctcaactaatctcctaaataatctcaactaatcttttaatcttatctttaactatccttatctaatcccccttggagggcccatggctgttgctgctgcagcccctccatgggtctccttaggccctaacaatataacttagatgaaatgacttaaccaattctacagaaataaattaattaccaattaattatttctattatgaataaacatatccttttaatcttatcctttctaaaagaaaatgtcattataataatcagaggtccaaacatctaataataaattaaaccactgattagactataatatttgtattgctatgaattctataccacttactaattctatgttaagaaaatcttctattatctatttagggggtttaaatgaacctataattataaacttttagataaattctaaaattcaacgtaaacaaatttaactatgaaattacttatcgagtgtttttattaccaacatatgtctaccaattttgtcatagttcatttcaatcccaaattctaaagaaatcgtaaaccaatatcatgtctaataataatccactaattcatcgcatatataccaaaaatcaatagttcacatacgcatgaattctgaatcacaacattctcatattacaacacaataattacaaattcataaactaattcaaaacacgctttgaaaaataaatcaaaattttgggttgtcttcaaccttggacgaacagacggtggtgaggcacgggggcacggtgcgggcacgacgcggtcgacgacggactgcgcgggcacgactaggttcagcggggctcgggcacgtctccagcaaccgaacgacgaacggcgaggcacgacggcgagttccggcggcgagcagggcgcggctccggcgacggcgcgggtaggggagagagacagggagcacgggtagggagggagagagaggagagctcggtcgagtccttttatagagagggagagggcgccagggggagagaaaacggtcggccggccattaatggaggcgaccattacctcaacgttgatggcagccatttcttcactaactaagagattaagtggggagggagtgggggaggtggcggcggctgttactggtgcagggaagaggaggggacgcgggcgcggcgcgcgcacggccaggcggcggcgctgggtggaaaaagagaaggggccgcggggccctgacgggtgcggcccgcgcgccatagagagagcggtgggggggaatgggagaggggtcggctgggccggttagtgggctggcggctagggtttgtgtttttttccttttcttttctattttaaaaatataaatatatattttttaaaataattcaaaaatcataataattataccgaaatttatttataactaaaatatttatttttggaccattatttctatattaatcaattggattttcgttaagaaagaaattctactaaacatccaaaaatcgaatatgagcaaacaaaaattattctagatgcaaataaaaatcaaaaattaggaagaaaatttattaccattaataatctaaatgcattattttagttgatggtttttatagtgttatatgaaagcactttggttttttgaaattaagcaatccagcttttccccgagcctgttggccaagatctttgtcatgaacttagcaaaactgtgaatcaggctaatggggcgaaaatcagcagcaccatgagcgccctccctttttggcaacaatgtgataaaggcagagttgaggaggcgaaggtttctgaagtgaaggatgaaagatcacatttggccacagtttctgaagacaactctgaaatccaacaagattccccgagcattttgtctactgtagacttactccatgcgtgagctgggatgccacaaagttccacatccaccaaaactggcaaggaaacaccagtggaatgagcaaaccgtgaccatttcttgaacttcaactcaaaatccgggcagtgaagcactcttccattatcaaacacccgtactgcagtatcctcatcttgaaaaactagcatgaaatcttctggccaggccttgtgaatggtgaaacttgattcaggcagatcatatatttgtgcaacttccaaaattacctcagaaggtgttactgatggccttgtacccacaacggtgacgaacaaagctgcccttagcctgatttcttcgcgtgcgatggcagggtagaattccatcacacatctgcgtcccggagcagccggaaccgtggtgctactatctaccgggtgcggatcacactggagatcagcacccacctccacctccaaagcaggctgcctgagagaggtgtgcttccgtgctcttatggtgagggcgcctccgtcgctttcttccacgcttggaaggggaggcttgatcctaaaaagaggcccttccctgaacagaggcccctgccgacataggggaggtgtgcactaccctatcctgtccagctgacaggggggtaattctcttccacacttgtttacgtttctccatcacttgtggctgaggcatgaccttgatgcgctgccaggaaggctctttatgcgtagcccgccacttgagacgttgccacaccggaacacgaaccggcagagcaacttgcatgggtgagtccaccggactaggtacaactggacagatagcaacccggtgaccagggagcctgcatatgatacagcgcgtggcctggcggcattgggatgcacgatgggttgtggcggcgaggcagttgaagcatctacctcggaggtccaaagggacttgacgacctgccacccatcatcactcgagcggacgttgctcgaggccttccactggcgacgccaggagggaatggaggccttgaccgcaatcccgggcgacttcggaagctcccgcaccgaacccgccggggagcgtccactgccgtcgtcctcaggagcgcgtccttgaaagttccaggcatggcggcaggcaactcatctccatacgacccaactagagggctgcatgaggatgagcctccgccaatccaagccgggctgacttctgcctaacgttggagcttggaccgtcccttagggagaatcggttccgcggacgaagacaaggaggaggtggagcacgacacctgaagggagggaggaaccgcatgggagcaagcggcagggtaggtggttgccggaacctgggcggcagacggcgagctgttggtggaatgaggggcgccgggtgaggtgggaggcaagggggtgggagacgagggggcgggagccttttttttgcagtgtgtgaactcaacatcatggtggaaactgtacaccctctctcctgaactcaacatcatggtggaaacttactgtacaccagtgactggaaggagcgtcattttcaggcaattgttgtataaaaagagtggagaacattgatggatggttcaagtgtccttgcaagtagcagcttcaaattggaatggaaaaggctctttcctattcacctcgagtactgctgtgtatgactgcagtgacaatggattctgcagtgaggattctccttgtgtacccattggtcaaagcactcgtactgatgtgcttctaaaagctgaaaatgttgtccttgaggcaggcggctgtgttcttagatcggggtcctcatgtttactggctgtcaaaaggaaccttggatgtgcgtcctgatcatatactcaatctgatacattatgaagatgcagcctctcttgtaatttccatcatgaaaaagagattacggagctgcatctttgtgggttgtgacaacgagcctctgtccaggctagagatcatggaccgtgtcaacagaagcaggaaatttgacacacagtttcatggcttcactgggactgatggtccgctggggaagaggatggacaactccaaaactcgggcaaagcttggatggcagcccaagtatccgagctttacagagttccttggtctcagcaatctctaactttcatgcgatgtcactaaatacctgttattaaagatgaatatactgatacataaaagagatgatgacagatttggaagtggaatgttgtttgcttataccgcagttttcgactatcttttgatttcttctgttagatcttgtaaagcattgcagcatggtgtggcatgtacctgtgttgccttctattcgcttctgttaactcatgaaagcattgacttcaatacctgttaattgtttccatggcttcaatctatcgaaccaactgtctctctcgatgttctctagaattgtaacaaaaattccaatggtactttttggataagaacaagttttgatgaaaacattctctactggaaattttgatttt

SEQ ID NO: 72434 - DNA, 10590 bp, Zea Mays
cctcaaccctctatgatgagagatgtagtcacctgggacaccattcaacaggatatgtgttgaggaagtagaaaggatgccactaataatatctctccacacatatccaaaccccaattttttcaacacctccaaaagaaagggccaagatacgatgtcgaaggccttagaaatgtctaatttaaggaggattctgggctgtttctaagcatgaagatatctagcagtttgctgcaccatcataaagttatcctgtataaatctacttttaatgaaatgtcacacccggtttttaagggcaaaactgaatgcatagcatatgtgtaccaggatctattttccacacatatgttgacgtcacaagtgtaatatatcaaaagacaatgcaataaaggcgtaaagagagtagagtagtctttattacaacattcagacaatagtatcttaaacagtatcatcaaagtaaatcagaaataacatgagtaatctcccacaggaagatgaccgacgcatcgttagactcagtattcatcgaaatatctatcaaggttttcttcatcaccctctgatcaaaatattagcaagggtgagctcacttatggtcggggctcaacaagtgggggaaaattaatgcaagtttaacaagataagactaaggttaagcggtaagcattttagttggtcaatattatattagcaacacctgtcttacaaatcagtgtgtatcccaagtatcccaattattaaacaaaggtataagagtatattaaaaacacttaagtgaaaccacttaagcaaattattggcagatcatcagatctcgatttattgtccatctttaagttcaattatcatatgagggtctagtttgctcttaaccgtgagcacggctgacatatcagttttacactctgcagaggtggtacaactttacccacaagatgtgtatcccatctagcctgggttgtacagacccttaaacactgccgaggtgaatggctagggatccactatgaggttttcacaaaatacacttaatacaaagcaacctgctaaggtttccaagtcggtgtggaggccctttgggcgaggtaccttagccaagaatacgtccccatgttaacattagctgccaccactgccgctccccctcttgccttgcttgtaagtgtcctgtgggtcgtcctcgaacgagtttggttcgtctaccccacagtcaacttctagcatcgatttgcgtatcgtacatacaaaaagaatacatacgccgaataaataacatacaccatcacatgaacaacattcaccattacatgaacaagcatacaccacacaacctatacgtataatagtgcctagaataaaaccaaatttgtattcacagcattagtctacatgtactgacatatgtgaattttaactcctactttggatcactactggtgaaagttacatggacatgtgattatgaaagtattttatatatgttatggtcgctaaatcggtgagggattggagagaggtatcgatggacaggaacgtcggtcgggggtctctgcccacgctcgagcaagaggagggtttctcccttctaattcatgcctgctttatttcttatccattgattacataaataggccggctggccgccctatctagctagagatccttatctccttaaaactctcctaaaaactctcaacaaactactaactgataacttttctagataatctcaactaatctcctaaataatctcaactaatcttttaatcttatctttaactatccttatctaatcccccttggagggccgatggctgttgctgctgcagcccctccatgggcctccttagaccctaacgctacacccctcctggacaagcagctcgtcctcgagctgcagcatgacaggtgctcaaagaccgaatctactcgacctaaaacgagaaacctagaagacaaaccttttacatctcggcttatcttattattccgaatctgattttttagaccccataagataaggcggacaccctccgcgcattggacttgcacgtgtgcagccacctggatcccatggacgccatctggacgaaaggagagcacatagacggacacatggaataggtcgtaacaataaccagcggaggcgccctcgtggcgaccggtagcggaatgtggtggcgctaaatagtgcgcccttgccgatgacaaagggagtgccttccttaccgccgctgccgtagagttgaagttcgtcgtccgcgggacacgtaccatgctcgcacttggagatagcggcccggtgcctgaagcgtcccagatcctctgggactcaaatgtgatataattactagtcccaggaggctagtaaacacatttatacatcagatgattacaaatctgcttaaacgacacaaatctataaaggtggcgaacaactttaagagttggtccacaactcgggacatatcattagagtggggctgaagcagcccgatatacgcagcgaagcaaatcagcggtccaacagacacaggcaaggttgggaacaagcataactcttactcgatctcctttttctgaaaaacaacaaataagcaagggtgagtacaaacgtactcagcagcccaccttcacccgcggaatggggaaatcagatataatgcatggaatatgtggagctcaggatattttgcagaaacaacaatattttatgcagggttgttttgtaaaacattttgtattttgcaaaccacatcctctcccaaaggagcaggaagtttttcaatatagaacaaaatcccctagactaaaccatccaggtatctcagcagtttcccactggttttcattttcaaaaatagctactggacttctcgtccaccatagctgacggctcaaccgccggaaccacttttcaaaagcacttctttttggaaaacaaaacactaattgtcataccacaccagactcgtccattccagtggatacggattattcgaataggttttcaaactctgcgcagaggtgtacactttacccactagtccggttctgcgatctcatggccaatgagacccgaaaccgaatctctttctttcctcgcacgtccttatcttaacggttataccggaaggagtcaggccaccgccatgtccaaaccggacaaaactttccccctccttatcctcccggtgctccccagccttcataaccctagggtttggaccgtacgagttcagattgagtgactgcccatacagtctcgagtggttgtacttatcatgagtataggtagtgaaggatgacaaaccggtccttatatgagaggacaatccttctgctcacacctaacccggctgagccatcaccttaggccctcccctaaactagggagtccctgatcatccctactcaaaggtgataagggttaaaacccttcatcatactcattttggaaaacattttcttttgaaaactcacaccttttctcaaatcatttgtaacaaatatatcaaggattgattgcggcaagcggctgggtggccataataacttgtctcaaaatcatatcatgcataaaataacaggctgagggttgtggtttaaaaagcataggtaatttatgcatcaaaatgatccagtgagcttgtcgtgcttatccggcgaagggggaaggggagctcgcggaactggcttctagctccactgcctggcgtagacttgcagatctggcctccacgagacggcacgaatgctccgataactatgcaacatggataagcaaacatacaaaccagcaagtatatcaacagatatttagtatagtggtcagaatagcgatatatggatgggtagagtcttgagtagaatctgtgtcatgtggtgttgagatactacttgtggtggagcggaggtgcttaccaggagggtggactagaggcgaagcgacactatgcatgtagccggcagagcggagtaactgagtgggtggggtgtttgccttggctgagggtgttgagtgtgtgtggagagggagatggtagctgagtgtatttatagctgggtgtatgtggtgtagcacatgcgaagttcactgttggtgagaatagtgacgaatgaatcgtttgacttagtatgaacaggagagctataggcagaatacgggacaagagtattttgggagttttctggaacatgaaccatgcttaagggatgacatggttggatagggaatagtttgataagaatttagaaacaagaattattggaatctgagtttggaagcctggttcgaaggaatctcaaagttaagcgtgctcaacttggagaaacctgtgatgggtgaccagatgggaagttccctactgcaaggaaaatcacagtcaccgtagttcgtatgactggaatattggtctggctggtcttaggtggactggacagcatgacggatgagtaattgaaatttggggtgatcggatgatcgatgaatagtaacgatgaatagtgactatgaacgaacgatgaacgatgaataggaactatgaacgaacggacaaacgatcgaatgatcggacgaacgaacgatcgaaacttcggtagcataacggcaagacaaagattatctagacgaacgatgaatagttactatgaacgaacgatgaataggaactatgaacgaacgatgaacgatcgaatgatcgaacgaacgaacgatcggaatttcggcagcataacggcaggaaaaagattatttggacgaacgaacggacgaacgatcgaacgatcggacgaacggatgaacgaaccatgaacgatcggacgaacgatcgaacgatcagacgaacgaacgaacaaactaagaacaggtggacgaacgatcgaaaaacgactgaacgatccttgtgctagtgtgtgcttgtgtgggaagtggagtgggcgtgtgtgggggggggaggagagagttgccatgaaatgacttggggtggcttgagaggaggcccttgcccctctatttatagccatgttggggggattagggggagggatgagaggattagtgggaggatgggaggattagtgagagattagcatgtatttgtcttgtataagtgagattagcttgtagagttcaacgtatgacaccggaggcatacatatacgtatgagcatgaggaaagttatgaagaaaatatttgtagggcctgtaaaaattattttgaaggtatctctcaggaggaaaatacttagagaagtattggtggaatatttgggcagtatttctgaacagaatttgacggggatcactggggtaatatctgggtagtatttctggaaagaatttgacaggagtcactggagaaacatttgtaggatattttgaggaggattttggagaaaatatagaccactatattttatttgttgatatcaactcacaaacaaacattttgaaatgaaatttaaaattcattttgaatttagagcgagtttgagaaaattctaagatttgaatttttgggatgctacagtgccgctgctgatggccatccgacaaggcgaggttgcgcccccgtgtgccgagatcaactgtcaccaaggctgcctcaagcattcgccgatgcatctcctgcactctccgtcgtgcaaggaagccacgagcagcagcttgtatgcccacagccgcttacgtctggagccgtgcggacaacgccagctggtgctgctcatgttgcactgctgccttgatttgcagcagcccttgcttaaccttctggagcgtggcttacatctttgcgagatcagcccttatgttggtccacaaatccctcatcgatgaatctggtgattgttgagccggggctgcccctagtggtgtcgcccatggggatgggacggagatgccatcaacgaagatgatgtgacaaaatttggcgttgtacctggggatgggcacgccggcgtccagaaacgtcggctgggggcctctgcccacggccgagcaagaggaggatttctcctttctaatttttgtctgctttatttctcatccattgattacataaatagatcggctggccgcccctatctagctagagatccttatctccttaaaactctcctaaaaactctcaacaaactactaactgataaccttcttagataatctcaactaatctcctaaataatctcaactaatcttttaatcttatctttaactatccttatctaatcccccttggagggcccatggctgttgctgctgcagcccctccatgggtctccttaggccctaacaatataacttagatgaaatgacttaaccaattctacagaaataaattaattaccaattaattatttctattatgaataaacatatccttttaatcttatcctttctaaaagaaaatgtcattataataatcagaggtccaaacatctaataataaattaaaccactgattagactataatatttgtattgctatgaattctataccacttactaattctatgttaagaaaatcttctattatctatttagggggtttaaatgaacctataattataaacttttagataaattctaaaattcaacgtaaacaaatttaactatgaaattacttatcgagtgtttttattaccaacatatgtctaccaattttgtcatagttcatttcaatcccaaattctaaagaaatcgtaaaccaatatcatgtctaataataatccactaattcatcgcatatataccaaaaatcaatagttcacatacgcatgaattctgaatcacaacattctcatattacaacacaataattacaaattcataaactaattcaaaacacgctttgaaaaataaatcaaaattttgggttgtcttcaaccttggacgaacagacggtggtgaggcacgggggcacggtgcgggcacgacgcggtcgacgacggactgcgcgggcacgactaggttcagcggggctcgggcacgtctccagcaaccgaacgacgaacggcgaggcacgacggcgagttccggcggcgagcagggcgcggctccggcgacggcgcgggtaggggagagagacagggagcacgggtagggagggagagagaggagagctcggtcgagtccttttatagagagggagagggcgccagggggagagaaaacggtcggccggccattaatggaggcgaccattacctcaacgttgatggcagccatttcttcactaactaagagattaagtggggagggagtgggggaggtggcggcggctgttactggtgcagggaagaggaggggacgcgggcgcggcgcgcgcacggccaggcggcggcgctgggtggaaaaagagaaggggccgcggggccctgacgggtgcggcccgcgcgccatagagagagcggtgggggggaatgggagaggggtcggctgggccggttagtgggctggcggctagggtttgtgtttttttccttttcttttctattttaaaaatataaatatatattttttaaaataattcaaaaatcataataattataccgaaatttatttataactaaaatatttatttttggaccattatttctatattaatcaattggattttcgttaagaaagaaattctactaaacatccaaaaatcgaatatgagcaaacaaaaattattctagatgcaaataaaaatcaaaaattaggaagaaaatttattaccattaataatctaaatgcattattttagttgatggtttttatagtgttatatgaaagcactttggttttttgaaattaagcaatccagcttttccccgagcctgttggccaagatctttgtcatgaacttagcaaaactgtgaatcaggctaatggggcgaaaatcagcagcaccatgagcgccctccctttttggcaacaatgtgataaaggcagagttgaggaggcgaaggtttctgaagtgaaggatgaaagatcacatttggccacagtttctgaagacaactctgaaatccaacaagattccccgagcattttgtctactgtagacttactccatgcgtgagctgggatgccacaaagttccacatccaccaaaactggcaaggaaacaccagtggaatgagcaaaccgtgaccatttcttgaacttcaactcaaaatccgggcagtgaagcactcttccattatcaaacacccgtactgcagtatcctcatcttgaaaaactagcatgaaatcttctggccaggccttgtgaatggtgaaacttgattcaggcagatcatatatttgtgcaacttccaaaattacctcagaaggtgttactgatggccttgtacccacaacggtgacgaacaaagctgcccttagcctgatttcttcgcgtgcgatggcagggtagaattccatcacacatctgcgtcccggagcagccggaaccgtggtgctactatctaccgggtgcggatcacactggagatcagcacccacctccacctccaaagcaggctgcctgagagaggtgtgcttccgtgctcttatggtgagggcgcctccgtcgctttcttccacgcttggaaggggaggcttgatcctaaaaagaggcccttccctgaacagaggcccctgccgacataggggaggtgtgcactaccctatcctgtccagctgacaggggggtaattctcttccacacttgtttacgtttctccatcacttgtggctgaggcatgaccttgatgcgctgccaggaaggctctttatgcgtagcccgccacttgagacgttgccacaccggaacacgaaccggcagagcaacttgcatgggtgagtccaccggactaggtacaactggacagatagcaacccggtgaccagggagcctgcatatgatacagcgcgtggcctggcggcattgggatgcacgatgggttgtggcggcgaggcagttgaagcatctacctcggaggtccaaagggacttgacgacctgccacccatcatcactcgagcggacgttgctcgaggccttccactggcgacgccaggagggaatggaggccttgaccgcaatcccgggcgacttcggaagctcccgcaccgaacccgccggggagcgtccactgccgtcgtcctcaggagcgcgtccttgaaagttccaggcatggcggcaggcaactcatctccatacgacccaactagagggctgcatgaggatgagcctccgccaatccaagccgggctgacttctgcctaacgttggagcttggaccgtcccttagggagaatcggttccgcggacgaagacaaggaggaggtggagcacgacacctgaagggagggaggaaccgcatgggagcaagcggcagggtaggtggttgccggaacctgggcggcagacggcgagctgttggtggaatgaggggcgccgggtgaggtgggaggcaagggggtgggagacgagggggcgggagccttttttttgcagtgtgtgaactcaacatcatggtggaaactgtacaccctctctcctgaactcaacatcatggtggaaacttactgtacaccagtgactggaaggagcgtcattttcaggcaattgttgtataaaaagagtggagaacattgatggatggttcaagtgtccttgcaagtagcagcttcaaattggaatggaaaaggctctttcctattcacctcgagtactgctgtgtatgactgcagtgacaatggattctgcagtgaggattctccttgtgtacccattggtcaaagcactcgtactgatgtgcttctaaaagctgaaaatgttgtccttgaggcaggcggctgtgttcttaggctagtaggactttaaatcagatcggggtcctcatgtttactggctgtcaaaaggaaccttggatgtgcgtcctgatcatatactcaatctgatacattatgaagatgcagcctctcttgtaatttccatcatgaaaaagagattacggagctgcatctttgtgggttgtgacaacgagcctctgtccaggctagagatcatggaccgtgtcaacagaagcaggaaatttgacacacagtttcatggcttcactgggactgatggtccgctggggaagaggatggacaactccaaaactcgggcaaagcttggatggcagcccaagtatccgagctttacagagttccttggtctcagcaatctctaactttcatgcgatgtcactaaatacctgttattaaagatgaatatactgatacataaaagagatgatgacagatttggaagtggaatgttgtttgcttataccgcagttttcgactatcttttgatttcttctgttagatcttgtaaagcattgcagcatggtgtggcatgtacctgtgttgccttctattcgcttctgttaactcatgaaagcattgacttcaatacctgttaattgtttccatggcttcaatctatcgaaccaactgtctctctcgatgttctctagaattgtaacaaaaattccaatggtactttttggataagaacaagttttgatgaaaacattctctactggaaattttgatttt

SEQ ID NO: 72435 - DNA, 10514 bp, Zea Mays
cctcaaccctctatgatgagagatgtagtcacctgggacaccattcaacaggatatgtgttgaggaagtagaaaggatgccactaataatatctctccacacatatccaaaccccaattttttcaacacctccaaaagaaagggccaagatacgatgtcgaaggccttagaaatgtctaatttaaggaggattctgggctgtttctaagcatgaagatatctagcagtttgctgcaccatcataaagttatcctgtataaatctacttttaatgaaatgtcacacccggtttttaagggcaaaactgaatgcatagcatatgtgtaccaggatctattttccacacatatgttgacgtcacaagtgtaatatatcaaaagacaatgcaataaaggcgtaaagagagtagagtagtctttattacaacattcagacaatagtatcttaaacagtatcatcaaagtaaatcagaaataacatgagtaatctcccacaggaagatgaccgacgcatcgttagactcagtattcatcgaaatatctatcaaggttttcttcatcaccctctgatcaaaatattagcaagggtgagctcacttatggtcggggctcaacaagtgggggaaaattaatgcaagtttaacaagataagactaaggttaagcggtaagcattttagttggtcaatattatattagcaacacctgtcttacaaatcagtgtgtatcccaagtatcccaattattaaacaaaggtataagagtatattaaaaacacttaagtgaaaccacttaagcaaattattggcagatcatcagatctcgatttattgtccatctttaagttcaattatcatatgagggtctagtttgctcttaaccgtgagcacggctgacatatcagttttacactctgcagaggtggtacaactttacccacaagatgtgtatcccatctagcctgggttgtacagacccttaaacactgccgaggtgaatggctagggatccactatgaggttttcacaaaatacacttaatacaaagcaacctgctaaggtttccaagtcggtgtggaggccctttgggcgaggtaccttagccaagaatacgtccccatgttaacattagctgccaccactgccgctccccctcttgccttgcttgtaagtgtcctgtgggtcgtcctcgaacgagtttggttcgtctaccccacagtcaacttctagcatcgatttgcgtatcgtacatacaaaaagaatacatacgccgaataaataacatacaccatcacatgaacaacattcaccattacatgaacaagcatacaccacacaacctatacgtataatagtgcctagaataaaaccaaatttgtattcacagcattagtctacatgtactgacatatgtgaattttaactcctactttggatcactactggtgaaagttacatggacatgtgattatgaaagtattttatatatgttatggtcgctaaatcggtgagggattggagagaggtatcgatggacaggaacgtcggtcgggggtctctgcccacgctcgagcaagaggagggtttctcccttctaattcatgcctgctttatttcttatccattgattacataaataggccggctggccgccctatctagctagagatccttatctccttaaaactctcctaaaaactctcaacaaactactaactgataacttttctagataatctcaactaatctcctaaataatctcaactaatcttttaatcttatctttaactatccttatctaatcccccttggagggccgatggctgttgctgctgcagcccctccatgggcctccttagaccctaacgctacacccctcctggacaagcagctcgtcctcgagctgcagcatgacaggtgctcaaagaccgaatctactcgacctaaaacgagaaacctagaagacaaaccttttacatctcggcttatcttattattccgaatctgattttttagaccccataagataaggcggacaccctccgcgcattggacttgcacgtgtgcagccacctggatcccatggacgccatctggacgaaaggagagcacatagacggacacatggaataggtcgtaacaataaccagcggaggcgccctcgtggcgaccggtagcggaatgtggtggcgctaaatagtgcgcccttgccgatgacaaagggagtgccttccttaccgccgctgccgtagagttgaagttcgtcgtccgcgggacacgtaccatgctcgcacttggagatagcggcccggtgcctgaagcgtcccagatcctctgggactcaaatgtgatataattactagtcccaggaggctagtaaacacatttatacatcagatgattacaaatctgcttaaacgacacaaatctataaaggtggcgaacaactttaagagttggtccacaactcgggacatatcattagagtggggctgaagcagcccgatatacgcagcgaagcaaatcagcggtccaacagacacaggcaaggttgggaacaagcataactcttactcgatctcctttttctgaaaaacaacaaataagcaagggtgagtacaaacgtactcagcagcccaccttcacccgcggaatggggaaatcagatataatgcatggaatatgtggagctcaggatattttgcagaaacaacaatattttatgcagggttgttttgtaaaacattttgtattttgcaaaccacatcctctcccaaaggagcaggaagtttttcaatatagaacaaaatcccctagactaaaccatccaggtatctcagcagtttcccactggttttcattttcaaaaatagctactggacttctcgtccaccatagctgacggctcaaccgccggaaccacttttcaaaagcacttctttttggaaaacaaaacactaattgtcataccacaccagactcgtccattccagtggatacggattattcgaataggttttcaaactctgcgcagaggtgtacactttacccactagtccggttctgcgatctcatggccaatgagacccgaaaccgaatctctttctttcctcgcacgtccttatcttaacggttataccggaaggagtcaggccaccgccatgtccaaaccggacaaaactttccccctccttatcctcccggtgctccccagccttcataaccctagggtttggaccgtacgagttcagattgagtgactgcccatacagtctcgagtggttgtacttatcatgagtataggtagtgaaggatgacaaaccggtccttatatgagaggacaatccttctgctcacacctaacccggctgagccatcaccttaggccctcccctaaactagggagtccctgatcatccctactcaaaggtgataagggttaaaacccttcatcatactcattttggaaaacattttcttttgaaaactcacaccttttctcaaatcatttgtaacaaatatatcaaggattgattgcggcaagcggctgggtggccataataacttgtctcaaaatcatatcatgcataaaataacaggctgagggttgtggtttaaaaagcataggtaatttatgcatcaaaatgatccagtgagcttgtcgtgcttatccggcgaagggggaaggggagctcgcggaactggcttctagctccactgcctggcgtagacttgcagatctggcctccacgagacggcacgaatgctccgataactatgcaacatggataagcaaacatacaaaccagcaagtatatcaacagatatttagtatagtggtcagaatagcgatatatggatgggtagagtcttgagtagaatctgtgtcatgtggtgttgagatactacttgtggtggagcggaggtgcttaccaggagggtggactagaggcgaagcgacactatgcatgtagccggcagagcggagtaactgagtgggtggggtgtttgccttggctgagggtgttgagtgtgtgtggagagggagatggtagctgagtgtatttatagctgggtgtatgtggtgtagcacatgcgaagttcactgttggtgagaatagtgacgaatgaatcgtttgacttagtatgaacaggagagctataggcagaatacgggacaagagtattttgggagttttctggaacatgaaccatgcttaagggatgacatggttggatagggaatagtttgataagaatttagaaacaagaattattggaatctgagtttggaagcctggttcgaaggaatctcaaagttaagcgtgctcaacttggagaaacctgtgatgggtgaccagatgggaagttccctactgcaaggaaaatcacagtcaccgtagttcgtatgactggaatattggtctggctggtcttaggtggactggacagcatgacggatgagtaattgaaatttggggtgatcggatgatcgatgaatagtaacgatgaatagtgactatgaacgaacgatgaacgatgaataggaactatgaacgaacggacaaacgatcgaatgatcggacgaacgaacgatcgaaacttcggtagcataacggcaagacaaagattatctagacgaacgatgaatagttactatgaacgaacgatgaataggaactatgaacgaacgatgaacgatcgaatgatcgaacgaacgaacgatcggaatttcggcagcataacggcaggaaaaagattatttggacgaacgaacggacgaacgatcgaacgatcggacgaacggatgaacgaaccatgaacgatcggacgaacgatcgaacgatcagacgaacgaacgaacaaactaagaacaggtggacgaacgatcgaaaaacgactgaacgatccttgtgctagtgtgtgcttgtgtgggaagtggagtgggcgtgtgtgggggggggaggagagagttgccatgaaatgacttggggtggcttgagaggaggcccttgcccctctatttatagccatgttggggggattagggggagggatgagaggattagtgggaggatgggaggattagtgagagattagcatgtatttgtcttgtataagtgagattagcttgtagagttcaacgtatgacaccggaggcatacatatacgtatgagcatgaggaaagttatgaagaaaatatttgtagggcctgtaaaaattattttgaaggtatctctcaggaggaaaatacttagagaagtattggtggaatatttgggcagtatttctgaacagaatttgacggggatcactggggtaatatctgggtagtatttctggaaagaatttgacaggagtcactggagaaacatttgtaggatattttgaggaggattttggagaaaatatagaccactatattttatttgttgatatcaactcacaaacaaacattttgaaatgaaatttaaaattcattttgaatttagagcgagtttgagaaaattctaagatttgaatttttgggatgctacagtgccgctgctgatggccatccgacaaggcgaggttgcgcccccgtgtgccgagatcaactgtcaccaaggctgcctcaagcattcgccgatgcatctcctgcactctccgtcgtgcaaggaagccacgagcagcagcttgtatgcccacagccgcttacgtctggagccgtgcggacaacgccagctggtgctgctcatgttgcactgctgccttgatttgcagcagcccttgcttaaccttctggagcgtggcttacatctttgcgagatcagcccttatgttggtccacaaatccctcatcgatgaatctggtgattgttgagccggggctgcccctagtggtgtcgcccatggggatgggacggagatgccatcaacgaagatgatgtgacaaaatttggcgttgtacctggggatgggcacgccggcgtccagaaacgtcggctgggggcctctgcccacggccgagcaagaggaggatttctcctttctaatttttgtctgctttatttctcatccattgattacataaatagatcggctggccgcccctatctagctagagatccttatctccttaaaactctcctaaaaactctcaacaaactactaactgataaccttcttagataatctcaactaatctcctaaataatctcaactaatcttttaatcttatctttaactatccttatctaatcccccttggagggcccatggctgttgctgctgcagcccctccatgggtctccttaggccctaacaatataacttagatgaaatgacttaaccaattctacagaaataaattaattaccaattaattatttctattatgaataaacatatccttttaatcttatcctttctaaaagaaaatgtcattataataatcagaggtccaaacatctaataataaattaaaccactgattagactataatatttgtattgctatgaattctataccacttactaattctatgttaagaaaatcttctattatctatttagggggtttaaatgaacctataattataaacttttagataaattctaaaattcaacgtaaacaaatttaactatgaaattacttatcgagtgtttttattaccaacatatgtctaccaattttgtcatagttcatttcaatcccaaattctaaagaaatcgtaaaccaatatcatgtctaataataatccactaattcatcgcatatataccaaaaatcaatagttcacatacgcatgaattctgaatcacaacattctcatattacaacacaataattacaaattcataaactaattcaaaacacgctttgaaaaataaatcaaaattttgggttgtcttcaaccttggacgaacagacggtggtgaggcacgggggcacggtgcgggcacgacgcggtcgacgacggactgcgcgggcacgactaggttcagcggggctcgggcacgtctccagcaaccgaacgacgaacggcgaggcacgacggcgagttccggcggcgagcagggcgcggctccggcgacggcgcgggtaggggagagagacagggagcacgggtagggagggagagagaggagagctcggtcgagtccttttatagagagggagagggcgccagggggagagaaaacggtcggccggccattaatggaggcgaccattacctcaacgttgatggcagccatttcttcactaactaagagattaagtggggagggagtgggggaggtggcggcggctgttactggtgcagggaagaggaggggacgcgggcgcggcgcgcgcacggccaggcggcggcgctgggtggaaaaagagaaggggccgcggggccctgacgggtgcggcccgcgcgccatagagagagcggtgggggggaatgggagaggggtcggctgggccggttagtgggctggcggctagggtttgtgtttttttccttttcttttctattttaaaaatataaatatatattttttaaaataattcaaaaatcataataattataccgaaatttatttataactaaaatatttatttttggaccattatttctatattaatcaattggattttcgttaagaaagaaattctactaaacatccaaaaatcgaatatgagcaaacaaaaattattctagatgcaaataaaaatcaaaaattaggaagaaaatttattaccattaataatctaaatgcattattttagttgatggtttttatagtgttatatgaaagcactttggttttttgaaattaagcaatccagcttttccccgagcctgttggccaagatctttgtcatgaacttagcaaaactgtgaatcaggctaatggggcgaaaatcagcagcaccatgagcgccctccctttttggcaacaatgtgataaaggcagagttgaggaggcgaaggtttctgaagtgaaggatgaaagatcacatttggccacagtttctgaagacaactctgaaatccaacaagattccccgagcattttgtctactgtagacttactccatgcgtgagctgggatgccacaaagttccacatccaccaaaactggcaaggaaacaccagtggaatgagcaaaccgtgaccatttcttgaacttcaactcaaaatccgggcagtgaagcactcttccattatcaaacacccgtactgcagtatcctcatcttgaaaaactagcatgaaatcttctggccaggccttgtgaatggtgaaacttgattcaggcagatcatatatttgtgcaacttccaaaattacctcagaaggtgttactgatggccttgtacccacaacggtgacgaacaaagctgcccttagcctgatttcttcgcgtgcgatggcagggtagaattccatcacacatctgcgtcccggagcagccggaaccgtggtgctactatctaccgggtgcggatcacactggagatcagcacccacctccacctccaaagcaggctgcctgagagaggtgtgcttccgtgctcttatggtgagggcgcctccgtcgctttcttccacgcttggaaggggaggcttgatcctaaaaagaggcccttccctgaacagaggcccctgccgacataggggaggtgtgcactaccctatcctgtccagctgacaggggggtaattctcttccacacttgtttacgtttctccatcacttgtggctgaggcatgaccttgatgcgctgccaggaaggctctttatgcgtagcccgccacttgagacgttgccacaccggaacacgaaccggcagagcaacttgcatgggtgagtccaccggactaggtacaactggacagatagcaacccggtgaccagggagcctgcatatgatacagcgcgtggcctggcggcattgggatgcacgatgggttgtggcggcgaggcagttgaagcatctacctcggaggtccaaagggacttgacgacctgccacccatcatcactcgagcggacgttgctcgaggccttccactggcgacgccaggagggaatggaggccttgaccgcaatcccgggcgacttcggaagctcccgcaccgaacccgccggggagcgtccactgccgtcgtcctcaggagcgcgtccttgaaagttccaggcatggcggcaggcaactcatctccatacgacccaactagagggctgcatgaggatgagcctccgccaatccaagccgggctgacttctgcctaacgttggagcttggaccgtcccttagggagaatcggttccgcggacgaagacaaggaggaggtggagcacgacacctgaagggagggaggaaccgcatgggagcaagcggcagggtaggtggttgccggaacctgggcggcagacggcgagctgttggtggaatgaggggcgccgggtgaggtgggaggcaagggggtgggagacgagggggcgggagccttttttttgcagtgtgtgaactcaacatcatggtggaaactgcaattgttgtataaaaagagtggagaacattgatggatggttcaagtgtccttgcaagtagcagcttcaaattggaatggaaaaggctctttcctattcacctcgagtactgctgtgtatgactgcagtgacaatggattctgcagtgaggattctccttgtgtacccattggtcaaagcactcgtactgatgtgcttctaaaagctgaaaatgttgtccttgaggcaggcggctgtgttcttaggctagtaggactttataaatcagatcggggtcctcatgtttactggctgtcaaaaggaaccttggatgtgcgtcctgatcatatactcaatctgatacattatgaagatgcagcctctcttgtaatttccatcatgaaaaagagattacggagctgcatctttgtgggttgtgacaacgagcctctgtccaggctagagatcatggaccgtgtcaacagaagcaggaaatttgacacacagtttcatggcttcactgggactgatggtccgctggggaagaggatggacaactccaaaactcgggcaaagcttggatggcagcccaagtatccgagctttacagagttccttggtctcagcaatctctaactttcatgcgatgtcactaaatacctgttattaaagatgaatatactgatacataaaagagatgatgacagatttggaagtggaatgttgtttgcttataccgcagttttcgactatcttttgatttcttctgttagatcttgtaaagcattgcagcatggtgtggcatgtacctgtgttgccttctattcgcttctgttaactcatgaaagcattgacttcaatacctgttaattgtttccatggcttcaatctatcgaaccaactgtctctctcgatgttctctagaattgtaacaaaaattccaatggtactttttggataagaacaagttttgatgaaaacattctctactggaaattttgatttt

SEQ ID NO: 72436 - DNA, 863 bp, Zea Mays
caagaaaaaaagattggttctcaggctggattctccttgtgtacccattggtcaaagcactcgtactgatgtgcttctaaaagctgaaaatgttgtccttgaggcaggcggctgtgttcttaggctagtaggactttataaatcagatcggggtcctcatgtttactggctgtcaaaaggaaccttggatgtgcgtcctgatcatatactcaatctgatacattatgaagatgcagcctctcttgtaatttccatcatgaaaaagagattacggagctgcatctttgtgggttgtgacaacgagcctctgtccaggctagagatcatggaccgtgtcaacagaagcaggaaatttgacacacagtttcatggcttcactgggactgatggtccgctggggaagaggatggacaactccaaaactcgggcaaagcttggatggcagcccaagtatccgagctttacagagttccttggtctcagcaatctctaactttcatgcgatgtcactaaatacctgttattaaagatgaatatactgatacataaaagagatgatgacagatttggaagtggaatgttgtttgcttataccgcagttttcgactatcttttgatttcttctgttagatcttgtaaagcattgcagcatggtgtggcatgtacctgtgttgccttctattcgcttctgttaactcatgaaagcattgacttcaatacctgttaattgtttccatggcttcaatctatcgaaccaactgtctctctcgatgttctctagaattgtaacaaaaattccaatggtactttttggataagaacaagttttgatgaaaacattctctactggaaattttgatttt

SEQ ID NO: 72437 - DNA, 705 bp, Zea Mays
cgaggtttccctctgcctcgcacgctcgactcccaagctttactctttttcccatcactcccagctcgacatcgacgtccgctgctcaccatggccggcctcgccgtaaactagctccggtctctggcagccgcggcgctcgtctgcttcatgctcaaatcctgccagcatctcctagtttccctcgcgtagaatcaacggttgtcacatgtcacctccagtcgaagtctgccttggccgtgacttcctcgcgcgtacatgtttcccctcatcgctgatcgtcttagtgtcgtcctcctcgacctcaccgtggtgttcagcctcgccgtgctgctagatcatagtgccatcgactccctgtccggcttcaacctcctcgtcgacccacgttatatccacgacatgcccgacgatttcgatgatctgttttccaattatgggctgcttacgtcgatcttcggaactttttgacgaacttcttgaatatatgatcgttgttatttctgcgaattccaagtcagaattaagtatgttaattaatcaccggatgcggaggaccagaactgagtcgaccacaagatgctgaaaagcgtgagcttctccgcaagatgatgttgatggattaacctaaagatggatagacagagcaagtatcggaacaaaggctgatcgtcaagtgatcgacgtctaacaacactaacctag

SEQ ID NO: 72438 - DNA, 384 bp, Zea Mays
atggatagtggcagttgggaagatagcagacgacgcgtaccggacgggaaggcgtcgaggagcgcgagggcggcgtcggcgcgggcgcggagtgcggcgactttctcggaagggtcccgggggaaaaaggtgtcacggaggcggtacagctcttccgccgcgttcgcagcgtcagccaaaggcgtcctgtccccttcctccgcctcggacggggccggggcggagctcgtgcacgcgccagttagcagattctgggtagacatggatctgagaaaggactggggcagtcgagacggccagacggggaaggggagcttacaaaatgggacggccaacatcgccgttttcactttttctctactccatgggcgtagctaagggctg

SEQ ID NO: 72439 - DNA, 647 bp, Zea Mays
ggccgccacatctcgccagagcagagccgccacacatggactgtgttgctaggaccgccacatctcgctggtgcatggccatcgcatccgtggctcacatgccagtatgaagggacaatggcgatgggatagcagagcggggtggcatgcttgcagtacctcctcgacgccgcctacgatgccagcttcaacttcttttgactccacagaattgatacaatggaagcacttgtgactgagactagaatagaagggaaagaatctaagacctctatagaagcaattgctcaagtattggcttcatcaagatatcttcaaaatgttcttgtagctgcaataaagagaagcgggaatggtggtgatgctacatgcgtagaagtagaaatgttggtcttgtagctccaagagttgctcaagtatttgcttcatcaattttttttttcaaaatgttgttcttgtagctgcaacaaagagaaactgcaatggtggtgatgctaaatgttggtattgtagctccaagatttggtttttgatgaatgatatctatgataatacgttgctaagtatatgtgatgatcaatcattgttgtttaattataatgggttgtgattcatgtgctatattgataatgctgatagttaaaaag

SEQ ID NO: 72440 - DNA, 2667 bp, Zea Mays
ccctggaaatccacagttgttgcaagtaggaatatgccaaatcgatcccatagacttgctatcaatgatttcaagttgcttggtcgcctgttcaaaccatgggaccgactaggcgactagtcgtgattaggcgatgactagggcatttagtcgacccctagtcggtccctggtcgtcctagaccatttagattatgttctaatacacacacacattatataaattagaacaaatagctaggataaacaaaataacatattgctttaaactctgtagattgcaaacatagacataggagcaaggcactacctagcaatggcttaggagtagagaagtaagccaaaaactatccactagttcggcactggtcactggcacagatacagagaagggggagcaggaggaacctttagatgaccaactcaactcatcaatggtgcttgtatgcaggagagtggagaagccagtagtctgtcatagtcgccgccggtgctctgtcatatgtcacagccaccaccggtgctggtcttctatactgcagtaggccaggtctgaaggctggaggtcaggcaagagaggaggtgtaccctggttttggtggctgggcgactaggtattggcagaggagaggagaggagaggccagactaaatgatactgtagatgggctaaaaatgacccaataacgaaaccctagccgggtgaaaatggcacaataccaaaaccctagccgggcaaccaggaaacactaagcggatgattagtcgccctaatcggcgattagtaggacaactagattgaccagcctatctagttgagtcatctacctaatcgaacacaaacaggcgactagcccgataatcatgattaatcggacgacttgaaatcattgcttgctattgctggtcagcttgctattgctggtcagctggtgtttctggcatagccattgttctgaccaaccatatataaatgcaaagctccatcctaaaaaagttatagatttttagagctaaaagtagtttaactgatatttggttatttgtctttctttattcttgacaaaaaggacagttcatcacatcaaagacaaatggaatagagcagaagatccaaaatgtcattagttcaaatgagactcttgtgttacagttcacaacaggaagtaaaagaaaataaaaaaaggaacatttcaacagtatggctttcttcttttctcgatgcttggaatgcatgaggtttttctttctatctatccctacgtttgttctaaaagactagactgattcatatcaaatttctatataatttcaagtggctgctttctagagcgatggtgatggcagctaggcaggacactgaggagggaggggcaagtggtgttcttagctcaacggatcagatcgatcatgtgctgagcaacactttttgaggtatctcaggtgtgtaattcttgcagggacaatggcgatgggatagcagagcggggtggcatgcttgcagtacctcctcgacgccgcctacgatgccagcttcaacttcttttgactccacagaattgtaggctcatttgctccctcatcttcctacctcggtttgtgagtaatgaaaggtgaatggatgcacatttgcaaacctgtttccttgtcaggtacccgaactgccaatacacttcagtgtgggtaagaagcacattttgatctaatcagtcgtactgtaaccgctctctatattgtttcacctttgatataaccttttgtgtcatattttattacttggtcactgtgttataatacaaaatgctagagccctggtgaggcaagcaacacccgcctactgttctagttagatgcagactaccccatttctctgcctcttcaagggttacacatatatcttggttttgctgcattctaaatgtgatttgatggttacttgcttattttataccatttttctttactaattgaggaaacataatcatacaaatcattagggttttggttactagttagtattcccataatgaatattctatgatgttatgactgtttttgttccttactttttcaaagacagcggtgatcaactacacctattcacattgctaactcaattcaaaatagaattatgctgcaagctacacaaggtcttgacatccaaaatgtgaagtgtgtaattgtttgtatattagagataactttatgcattctggtatgctaatgtttgttttggtttcgttttatccatatctcttgtcttatttttatacattcttgttgataggatacaatggaagcacttgtgactgagactagaatagaagggaaagaatctaagacctctatagaagcaattgctcaagtattggcttcatcaagatatcttcaaaatgttcttgtagctgcaataaagagaagcgggaatggtggtgatgctacatgcgtagaagtagaaatgttggtcttgtagctccaagagttgctcaagtatttgcttcatcaattttttttttcaaaatgttgttcttgtagctgcaacaaagagaaactgcaatggtggtgatgctaaatgttggtattgtagctccaagatttggtttttgatgaatgatatctatgataatacgttgctaagtatatgtgatgatcaatcattgttgtttaat

SEQ ID NO: 72441 - DNA, 1256 bp, Zea Mays
gcgatcttctcagcgacggctttctctccagtgacgttccatctttcatccatctcgtgtctatatgttcaagatggcgccattggttcctcagcagaatgtgatgcaaaggttcaggtcattagtgataatccctctgctgttatgttactgtcgaaagtcctttggaaaataccagatcgtgcgatttcccatgacacatcccctttgactatatatgctaccagttcaataagtaacaacgttaagactgttcttggttctggaacacaatatgctaatggatttgctgtggcggatattgaacgatcatctctaatcctatgcggtaaagcatttgctaattcagctatcgtgaaagatgcacttgctgctatgacagccccaatattgtctgcaagaggaggcctcccggttccaggatggattatgagctttggtggttctattgtattattgtttgccctagtggaaatcatgatgtcctgcacagaaatccacaatgctctattgtccattgactgtggtgcagtcatctcttccaaggggtctactgtgcttttcccaacaaaggcaagcagggagcagaaactgcttaccgaaccaactggagtaattatcgtatcatctgatagctctggtgtcataccatctgtatgcaagctctctcctggccaggctgcctaccatttcttggctggatatcacgatggaaaatttgtcccagcatacactagagccccctctcctgctgacccacttgcacttgcaatttctttattctcacatttgaaagaagatgatacaccggcatatctgatcaacgctaagcactctggaaagtacattggcggcaatgggcttatgaaattattaaagctggcactatctcacgatcttcctaacaaaaaaactgaaggctctagagttcaagctctgcaacgggaggtctgttcagtttgacgtcggcaacgtggtcatggtgacaaggaacaccggatgtgtaggagtgatcaagaactgggagaagcacaagggcatcttcgaggaaaacatagaatggaattcaaatttggtggtcgcaaaagtgtggagacttgaattcatataaagttaggcttaacattagtgcaaacagttgtattttagtttagatttagagtacacttatatatgccttgtttgacaatgcttatttatgatatattgaatggtacttatttatattatattaattataatgttgttcaatatat

SEQ ID NO: 72442 - DNA, 1269 bp, Zea Mays
ctggctttgcatctgtagatcacttctgctattactatctcaggtgacgttccatctttcatccatctcgtgtctatatgttcaagatggcgccattggttcctcagcagaatgtgatgcaaaggttcaggtcattagtgataatccctctgctgttatgttactgtcgaaagtcctttggaaaataccagatcgtgcgatttcccatgacacatcccctttgactatatatgctaccagttcaataagtaacaacgttaagactgttcttggttctggaacacaatatgctaatggatttgctgtggcggatattgaacgatcatctctaatcctatgcggtaaagcatttgctaattcagctatcgtgaaagatgcacttgctgctatgacagccccaatattgtctgcaagaggaggcctcccggttccaggatggattatgagctttggtggttctattgtattattgtttgccctagtggaaatcatgatgtcctgcacagaaatccacaatgctctattgtccattgactgtggtgcagtcatctcttccaaggggtctactgtgcttttcccaacaaaggcaagcagggagcagaaactgcttaccgaaccaactggagtaattatcgtatcatctgatagctctggtgtcataccatctgtatgcaagctctctcctggccaggctgcctaccatttcttggctggatatcacgatggaaaatttgtcccagcatacactagagccccctctcctgctgacccacttgcacttgcaatttctttattctcacatttgaaagaagatgatacaccggcatatctgatcaacgctaagcactctggaaagtacattggcggcaatgggcttatgaaattattaaagctggcactatctcacgatcttcctaacaaaaaaactgaaggctctagagttcaagctctgcaacgggaggtctgttcagtttgacgtcggcaacgtggtcatggtgacaaggaacaccggatgtgtaggagtgatcaagaactgggagaagcacaagggcatcttcgaggaaaacatagaatggaattcaaatttggtggtcgcaaaagtgtggagacttgaattcatataaagttaggcttaacattagtgcaaacagttgtattttagtttagatttagagtacacttatatatgccttgtttgacaatgcttatttatgatatattgaatggtacttatttatattatattaattataatgttgttcaatatat

SEQ ID NO: 72443 - DNA, 2165 bp, Zea Mays
ctgccttctggccgccggccgcccagcgtctccatttccatctgtggctttgcatctgtagatcacttctgctattactatctcaggttttgaacttagaagccctagcaactcggtggcaactggtaacaacagcctagaattgtgggttgttggagatgtttgtatttttaattcttgatcacgatgaggacatgtaaaaagttgacaaattagcattgttggtggtaactggtagcagcaactctgttttattttcatgtagtgtatttcctaaaaaagttatttaaatattgtgtaaactacaaattagcataacacagttgattgtgggaacaagcgaattgcaagcagcggctctttttttagaaaaatatatttcatacattagaagcccatacttctccttaactaattcctgtattatccctgccataaccgaacacagggattctagagggggttagaagcagggaatcatacccccacagggagggattgagtgaagtggaagggatccactcaatccctctctggattgcctcccctaggggtttagatccctaggaaccgaacaagccctcaatcctcatgattttgggatgaaacgaacatggcctcaatgggatgatggtattcaatgatgattgtcatgaatggagctgaaatattgttagtcccttttttagcatccaattttttctctcatttttaatttagttatgacatctccctgtttgttgaagggcagtcctggtgcaacagtgagagctgtctcactgagtcatcaggtcacgggttcgaagtagtctctccgtatttgcgggagaaggcttgctttggtttatccctatcctagacgtcacatgtgggagcctccagcagtggatctacctttttttatctccctgtttgttgaaagactacttgcttgcataggtgacgttccatctttcatccatctcgtgtctatatgttcaagatggcgccattggttcctcagcagaatgtgatgcaaaggttcaggtcattagtgataatccctctgctgttatgttactgtcgaaagtcctttggaaaataccagatcgtgcgatttcccatgacacatcccctttgactatatatgctaccagttcaataagtaacaacgttaagactgttcttggttctggaacacaatatgctaatggatttgctgtggcggatattgaacgatcatctctaatcctatgcggtaaagcatttgctaattcagctatcgtgaaagatgcacttgctgctatgacagccccaatattgtctgcaagaggaggcctcccggttccaggatggattatgagctttggtggttctattgtattattgtttgccctagtggaaatcatgatgtcctgcacagaaatccacaatgctctattgtccattgactgtggtgcagtcatctcttccaaggggtctactgtgcttttcccaacaaaggcaagcagggagcagaaactgcttaccgaaccaactggagtaattatcgtatcatctgatagctctggtgtcataccatctgtatgcaagctctctcctggccaggctgcctaccatttcttggctggatatcacgatggaaaatttgtcccagcatacactagagccccctctcctgctgacccacttgcacttgcaatttctttattctcacatttgaaagaagatgatacaccggcatatctgatcaacgctaagcactctggaaagtacattggcggcaatgggcttatgaaattattaaagctggcactatctcacgatcttcctaacaaaaaaactgaaggctctagagttcaagctctgcaacgggaggtctgttcagtttgacgtcggcaacgtggtcatggtgacaaggaacaccggatgtgtaggagtgatcaagaactgggagaagcacaagggcatcttcgaggaaaacatagaatggaattcaaatttggtggtcgcaaaagtgtggagacttgaattcatataaagttaggcttaacattagtgcaaacagttgtattttagtttagatttagagtacacttatatatgccttgtttgacaatgcttatttatgatatattgaatggtacttatttatattatattaattataatgttgttcaatatat

SEQ ID NO: 72444 - DNA, 1257 bp, Zea Mays
cttagaagccctagcaactcggtggcaactggtgacgttccatctttcatccatctcgtgtctatatgttcaagatggcgccattggttcctcagcagaatgtgatgcaaaggttcaggtcattagtgataatccctctgctgttatgttactgtcgaaagtcctttggaaaataccagatcgtgcgatttcccatgacacatcccctttgactatatatgctaccagttcaataagtaacaacgttaagactgttcttggttctggaacacaatatgctaatggatttgctgtggcggatattgaacgatcatctctaatcctatgcggtaaagcatttgctaattcagctatcgtgaaagatgcacttgctgctatgacagccccaatattgtctgcaagaggaggcctcccggttccaggatggattatgagctttggtggttctattgtattattgtttgccctagtggaaatcatgatgtcctgcacagaaatccacaatgctctattgtccattgactgtggtgcagtcatctcttccaaggggtctactgtgcttttcccaacaaaggcaagcagggagcagaaactgcttaccgaaccaactggagtaattatcgtatcatctgatagctctggtgtcataccatctgtatgcaagctctctcctggccaggctgcctaccatttcttggctggatatcacgatggaaaatttgtcccagcatacactagagccccctctcctgctgacccacttgcacttgcaatttctttattctcacatttgaaagaagatgatacaccggcatatctgatcaacgctaagcactctggaaagtacattggcggcaatgggcttatgaaattattaaagctggcactatctcacgatcttcctaacaaaaaaactgaaggctctagagttcaagctctgcaacgggaggtctgttcagtttgacgtcggcaacgtggtcatggtgacaaggaacaccggatgtgtaggagtgatcaagaactgggagaagcacaagggcatcttcgaggaaaacatagaatggaattcaaatttggtggtcgcaaaagtgtggagacttgaattcatataaagttaggcttaacattagtgcaaacagttgtattttagtttagatttagagtacacttatatatgccttgtttgacaatgcttatttatgatatattgaatggtacttatttatattatattaattataatgttgttcaatatat

SEQ ID NO: 72445 - DNA, 1688 bp, Zea Mays
gggagggctgttgttgtcggaggctatgatcagatttgtcccggagcgcggcggtgtcggtggccgtcgtcgtcttgggcgggctgttgctgtcgtcgcaaactggaagaaggctcgagtcgtcgaaaggtatggtccctgatgaatccggggcaccaacggctaggcctcaccgccgagggatatcttccacctgtgtgcgcgcggctacttctcctgtggcagcgggaagcgcggcaaggcgctgtccgccgcggactagctgctccgccccgccgtcatcaaatggcttcgctcacgcgtgctcctcgaccacgtactcgcccgcgaagagaaccgcgtcaccgccgcattccgttgtgtgtgccttgggaaggacccctccacccacttcctcctcaccgtcaatctctaggtatcaggtcggccagatgcgtacaacgtcgtgttctacttggtggtggaagcgcccatcccagccgacggactcgctgctgggctgcttcatccacgacaacggcgcgtcgtcgacgggccgtggctcatctgcgccaccgtagcagctacgtgcgtggcttgcctgcttgggcatgcgcccacgtgccgctaccacagggatgatggctaccttgagatcgacgtggacatcggcagcttggcgatcgccaagccgttctgcacctcgcgctcggcgccatcatgtcggtcaccatcgacatgggtcgccaagccgttctgcacctcgcgctcggcgccatcatgtcggtcaccatcgacatggggttccttgtcgagtcccaacctgaggaggagctgcccgagaggctgttcggcgccatgcgtatcgcgcagatggagatgggcacaaccgggtacgtgaagctgcctccgatgtggccatgccggagacggccgcagggctaaggccagtttcagggtaagcttagcgaagctggtcaactatagccgctagtaagaccatgccggtggcaaggtgggcaggtcaatgagttgcccggagcgatagcgagcagtgaagggccacataatcattccacgttttgacactggagtatgtccattttttctactattgttgaagtcttagtgcacctgataggctatcatcattggccttagagatatcttcaattagatgtgaagaagggcatgaccaaaacagcaacaaagataactgttggggaccttcggcttccgaagctcttcaaaaacatgatttaacaatgtttctgtagtataatacatgagcaagtaccttcgaacttggacctttcagacttgagtcaaaatcacagtgtgaagaagcacaagggatacgaaggatggaacgaagccgaagctgtgcgcaagggagcttcggcgtgataacagaaaaggaaaccgacttaaaggggaaaaggctatctagaccccgatgaattactatagaattattagcaaatgtaaagggcatgagtgtaattttacatgggctgcgtcatgtgcctataaatagatgaacaatgctccagtactgttcacgctgacttggcattttgcttttgcgtcacgcttgtaccctttaccttccctcaagctgaaggtacacttgtaacatgatatcatttctatttcttcatagtaataaaatagaaatgattcaataataacaacatattcaattgttc

SEQ ID NO: 72446 - DNA, 3828 bp, Zea Mays
cacggcgtccgaatcagcagttacccgcgtctctagtctgtactttccaggccatcgtctccttccccttctttcaccggcctcgagtcacacgcgtgagatctgtgccttccgccgcggccacatgccacacaacgacgcccggcgagcttcaccgcgatagaggagctccaggaggacggccgctccgcgcacgccctccgcctccgcgctttcttctccgacccagcgcttttcccgcccgatctcgtcgcccgctcatcctctgcgccgcccggtgctgatccacagattttgctagaagagaaaatagcagcagaagaaaagttggcactcacggagtatgatctgcgcctagccaaagaagacctttcacagttgaagcttgaattacaaaaacaaaaagaatcatctcctgatgattcaaatgggctccttttgggtgcttctatacgcgaaggatatactaggcaacaagaaaattgggatgtgaaaatttcagcattaggccctctaaaggataatgaacgaaaagatcttaattgcgctgtaaaagaatacttgcttttggcagggtatcgacttgctgttatgacattcattgaggaggttcctgatcaagaccttgatgtttggccaaacagttcagcttgtgttcctgatgcccttcgtcgttattactatcagtatctttcttctactgcagaggctgcagaggaaaaaatatccatacttcaggaaaatgaaacattactcaaggacaatgaacgactcaatgctgaaaatgattccttgatgaagagcagggaaggagctaatagtcaggttgccgctttaaggaagtctttggaagctgcacacaaggatataaaagacaaggaaaaaatgattcaagacttgaggcagtcactggatgtccagaggaaggagctgaatgactgcagagctgaaatcacagccctgaagatgtacatcgaagggactcaatcaatcaaacaattgtttgttggaactagtgatggtgtaaagtcgcattcctttgctaattctgtgggagcatcatcattgaataatgaagatgaagattcaaaaggatctgaagccataacaaataagctagcatcagcagtaaatattactgatgatacgcagaaagatcgccaagttctagaaagtagcgctgaagagtaatctgcatggagcttccatgactggtaaaagccaggggagttcagatggcatatccatgtatttatctattgagaaactagagagcccaagtaaacaaaaatcttcagataagattgctttggagactataaagatagtttcagatgcacttccaaagattgttccttatgtgctcataaaccatcgaacttcttccattgatcatatgtgctatagaaaagcatccagatagcgatgtacgggattccttgactcatacattgtttaacctgataaaacggcctgatggagaacagagacgcatcataatggatgcttgtgtagaattagcaaagagcgttggtgagatgaggacagaaactgagttacttccacaatgttgggagcagataaaccaccaatatgaggagcgcagattgcttgttgctcagtcgtgcggtgaacttgccgtttatgtccgtccagagatacgagattccctcattttatccattgtgcaacaacttgtcgaagatgctgcaacagttgtaagggaagctgcaacacataacctggcattgcttcttcctatgtttccaaatctggacaaatattataaggttgaggagctaatgttccaattggtctgtgacccgtctggggcggttgtggaagttgcactcaaggaacttgttcctgctgtagtaagatggggagataaattggatcagatatcaagagtactattggctcatatcctggcatctgctcagcgatgtccacctatttcaggtgttgaaggtacaatagactctcatcttcgtgttttaggagaacaagagcgctggaatattggtgtccttcttcggatgttgactgagttgcttccatttattcatcagaaagctatacaaacttgcccctttgcatcagctgatccaacaagctctacaccagagaacttctcagcatcctgcctaaaatcatatgcaacaggtgactctgagtggtcagcatttgagtggatgcacactgattgcctgccagatttgatcaagcttgcctgcttgttgcctgtgaaagaagataacttaagaaccatcatcacaaagtacctcttggaagtatctggactctacggtaaagattatctggagcacattatgctacctgtatttcttgtagctgctggtgacattgatagtggcgattttacctattttcctctatcaatccagccaaaagtccgtggcttgcgtccgaaaacttcaactgctgaaaaacttgccatcatgtgtgtcttcccattattgttatctggtattttgggttctccttccagtcgtcaacagttggaagagtatctgagaaaagtacttatccaaaacaccaaggatggttcattttctatgcatcatactactgagatcattaacgcagttcggtttctttgcttatttgtggagcaccatagtgtcatctttaacattttgtgggagatggttgcgagctcggataccagcctgaaaataaatgctgcggctctactgagagcacttgtaccctacacggatgtgaaaatagcatcaactcatattttgccagcacttgttacccttggctctgatcaaaacttgaaagtaaaatatgccagtatagatgcatttggagctgttgctcagcatttcaaaaatgacatggttgttgacaaaatacgcattcaaatggatgcttttcttgaagatggatcacatgaagcttctgtttctgttattcgtgcacttgcagtagctgtacctcattcaacagataggctacgtgaatatcttttaaccaagatatttaagatgacatgcatcacacctgtcggcaatgatattgaacggcgtcgtgaaagagcaaatgtactctgtgaagcgctccgggctctggatgctacagatcttcctgctatgggtatacgtgatttgcttctgccatcaatacaaaatctgttaaaagatctggatgctctagaccctgcgcacaaggaggctttagaaatcataagccgggaaaggtcagggggtacgctggaaagcattagcaaggtaatgggggcgcatcttgggattgcatcatctgtcagcagtttctttggtgagaacagtctcctcacaaagaaagaaggtggcgaggaacatgatcctgctggccccaccgctcctgagcaaaacctgcaggctcagccagagagcacgaggtttggtcgcataatgaggagcggctttggagacatattgcgaggtcaaagcaaaggacagtgatgcacttagattgaaatgatcaattacatacatagctgccgataccacattctttgtttgtaagttgacagaatatacctcaagggttgtatgttatttgccgagataaaaaaaaaggatttgacgttgcaaatctagcatcaaacttcctgtatgtaagttgcctgtagttagctgctcatttataagatgctaataattgtgtctttgtttcatttgtttttataaataaaatatataactagatatgagacactttgcccatcttttctgaaatttggatgttatagttggctgacatcatgtaattgatctgctttggttgaaggaacggtgggttctgaactttgca

SEQ ID NO: 72447 - DNA, 4067 bp, Zea Mays
cacggcgtccgaatcagcagttacccgcgtctctagtctgtactttccaggccatcgtctccttccccttctttcaccggcctcgagtcacacgcgtgagatctgtgccttccgccgcggccacatgccacacaacgacgcccggcgagcttcaccgcgatagaggtaggcccgcccgataccaaggaggatggcggcagtgggcgttggtgcagcggacgagcggtgggcttcgttgtgcaactgcgtggtgaacttcttgctggaggagcggtatcacctcacggcgctagagctattgcaggagctccaggaggacggccgctccgcgcacgccctccgcctccgcgctttcttctccgacccagcgcttttcccgcccgatctcgtcgcccgctcatcctctgcgccgcccggtgctgatccacagattttgctagaagagaaaatagcagcagaagaaaagttggcactcacggagtatgatctgcgcctagccaaagaagacctttcacagttgaagcttgaattacaaaaacaaaaagaatcatctcctgatgattcaaatgggctccttttgggtgcttctatacgcgaaggatatactaggcaacaagaaaattgggatgtgaaaatttcagcattaggccctctaaaggataatgaacgaaaagatcttaattgcgctgtaaaagaatacttgcttttggcagggtatcgacttgctgttatgacattcattgaggaggttcctgatcaagaccttgatgtttggccaaacagttcagcttgtgttcctgatgcccttcgtcgttattactatcagtatctttcttctactgcagaggctgcagaggaaaaaatatccatacttcaggaaaatgaaacattactcaaggacaatgaacgactcaatgctgaaaatgattccttgatgaagagcagggaaggagctaatagtcaggttgccgctttaaggaagtctttggaagctgcacacaaggatataaaagacaaggaaaaaatgattcaagacttgaggcagtcactggatgtccagaggaaggagctgaatgactgcagagctgaaatcacagccctgaagatgtacatcgaagggactcaatcaatcaaacaattgtttgttggaactagtgatggtgtaaagtcgcattcctttgctaattctgtgggagcatcatcattgaataatgaagatgaagattcaaaaggatctgaagccataacaaataagctagcatcagcagtaaatattactgatgatacgcagaaagatcgccaagttctagaaagtagcgctgaaggttcctcagtttcagaaactccagtgtctttcacagctgttgagaatgacagctatggtacatcaaaagaagataaatctgtgtcaaatatctcatcgaataatgtatgttttcagagtaatctgcatggagcttccatgactggtaaaagccaggggagttcagatggcatatccatgtatttatctattgagaaactagagagcccaagtaaacaaaaatcttcagataagattgctttggagactataaagatagtttcagatgcacttccaaagattgttccttatgtgctcataaaccatcgtgaggaacttcttccattgatcatatgtgctatagaaaagcatccagatagcgatgtacgggattccttgactcatacattgtttaacctgataaaacggcctgatggagaacagagacgcatcataatggatgcttgtgtagaattagcaaagagcgttggtgagatgaggacagaaactgagttacttccacaatgttgggagcagataaaccaccaatatgaggagcgcagattgcttgttgctcagtcgtgcggtgaacttgccgtttatgtccgtccagagatacgagattccctcattttatccattgtgcaacaacttgtcgaagatgctgcaacagttgtaagggaagctgcaacacataacctggcattgcttcttcctatgtttccaaatctggacaaatattataaggttgaggagctaatgttccaattggtctgtgacccgtctggggcggttgtggaagttgcactcaaggaacttgttcctgctgtagtaagatggggagataaattggatcagatatcaagagtactattggctcatatcctggcatctgctcagcgatgtccacctatttcaggtgttgaaggtacaatagactctcatcttcgtgttttaggagaacaagagcgctggaatattggtgtccttcttcggatgttgactgagttgcttccatttattcatcagaaagctatacaaacttgcccctttgcatcagctgatccaacaagctctacaccagagaacttctcagcatcctgcctaaaatcatatgcaacaggtgactctgagtggtcagcatttgagtggatgcacactgattgcctgccagatttgatcaagcttgcctgcttgttgcctgtgaaagaagataacttaagaaccatcatcacaaagtacctcttggaagtatctggactctacggtaaagattatctggagcacattatgctacctgtatttcttgtagctgctggtgacattgatagtggcgattttacctattttcctctatcaatccagccaaaagtccgtggcttgcgtccgaaaacttcaactgctgaaaaacttgccatcatgtgtgtcttcccattattgttatctggtattttgggttctccttccagtcgtcaacagttggaagagtatctgagaaaagtacttatccaaaacaccaaggatggttcattttctatgcatcatactactgagatcattaacgcagttcggtttctttgtgtcatctttaacattttgtgggagatggttgcgagctcggataccagcctgaaaataaatgctgcggctctactgagagcacttgtaccctacacggatgtgaaaatagcatcaactcatattttgccagcacttgttacccttggctctgatcaaaacttgaaagtaaaatatgccagtatagatgcatttggagctgttgctcagcatttcaaaaatgacatggttgttgacaaaatacgcattcaaatggatgcttttcttgaagatggatcacatgaagcttctgtttctgttattcgtgcacttgcagtagctgtacctcattcaacagataggctacgtgaatatcttttaaccaagatatttaagatgacatgcatcacacctgtcggcaatgatattgaacggcgtcgtgaaagagcaaatgtactctgtgaagcgctccgggctctggatgctacagatcttcctgctatgggtatacgtgatttgcttctgccatcaatacaaaatctgttaaaagatctggatgctctagaccctgcgcacaaggaggctttagaaatcataagccgggaaaggtcagggggtacgctggaaagcattagcaaggtaatgggggcgcatcttgggattgcatcatctgtcagcagtttctttggtgagaacagtctcctcacaaagaaagaaggtggcgaggaacatgatcctgctggccccaccgctcctgagcaaaacctgcaggctcagccagagagcacgaggtttggtcgcataatgaggagcggctttggagacatattgcgaggtcaaagcaaaggacagtgatgcacttagattgaaatgatcaattacatacatagctgccgataccacattctttgtttgtaagttgacagaatatacctcaagggttgtatgttatttgccgagataaaaaaaaaggatttgacgttgcaaatctagcatcaaacttcctgtatgtaagttgcctgtagttagctgctcatttataagatgctaataattgtgtctttgtttcatttgtttttataaataaaatatataactagatatgagacactttgcccatcttttctgaaatttggatgttatagttggctgacatcatgtaattgatctgctttggttgaaggaacggtgggttctgaactttgca

SEQ ID NO: 72448 - DNA, 3968 bp, Zea Mays
gttacccgcgtctctagtctgtactttccaggccatcgtctccttccccttctttcaccggcctcgagtcacacgcgtgagatctgtgccttccgccgcggccacatgccacacaacgacgcccggcgagcttcaccgcgatagaggtaggcccgcccgataccaaggaggatggcggcagtgggcgttggtgcagcggacgagcggtgggcttcgttgtgcaactgcgtggtgaacttcttgctggaggagcggtatcacctcacggcgctagagctattgcaggagctccaggaggacggccgctccgcgcacgccctccgcctccgcgctttcttctccgacccagcgcttttcccgcccgatctcgtcgcccgctcatcctctgcgccgcccggtgctgatccacagattttgctagaagagaaaatagcagcagaagaaaagttggcactcacggagtatgatctgcgcctagccaaagaagacctttcacagttgaagcttgaattacaaaaacaaaaagaatcatctcctgatgattcaaatgggctccttttgggtgcttctatacgcgaaggatatactaggcaacaagaaaattgggatgtgaaaatttcagcattaggccctctaaaggataatgaacgaaaagatcttaattgcgctgtaaaagaatacttgcttttggcagggtatcgacttgctgttatgacattcattgaggaggttcctgatcaagaccttgatgtttggccaaacagttcagcttgtgttcctgatgcccttcgtcgttattactatcagtatctttcttctactgcagaggctgcagaggaaaaaatatccatacttcaggaaaatgaaacattactcaaggacaatgaacgactcaatgctgaaaatgattccttgatgaagagcagggaaggagctaatagtcaggttgccgctttaaggaagtctttggaagctgcacacaaggatataaaagacaaggaaaaaatgattcaagacttgaggcagtcactggatgtccagaggaaggagctgaatgactgcagagctgaaatcacagccctgaagatgtacatcgaagggactcaatcaatcaaacaattgtttgttggaactagtgatggtgtaaagtcgcattcctttgctaattctgtgggagcatcatcattgaataatgaagatgaagattcaaaaggatctgaagccataacaaataagctagcatcagcagtaaatattactgatgatacgcagaaagatcgccaagttctagaaagtagcgctgaaggttcctcagtttcagaaactccagtgtctttcacagctgttgagaatgacagctatggtacatcaaaagaagataaatctgtgtcaaatatctcatcgaataatgtatgttttcagagtaatctgcatggagcttccatgactggtaaaagccaggggagttcagatggcatatccatgtatttatctattgagaaactagagagcccaagtaaacaaaaatcttcagataagattgctttggagactataaagatagtttcagatgcacttccaaagattgttccttatgtgctcataaaccatcgtgaggaacttcttccattgatcatatgtgctatagaaaagcatccagatagcgatgtacgggattccttgactcatacattgtttaacctgataaaacggcctgatggagaacagagacgcatcataatggatgcttgtgtagaattagcaaagagcgttggtgagatgaggacagaaactgagttacttccacaatgttgggagcagataaaccaccaatatgaggagcgcagattgcttgttgctcagtcgtgcggtgaacttgccgtttatgtccgtccagagatacgagattccctcattttatccattgtgcaacaacttgtcgaagatgctgcaacagttgtaagggaagctgcaacacataacctggcattgcttcttcctatgtttccaaatctggacaaatattataaggttgaggagctaatgttccaattggtctgtgacccgtctggggcggttgtggaagttgcactcaaggaacttgttcctgctgtagtaagatggggagataaattggatcagatatcaagagtactattggctcatatcctggcatctgctcagcgatgtccacctatttcaggtgttgaagaaagctatacaaacttgcccctttgcatcagctgatccaacaagctctacaccagagaacttctcagcatcctgcctaaaatcatatgcaacaggtgactctgagtggtcagcatttgagtggatgcacactgattgcctgccagatttgatcaagcttgcctgcttgttgcctgtgaaagaagataacttaagaaccatcatcacaaagtacctcttggaagtatctggactctacggtaaagattatctggagcacattatgctacctgtatttcttgtagctgctggtgacattgatagtggcgattttacctattttcctctatcaatccagccaaaagtccgtggcttgcgtccgaaaacttcaactgctgaaaaacttgccatcatgtgtgtcttcccattattgttatctggtattttgggttctccttccagtcgtcaacagttggaagagtatctgagaaaagtacttatccaaaacaccaaggatggttcattttctatgcatcatactactgagatcattaacgcagttcggtttctttgcttatttgtggagcaccatagtgtcatctttaacattttgtgggagatggttgcgagctcggataccagcctgaaaataaatgctgcggctctactgagagcacttgtaccctacacggatgtgaaaatagcatcaactcatattttgccagcacttgttacccttggctctgatcaaaacttgaaagtaaaatatgccagtatagatgcatttggagctgttgctcagcatttcaaaaatgacatggttgttgacaaaatacgcattcaaatggatgcttttcttgaagatggatcacatgaagcttctgtttctgttattcgtgcacttgcagtagctgtacctcattcaacagataggctacgtgaatatcttttaaccaagatatttaagatgacatgcatcacacctgtcggcaatgatattgaacggcgtcgtgaaagagcaaatgtactctgtgaagcgctccgggctctggatgctacagatcttcctgctatgggtatacgtgatttgcttctgccatcaatacaaaatctgttaaaagatctggatgctctagaccctgcgcacaaggaggctttagaaatcataagccgggaaaggtcagggggtacgctggaaagcattagcaaggtaatgggggcgcatcttgggattgcatcatctgtcagcagtttctttggtgagaacagtctcctcacaaagaaagaaggtggcgaggaacatgatcctgctggccccaccgctcctgagcaaaacctgcaggctcagccagagagcacgaggtttggtcgcataatgaggagcggctttggagacatattgcgaggtcaaagcaaaggacagtgatgcacttagattgaaatgatcaattacatacatagctgccgataccacattctttgtttgtaagttgacagaatatacctcaagggttgtatgttatttgccgagataaaaaaaaaggatttgacgttgcaaatctagcatcaaacttcctgtatgtaagttgcctgtagttagctgctcatttataagatgctaataattgtgtctttgtttcatttgtttttataaataaaatatataactagatatgagacactttgcccatcttttctgaaatttggatgttatagttggctgacatcatgtaattgatctgctttggttgaaggaacggtgggttctgaactttgca

SEQ ID NO: 72449 - DNA, 4348 bp, Zea Mays
gtactttccaggccatcgtctccttccccttctttcaccggcctcgagtcacacgcgtgagatctgtgccttccgccgcggccacatgccacacaacgacgcccggcgagcttcaccgcgatagaggtaggcccgcccgataccaaggaggatggcggcagtgggcgttggtgcagcggacgagcggtgggcttcgttgtgcaactgcgtggtgaacttcttgctggaggagcggtatcacctcacggcgctagagctattgcaggagctccaggaggacggccgctccgcgcacgccctccgcctccgcgctttcttctccgacccagcgcttttcccgcccgatctcgtcgcccgctcatcctctgcgccgcccggtgctgatccacagattttgctagaagagaaaatagcagcagaagaaaagttggcactcacggagtatgatctgcgcctagccaaagaagacctttcacagttgaagcttgaattacaaaaacaaaaagaatcatctcctgatgattcaaatgggctccttttgggtgcttctatacgcgaaggatatactaggcaacaagaaaattgggatgtgaaaatttcagcattaggccctctaaaggataatgaacgaaaagatcttaattgcgctgtaaaagaatacttgcttttggcagggtatcgacttgctgttatgacattcattgaggaggttcctgatcaagaccttgatgtttggccaaacagttcagcttgtgttcctgatgcccttcgtcgttattactatcagtatctttcttctactgcagaggctgcagaggaaaaaatatccatacttcaggaaaatgaaacattactcaaggacaatgaacgactcaatgctgaaaatgattccttgatgaagagcagggaaggagctaatagtcaggttgccgctttaaggaagtctttggaagctgcacacaaggatataaaagacaaggaaaaaatgacttgaggcagtcactggatgtccagaggaaggagctgaatgactgcagagctgaaatcacagccctgaagatgtacatcgaagggactcaatcaatcaaacaattgtttgttggaactagtgatggtgtaaagtcgcattcctttgctaattctgtgggagcatcatcattgaataatgaagatgaagattcaaaaggatctgaagccataacaaataagctagcatcagcagtaaatattactgatgatacgcagaaagatcgccaagttctagaaagtagcgctgaaggttcctcagtttcagaaactccagtgtctttcacagctgttgagaatgacagctatggtacatcaaaagaagataaatctgtgtcaaatatctcatcgaataatgtatgttttcagagtaatctgcatggagcttccatgactggtaaaagccaggggagttcagatggcatatccatgtatttatctattgagaaactagagagcccaagtaaacaaaaatcttcagataagattgctttggagactataaagatagtttcagatgcacttccaaagattgttccttatgtgctcataaaccatcgtgaggaacttcttccattgatcatatgtgctatagaaaagcatccagatagcgatgtacgggattccttgactcatacattgtttaacctgataaaacggcctgatggagaacagagacgcatcataatggatgcactctagagctgctgctcctccaccaagattcaaaagagagatcatcctgcagcggacataactcctgcaaaccaccatctttgagaaattcaaaccagaattgcttggtgaaaacacaagaaaccaatagatgattaatattttcaggttcctgatcacacagcggcagcgttccggatgcgatagcccacgctttgcaagcctatcagttgtccaacacctgtcatgctccacatgcataacctttctcgtcatactgctttttttgtacttatacctgttttccttgtcatgtgcttgcaggcttgtgtagaattagcaaagagcgttggtgagatgaggacagaaactgagttacttccacaatgttgggagcagataaaccaccaatatgaggagcgcagattgcttgttgctcagtcgtgcggtgaacttgccgtttatgtccgtccagagatacgagattccctcattttatccattgtgcaacaacttgtcgaagatgctgcaacagttgtaagggaagctgcaacacataacctggcattgcttcttcctatgtttccaaatctggacaaatattataaggttgaggagctaatgttccaattggtctgtgacccgtctggggcggttgtggaagttgcactcaaggaacttgttcctgctgtagtaagatggggagataaattggatcagatatcaagagtactattggctcatatcctggcatctgctcagcgatgtccacctatttcaggtgttgaaggtacaatagactctcatcttcgtgttttaggagaacaagagcgctggaatattggtgtccttcttcggatgttgactgagttgcttccatttattcatcagaaagctatacaaacttgcccctttgcatcagctgatccaacaagctctacaccagagaacttctcagcatcctgcctaaaatcatatgcaacaggtgactctgagtggtcagcatttgagtggatgcacactgattgcctgccagatttgatcaagcttgcctgcttgttgcctgtgaaagaagataacttaagaaccatcatcacaaagtacctcttggaagtatctggactctacggtaaagattatctggagcacattatgctacctgtatttcttgtagctgctggtgacattgatagtggcgattttacctattttcctctatcaatccagccaaaagtccgtggcttgcgtccgaaaacttcaactgctgaaaaacttgccatcatgtgtgtcttcccattattgttatctggtattttgggttctccttccagtcgtcaacagttggaagagtatctgagaaaagtacttatccaaaacaccaaggatggttcattttctatgcatcatactactgagatcattaacgcagttcggtttctttgcttatttgtggagcaccatagtgtcatctttaacattttgtgggagatggttgcgagctcggataccagcctgaaaataaatgctgcggctctactgagagcacttgtaccctacacggatgtgaaaatagcatcaactcatattttgccagcacttgttacccttggctctgatcaaaacttgaaagtaaaatatgccagtatagatgcatttggagctgttgctcagcatttcaaaaatgacatggttgttgacaaaatacgcattcaaatggatgcttttcttgaagatggatcacatgaagcttctgtttctgttattcgtgcacttgcagtagctgtacctcattcaacagataggctacgtgaatatcttttaaccaagatatttaagatgacatgcatcacacctgtcggcaatgatattgaacggcgtcgtgaaagagcaaatgtactctgtgaagcgctccgggctctggatgctacagatcttcctgctatgggtatacgtgatttgcttctgccatcaatacaaaatctgttaaaagatctggatgctctagaccctgcgcacaaggaggctttagaaatcataagccgggaaaggtcagggggtacgctggaaagcattagcaaggtaatgggggcgcatcttgggattgcatcatctgtcagcagtttctttggtgagaacagtctcctcacaaagaaagaaggtggcgaggaacatgatcctgctggccccaccgctcctgagcaaaacctgcaggctcagccagagagcacgaggtttggtcgcataatgaggagcggctttggagacatattgcgaggtcaaagcaaaggacagtgatgcacttagattgaaatgatcaattacatacatagctgccgataccacattctttgtttgtaagttgacagaatatacctcaagggttgtatgttatttgccgagataaaaaaaaaggatttgacgttgcaaatctagcatcaaacttcctgtatgtaagttgcctgtagttagctgctcatttataagatgctaataattgtgtctttgtttcatttgtttttataaataaaatatataactagatatgagacactttgcccatcttttctgaaatttggatgttatagttggctgacatcatgtaattgatctgctttggttgaaggaacggtgggttctgaactttgca

SEQ ID NO: 72450 - DNA, 1828 bp, Zea Mays
actttccaggccatcgtctccttccccttctttcaccggcctcgagtcacacgcgtgagatctgtgccttccgccgcggccacatgccacacaacgacgcccggcgagcttcaccgcgatagaggtaggcccgcccgataccaaggaggatggcggcagtgggcgttggtgcagcggacgagcggtgggcttcgttgtgcaactgcgtggtgaacttcttgctggaggagcggtatcacctcacggcgctagagctattgcaggagctccaggaggacggccgctccgcgcacgccctccgcctccgcgctttcttctccgacccagcgcttttcccgcccgatctcgtcgcccgctcatcctctgcgccgcccggtgctgatccacagattttgctagaagagaaaatagcagcagaagaaaagttggcactcacggagtatgatctgcgcctagccaaagaagacctttcacagttgaagcttgaattacaaaaacaaaaagaatcatctcctgatgattcaaatgggctccttttgggtgcttctatacgcgaaggatatactaggcaacaagaaaattgggatgtgaaaatttcagcattaggccctctaaaggataatgaacgaaaagatcttaattgcgctgtaaaagaatacttgcttttggcagggtatcgacttgctgttatgacattcattgaggaggttcctgatcaagaccttgatgtttggccaaacagttcagcttgtgttcctgatgcccttcgtcgttattactatcagtatctttcttctactgcagaggctgcagaggaaaaaatatccatacttcaggaaaatgaaacattactcaaggacaatgaacgactcaatgctgaaaatgattccttgatgaagagcagggaaggagctaatagtcaggttgccgctttaaggaagtctttggaagctgcacacaaggatataaaagacaaggaaaaaatgattcaagacttgaggcagtcactggatgtccagaggaaggagctgaatgactgcagagctgaaatcacagccctgaagatgtacatcgaagggactcaatcaatcaaacaattgtttgttggaactagtgatggtgtaaagtcgcattcctttgctaattctgtgggagcatcatcattgaataatgaagatgaagattcaaaaggatctgaagccataacaaataagctagcatcagcagtaaatattactgatgatacgcagaaagatcgccaagttctagaaagtagcgctgaaggttcctcagtttcagaaactccagtgtctttcacagctgttgagaatgacagctatggtacatcaaaagaagataaatctgtgtcaaatatctcatcgaataatgtatgttttcagagtaatctgcatggagcttccatgactggtaaaagccaggggagttcagatggcatatccatgtatttatctattgagaaactagagagcccaagtaaacaaaaatcttcagataagattgctttggagactataaagatagtttcagatgcacttccaaagattgttccttatgtgctcataaaccatcgtgaggtttaattgtaaccttcgtagttcacatccatctttatttaagtataactaatgctaaatgattctacatggttacaggaacttcttccattgatcatatgtgctatagaaaagcatccagatagcgatgtacgggattccttgactcatacattgtttaacctgataaaacggcctgatggagaacagagacgcatcataatggatgcactctagagctgctgctcctccac

SEQ ID NO: 72451 - DNA, 340 bp, Zea Mays
gtcccataccagggtatggggctagttgcaaagtctcaaccacaacaggccagtcaacggtacggtccttaatcaacacagacgggtgaccatgtcagctcagcgtctggtctcgatttattcaaaccatttccccatttttggtacccgacacgggtactcttttcggatgatgaacccatccggagccctgatggactcatcgtcataagtttgctttcacctttgaatcaaaagcccataaccaatgttacacatcattcttttgaaaaacaaatgatttttgagtttctaagcaggactaagcagtaataattctttttataaaacagggatttag

SEQ ID NO: 72452 - DNA, 522 bp, Zea Mays
cccctaacactggtcttccagtttactatagcaacgatagtctaaaactattcagattggtcacaaaacacctccaaactgagtacccaacactgcaatttcaggtttccgttctgaataaaaattcagtccaactaacctgacagtccaagtttgcagtgggtgcatgaaactgctcgaggaagacataagttggctggtcgacgacgaaactaaacacggcgacgatttgcggtggcgtgactacattctggccactgtgaggtgaaggagccggtggctgtggtaactaaaagcagggagatagcgcgctatgcacaagggctgaccgagttggtggctgaggagacatgagcactagcgtgaccactgaaattccaacacttatgcagtggttttaagctaggacctgagggcaaggtgaagcttcactgaaaccaaccgatgtgcattgaacatgggcaggcatcactgcacatgtgggcagggacaaggaaactcgaccacacttggtgaacacga

SEQ ID NO: 72453 - DNA, 2563 bp, Zea Mays
gccccggctcggcaccgacagcaggccacgacgccgccgtgccaccgccccggctcgcgccaccgccctggctcggcaccaccgccccggctcggcaccgacagcgggtcgcgccgccgcccctgctcgccaaccccagcgggtgcaagaactgtgctaacgtgtgttctaaggtcttccaaatcgaggatgatttcggacgggcaagagtttacgaccaatcaggcagcacagaactgattcaagaagctattgacagttggcaagttcacgctgggagaaaagacaagccaaagtcctggagaaggtaagaaggcggatgagccaagatgattccagaaagggtggctcatggagtgacatctggggagcaccaacaagatacgagaagaacggtacatcccattactaaaggagacatttatgttcccacaaagcttgggcattttaggtggaaaacctggtacatcaacatacattgctggggtacaggatgatagggctctctacctagatccccatgaagttcagatggttgtgccattggagtccctgaacttggcagctgaagattcaggggagaaggataaagatgagaatggcgatgaagcgccatcgaaagtattggcaaatattaagtggcctgaaacactcgagactgattttatctacagtgctttatcatttgggacttcaattaatccacagttcattgcaagctttgcttctgctgctggtaaacgtcctcatcaagatttcgactctcaagaatctgatccagagtggggttggtggacagcaaaccatgagctgaagaagccatcaattagtctgttgtttccaacaatcatcctcctcagccgccgccatcaacagcagcagcagcgatgctaaatagtagtggtggatctggttctaactactctggtggcgagatcctacctccaccattttttatctttattatctgtgattctgcaatccacatgtttgattttttacttagtttctctttgagaccggtcgccatgtttggttagcacatctagaatgcattacaattggaggcaatagctgttcactatccactataacctgaaagcttagctgttcaactgagctttctgattcttccattttttcccattcaagtatatgatattcttgtgtgctattcaatattacaaataacaaatttgcatatgagaataattaagtaaatttggccacctaatcagtaggattgtttggttggaggaatttttgtagcatgtgaaacttgagctaattagaaagcaaccactaccttctcttcagcatgaaaaaatagcttagccatttcttagagttaagcccttagccacttgctggccttatcgtctggaagaagaaatggtactcaactgctggtctctttggcaaatttttctttgcacttttcttgttcgaactggcaatccacaaccaagtaccttgcttgcaccaacaaaagtcccttctactgtagggcaatccatggatttattgcttgtcctgaaatttgatagaggcattcatgatatcagttgctcgttaattccatttgtttcttgttctcttgtgcattgttatgacatatttgcaccttttgcggggaacgatcgaccaacaatggagtggcccactagattaaagatcgctctgggtgctgccaagggtttagctcatcttcatgaagactgtcatccaaagatcatccaccgcgacattaaggcatctaacattcttcttgacttcaaatttgaatataaggtatgctctgagtttttcttttctgttctagagttaatagctaactgtttttgttaactgaaaatgtatttatcacacaatgcttatataaaccacttgattaagttatattatgttaggacattttggcagtccactaattatatctggtttgatgttgttataaagtgatctctgctatctaatctattttggtggccgtaaagttttgcttgcttgaaatttgatcacattagttgaattttgtctataaccagatcagatgagaaattatacagccttcttgcttaaatgtacagaccaccgtttaattttttgaactttattttatctaacaattgtctctctacaggttgctgactttggacttgcaaagttcactactgataataacacccatgtttcaacaagagtaatgggaacctttgggtatttggcacctgagtatgcagcgtctggcaagctcacagaaaaatctgatgtattttctttcggagtcatgcttcttgagcttattactgggcggcgaccaattgacacaacccaattggcactgcttgctataagcacatatgtacttccatttgcatgttgtataatactaataccaattgcaaaattatagttattttttctacccttgttagttaataagcatatttctggtcaataggttgtattcttattcttgtaaccgtgttaattaatgttatggacttgtagtcttgtattaccttgtgaatatatctgtccctgcctgccatgtgaacgt

SEQ ID NO: 72454 - DNA, 2704 bp, Zea Mays
gccccggctcggcaccgacagcaggccacgacgccgccgtgccaccgccccggctcgcgccaccgccctggctcggcaccaccgccccggctcggcaccgacagcgggtcgcgccgccgcccctgctcgccaaccccagcggttcaaacattagctcgttttcactgctactgcattgggttctgcatagttcttccttggttgtttgatgtaaaccacagctggggagcttagctgtatagaactgatttcacgtgtttgttgacgagtttagctgcatagggtgcaagaactgtgctaacgtgtgttctaaggtcttccaaatcgaggatgatttcggacgggcaagagtttacgaccaatcaggcagcacagaactgattcaagaagctattgacagttggcaagttcacgctgggagaaaagacaagccaaagtcctggagaaggtaagaaggcggatgagccaagatgattccagaaagggtggctcatggagtgacatctggggagcaccaacaagatacgagaagaacggtacatcccattactaaaggagacatttatgttcccacaaagcttgggcattttaggtggaaaacctggtacatcaacatacattgctggggtacaggatgatagggctctctacctagatccccatgaagttcagatggttgtgccattggagtccctgaacttggcagctgaagattcaggggagaaggataaagatgagaatggcgatgaagcgccatcgaaagtattggcaaatattaagtggcctgaaacactcgagactgattttatctacagtgctttatcatttgggacttcaattaatccacagttcattgcaagctttgcttctgctgctggtaaacgtcctcatcaagatttcgactctcaagaatctgatccagagtggggttggtggacagcaaaccatgagctgaagaagccatcaattagtctgttgtttccaacaatcatcctcctcagccgccgccatcaacagcagcagcagcgatgctaaatagtagtggtggatctggttctaactactctggtggcgagatcctacctccaccattttttatctttattatctgtgattctgcaatccacatgtttgattttttacttagtttctctttgagaccggtcgccatgtttggttagcacatctagaatgcattacaattggaggcaatagctgttcactatccactataacctgaaagcttagctgttcaactgagctttctgattcttccattttttcccattcaagtatatgatattcttgtgtgctattcaatattacaaataacaaatttgcatatgagaataattaagtaaatttggccacctaatcagtaggattgtttggttggaggaatttttgtagcatgtgaaacttgagctaattagaaagcaaccactaccttctcttcagcatgaaaaaatagcttagccatttcttagagttaagcccttagccacttgctggccttatcgtctggaagaagaaatggtactcaactgctggtctctttggcaaatttttctttgcacttttcttgttcgaactggcaatccacaaccaagtaccttgcttgcaccaacaaaagtcccttctactgtagggcaatccatggatttattgcttgtcctgaaatttgatagaggcattcatgatatcagttgctcgttaattccatttgtttcttgttctcttgtgcattgttatgacatatttgcaccttttgcggggaacgatcgaccaacaatggagtggcccactagattaaagatcgctctgggtgctgccaagggtttagctcatcttcatgaagactgtcatccaaagatcatccaccgcgacattaaggcatctaacattcttcttgacttcaaatttgaatataaggtatgctctgagtttttcttttctgttctagagttaatagctaactgtttttgttaactgaaaatgtatttatcacacaatgcttatataaaccacttgattaagttatattatgttaggacattttggcagtccactaattatatctggtttgatgttgttataaagtgatctctgctatctaatctattttggtggccgtaaagttttgcttgcttgaaatttgatcacattagttgaattttgtctataaccagatcagatgagaaattatacagccttcttgcttaaatgtacagaccaccgtttaattttttgaactttattttatctaacaattgtctctctacaggttgctgactttggacttgcaaagttcactactgataataacacccatgtttcaacaagagtaatgggaacctttgggtatttggcacctgagtatgcagcgtctggcaagctcacagaaaaatctgatgtattttctttcggagtcatgcttcttgagcttattactgggcggcgaccaattgacacaacccaattggcactgcttgctataagcacatatgtacttccatttgcatgttgtataatactaataccaattgcaaaattatagttattttttctacccttgttagttaataagcatatttctggtcaataggttgtattcttattcttgtaaccgtgttaattaatgttatggacttgtagtcttgtattaccttgtgaatatatctgtccctgcctgccatgtgaacgt

SEQ ID NO: 72455 - DNA, 263 bp, Zea Mays
cctttctacaagactcatgcaacacatagagaaagaaagtactgcaaaatccggcagcacctcccttgaaagtagcataacaagggaagcatatagtttatacaggatataaaagaaagataattgccatagtataatcaaaatgcaacggtagaaaaaacattcatgaccagacaaaagatagacatctcagcccaccaaactaaacagttcaactaccatgaaagattagaatgtaataattccctagacttgacccttcc

SEQ ID NO: 72456 - DNA, 1381 bp, Zea Mays
cgatgtttgcatcctgcataaatgaaaaaagcttctttctatgtttatattcattaatttggaattttttgtgtatgcagcaagctggatcaccctgggttggcaaaactgatcgccgcacatgcacaccctccggcttacttgatgttctttgacttcttcgagcctccaaatcttgcagaaaagatacatgtcgaggaatggatcccttctatccagcaagtggttacgatggccagtgatctagcaaaggctctccaatacctacaaatccttggggtagtacacagagatataaaacctgcgaatattttgctagacaaagatctccatccatatctagcagattttggcttagccatgtttcaaaaggatattaagcgtgtctcagttgagaactggaaatcatctggcaagcctactggtggtttccataaaaagaatatggttgggacactaatttacatggcaccagaaattttgagaaaggatatacatacagaaaagtctgatgtgtatagctttgcaatatctatcaatgagcttcttactggtgtggtgccctatacagatctgagagcagaagcacaggcacacactgttcttgaaatgacatatactgaacaacaacttacagcagcaattgtttctcaaggattgcgtccagcacttgcccttcctgaatctggtgccccaccaactcttttgtcacttatccagcgttgctgggatcctgatcctgaaaagagaccatcatttgaagatataattgatgagctaaatatagttcaaaagcatatagtttcaaatgcttctgttccatcatctcctgtcagcaagactcaaaatggtaccatagaagtgcaccattatcaagaagcattgaactggttcaaccagggggagctttttgttaaaggatcaagtagatcagaccttaagaatctttggtctgattgttttgatcaatcttcagagtaccatccaacattaagttggggctcttttgcaacgtgtggtcgaagggaaaccatggaagacacccattttgtacttccccatgtgagcgaagaaaatgatgtttttgcctttggcatttttgatggccatagaggttcagcagccgctgaattttctgtccgagcagttcctggatttctcaagcaatttggtcagggtgcaagcccaactgacgctctttcagaagcgtttgtaaggactgacatagcatttcgagagaactaattctcaccggaagtcaaaaaggatattcaaaagattggcatcctggttgccacggcataacgcctgatagtgagaaaacaagcttttgtagcaaatgctgtggattgcgagcatccttgaccgtaagggcaaccat

SEQ ID NO: 72457 - DNA, 1253 bp, Zea Mays
gcagcaagctggatcaccctgggttggcaaaactgatcgccgcacatgcacaccctccggcttacttgatgttctttgacttcttcgagcctccaaatcttgcagaaaagatacatgtcgaggaatggatcccttctatccagcaagtggttacgatggccagtgatctagcaaaggctctccaatacctacaaatccttggggtagtacacagagatataaaacctgcgaatattttgctagacaaagatctccatccatatctagcagattttggcttagccatgtttcaaaaggatattaagcgtgtctcagttgagaactggaaatcatctggcaagcctactggtggtttccataaaaagaatatggttgggacactaatttacatggcaccagaaattttgagaaaggatatacatacagaaaagtctgatgtgtatagctttgcaatatctatcaagcacacactgttcttgaaatgacatatactgaacaacaacttacagcagcaattgtttctcaaggattgcgtccagcacttgcccttcctgaatctggtgccccaccaactcttttgtcacttatccagcgttgctgggatcctgatcctgaaaagagaccatcatttgaagatataattgatgagctaaatatagttcaaaagcatatagtttcaaatgcttctgttccatcatctcctgtcagcaagactcaaaatggtaccatagaagtgcaccattatcaagaagcattgaactggttcaaccagggggagctttttgttaaaggatcaagtagatcagaccttaagaatctttggtctgattgttttgatcaatcttcagagtaccatccaacattaagttggggctcttttgcaacgtgtggtcgaagggaaaccatggaagacacccattttgtacttccccatgtgagcgaagaaaatgatgtttttgcctttggcatttttgatggccatagaggttcagcagccgctgaattttctgtccgagcagttcctggatttctcaagcaatttggtcagggtgcaagcccaactgacgctctttcagaagcgtttgtaaggactgacatagcatttcgagagaactaattctcaccggaagtcaaaaaggatattcaaaagattggcatcctggttgccacggcataacgcctgatagtgagaaaacaagcttttgtagcaaatgctgtggattgcgagcatccttgaccgtaagggcaaccat

SEQ ID NO: 72458 - DNA, 1012 bp, Zea Mays
cagcaagctggatcaccctgggttggcaaaactgatcgccgcacatgcacaccctccggcttacttgatgttctttgacttcttcgagcctccaaatcttgcagaaaagatacatgtcgaggaatggatcccttctatccagcaagtggttacgatggccagtgatctagtgagcttcttactggtgtggtgccctatacagatctgagagcagaagcacaggcacacactgttcttgaaatgacatatactgaacaacaacttacagcagcaattgtttctcaaggattgcgtccagcacttgcccttcctgaatctggtgccccaccaactcttttgtcacttatccagcgttgctgggatcctgatcctgaaaagagaccatcatttgaagatataattgatgagctaaatatagttcaaaagcatatagtttcaaatgcttctgttccatcatctcctgtcagcaagactcaaaatggtaccatagaagtgcaccattatcaagaagcattgaactggttcaaccagggggagctttttgttaaaggatcaagtagatcagaccttaagaatctttggtctgattgttttgatcaatcttcagagtaccatccaacattaagttggggctcttttgcaacgtgtggtcgaagggaaaccatggaagacacccattttgtacttccccatgtgagcgaagaaaatgatgtttttgcctttggcatttttgatggccatagaggttcagcagccgctgaattttctgtccgagcagttcctggatttctcaagcaatttggtcagggtgcaagcccaactgacgctctttcagaagcgtttgtaaggactgacatagcatttcgagagaactaattctcaccggaagtcaaaaaggatattcaaaagattggcatcctggttgccacggcataacgcctgatagtgagaaaacaagcttttgtagcaaatgctgtggattgcgagcatccttgaccgtaagggcaaccat

SEQ ID NO: 72459 - DNA, 1175 bp, Zea Mays
cagcaagctggatcaccctgggttggcaaaactgatcgccgcacatgcacaccctccggcttacttgatgttctttgacttcttcgagcctccaaatcttgcagaaaagatacatgtcgaggaatggatcccttctatccagcaagtggttacgatggccagtgatctagcaaaggctctccaatacctacaaatccttggggtagtacacagagatataaaacctgcgaatattttgctagacaaagatctccatccatatctagcagattttggcttagccatgtttcaaaaggatattaagcgtgtctcagttgagaactggaaatcatctggcaagcctactggtggtttccataaaaagaatatggttgggacactaatttacatggcaccagaaattttgagaaaggatatacatacagaaaagtctgatgtgtatagctttgcaatatctatcaatgagcttcttactggtgtggtgccctatacagatctgagagcagaagcacagcgttgctgggatcctgatcctgaaaagagaccatcatttgaagatataattgatgagctaaatatagttcaaaagcatatagtttcaaatgcttctgttccatcatctcctgtcagcaagactcaaaatggtaccatagaagtgcaccattatcaagaagcattgaactggttcaaccagggggagctttttgttaaaggatcaagtagatcagaccttaagaatctttggtctgattgttttgatcaatcttcagagtaccatccaacattaagttggggctcttttgcaacgtgtggtcgaagggaaaccatggaagacacccattttgtacttccccatgtgagcgaagaaaatgatgtttttgcctttggcatttttgatggccatagaggttcagcagccgctgaattttctgtccgagcagttcctggatttctcaagcaatttggtcagggtgcaagcccaactgacgctctttcagaagcgtttgtaaggactgacatagcatttcgagagaactaattctcaccggaagtcaaaaaggatattcaaaagattggcatcctggttgccacggcataacgcctgatagtgagaaaacaagcttttgtagcaaatgctgtggattgcgagcatccttgaccgtaagggcaaccat

SEQ ID NO: 72460 - DNA, 1258 bp, Zea Mays
cagcaagctggatcaccctgggttggcaaaactgatcgccgcacatgcacaccctccggcttacttgatgttctttgacttcttcgagcctccaaatcttgcagaaaagatacatgtcgaggaatggatcccttctatccagcaagtggttacgatggccagtgatctagcaaaggctctccaatacctacaaatccttggggtagtacacagagatataaaacctgcgaatattttgctagacaaagatctccatccatatctagcagattttggcttagccatgtttcaaaaggatattaagcgtgtctcagttgagaactggaaatcatctggcaagcctactggtggtttccataaaaagaatatggttgggacactaatttacatggcaccagaaattttgagaaaggatatacatacagaaaagtctgatgtgtatagctttgcaatatctatcaatgagcttcttactggtgtggtgccctatacagatctgagagcagaagcacagcagcaattgtttctcaaggattgcgtccagcacttgcccttcctgaatctggtgccccaccaactcttttgtcacttatccagcgttgctgggatcctgatcctgaaaagagaccatcatttgaagatataattgatgagctaaatatagttcaaaagcatatagtttcaaatgcttctgttccatcatctcctgtcagcaagactcaaaatggtaccatagaagtgcaccattatcaagaagcattgaactggttcaaccagggggagctttttgttaaaggatcaagtagatcagaccttaagaatctttggtctgattgttttgatcaatcttcagagtaccatccaacattaagttggggctcttttgcaacgtgtggtcgaagggaaaccatggaagacacccattttgtacttccccatgtgagcgaagaaaatgatgtttttgcctttggcatttttgatggccatagaggttcagcagccgctgaattttctgtccgagcagttcctggatttctcaagcaatttggtcagggtgcaagcccaactgacgctctttcagaagcgtttgtaaggactgacatagcatttcgagagaactaattctcaccggaagtcaaaaaggatattcaaaagattggcatcctggttgccacggcataacgcctgatagtgagaaaacaagcttttgtagcaaatgctgtggattgcgagcatccttgaccgtaagggcaaccat

SEQ ID NO: 72461 - DNA, 1240 bp, Zea Mays
cagcaagctggatcaccctgggttggcaaaactgatcgccgcacatgcacaccctccggcttacttgatgttctttgacttcttcgagcctccaaatcttgcagaaaagatacatgtcgaggaatggatcccttctatccagcaagtggttacgatggccagtgatctagcaaaggctctccaatacctacaaatccttggggtagtacacagagatataaaacctgcgaatattttgctagacaaagatctccatccatatctagcagattttggcttagccatgtttcaaaaggatattaagcgtgtctcagttgagaactggaaatcatctggcaagcctactggtggtttccataaaaagaatatggttgggacactaatttacatggcaccagaaattttgagaaaggatatacatacagaaaagtctgatgtgtatagctttgcaatatctatcaatgagcttcttactggtgtggtgccctatacagatctgagagcagaagcacaggattgcgtccagcacttgcccttcctgaatctggtgccccaccaactcttttgtcacttatccagcgttgctgggatcctgatcctgaaaagagaccatcatttgaagatataattgatgagctaaatatagttcaaaagcatatagtttcaaatgcttctgttccatcatctcctgtcagcaagactcaaaatggtaccatagaagtgcaccattatcaagaagcattgaactggttcaaccagggggagctttttgttaaaggatcaagtagatcagaccttaagaatctttggtctgattgttttgatcaatcttcagagtaccatccaacattaagttggggctcttttgcaacgtgtggtcgaagggaaaccatggaagacacccattttgtacttccccatgtgagcgaagaaaatgatgtttttgcctttggcatttttgatggccatagaggttcagcagccgctgaattttctgtccgagcagttcctggatttctcaagcaatttggtcagggtgcaagcccaactgacgctctttcagaagcgtttgtaaggactgacatagcatttcgagagaactaattctcaccggaagtcaaaaaggatattcaaaagattggcatcctggttgccacggcataacgcctgatagtgagaaaacaagcttttgtagcaaatgctgtggattgcgagcatccttgaccgtaagggcaaccat

SEQ ID NO: 72462 - DNA, 781 bp, Zea Mays
cagcaagctggatcaccctgggttggcaaaactgatcgccgcacatgcacaccctccggcttacttgatgttctttgacttcttcgagcctccaaatcttgcagaaaagatacatgtcgaggaatggatcccttctatccagcaagtggttacgatggccagtgatctagcaaaggctctccaatacctacaaatccttggggtagtacacagagatataaaacctgcgaatattttgctagacaaagatctccatccatatctagcagattttggcttagccatgtttcaaaaggatattaagcgtgtctcagttgagaactggaaatcatctggcaagcctactggtggtttccataaaaagaatatggttgggacactaatttacatggcaccagaaattttgagaaaggatatacatacagaaaagtctgatgtgtatagctttgcaatatctatcaatgagcttcttactggtgtggtgccctatacagatctgagagcagaagcacaggttcagcagccgctgaattttctgtccgagcagttcctggatttctcaagcaatttggtcagggtgcaagcccaactgacgctctttcagaagcgtttgtaaggactgacatagcatttcgagagaactaattctcaccggaagtcaaaaaggatattcaaaagattggcatcctggttgccacggcataacgcctgatagtgagaaaacaagcttttgtagcaaatgctgtggattgcgagcatccttgaccgtaagggcaaccat

SEQ ID NO: 72463 - DNA, 892 bp, Zea Mays
aagctggatcaccctgggttggcaaaactgatcgccgcacatgcacaccctccggcttacttgatgttctttgacttcttcgagcctccaaatcttgcagaaaagatacatgtcgaggaatggatcccttctatccagcaagtggttacgatggccagtgatctaggattgcgtccagcacttgcccttcctgaatctggtgccccaccaactcttttgtcacttatccagcgttgctgggatcctgatcctgaaaagagaccatcatttgaagatataattgatgagctaaatatagttcaaaagcatatagtttcaaatgcttctgttccatcatctcctgtcagcaagactcaaaatggtaccatagaagtgcaccattatcaagaagcattgaactggttcaaccagggggagctttttgttaaaggatcaagtagatcagaccttaagaatctttggtctgattgttttgatcaatcttcagagtaccatccaacattaagttggggctcttttgcaacgtgtggtcgaagggaaaccatggaagacacccattttgtacttccccatgtgagcgaagaaaatgatgtttttgcctttggcatttttgatggccatagaggttcagcagccgctgaattttctgtccgagcagttcctggatttctcaagcaatttggtcagggtgcaagcccaactgacgctctttcagaagcgtttgtaaggactgacatagcatttcgagagaactaattctcaccggaagtcaaaaaggatattcaaaagattggcatcctggttgccacggcataacgcctgatagtgagaaaacaagcttttgtagcaaatgctgtggattgcgagcatccttgaccgtaagggcaaccat

SEQ ID NO: 72464 - DNA, 938 bp, Zea Mays
cataccattttgcacgatatctttgcagcaaaggctctccaatacctacaaatccttggggtagtacacagagatataaaacctgcgaatattttgtgagcttcttactggtgtggtgccctatacagatctgagagcagaagcacaggcacacactgttcttgaaatgacatatactgaacaacaacttacagcagcaattgtttctcaaggattgcgtccagcacttgcccttcctgaatctggtgccccaccaactcttttgtcacttatccagcgttgctgggatcctgatcctgaaaagagaccatcatttgaagatataattgatgagctaaatatagttcaaaagcatatagtttcaaatgcttctgttccatcatctcctgtcagcaagactcaaaatggtaccatagaagtgcaccattatcaagaagcattgaactggttcaaccagggggagctttttgttaaaggatcaagtagatcagaccttaagaatctttggtctgattgttttgatcaatcttcagagtaccatccaacattaagttggggctcttttgcaacgtgtggtcgaagggaaaccatggaagacacccattttgtacttccccatgtgagcgaagaaaatgatgtttttgcctttggcatttttgatggccatagaggttcagcagccgctgaattttctgtccgagcagttcctggatttctcaagcaatttggtcagggtgcaagcccaactgacgctctttcagaagcgtttgtaaggactgacatagcatttcgagagaactaattctcaccggaagtcaaaaaggatattcaaaagattggcatcctggttgccacggcataacgcctgatagtgagaaaacaagcttttgtagcaaatgctgtggattgcgagcatccttgaccgtaagggcaaccat

SEQ ID NO: 72465 - DNA, 892 bp, Zea Mays
cataccattttgcacgatatctttgcagcaaaggctctccaatacctacaaatccttggggtagtacacagagatataaaacctgcgaatattttgtgagcttcttactggtgtggtgccctatacagatctgagagcagaagcacagcagcaattgtttctcaaggattgcgtccagcacttgcccttcctgaatctggtgccccaccaactcttttgtcacttatccagcgttgctgggatcctgatcctgaaaagagaccatcatttgaagatataattgatgagctaaatatagttcaaaagcatatagtttcaaatgcttctgttccatcatctcctgtcagcaagactcaaaatggtaccatagaagtgcaccattatcaagaagcattgaactggttcaaccagggggagctttttgttaaaggatcaagtagatcagaccttaagaatctttggtctgattgttttgatcaatcttcagagtaccatccaacattaagttggggctcttttgcaacgtgtggtcgaagggaaaccatggaagacacccattttgtacttccccatgtgagcgaagaaaatgatgtttttgcctttggcatttttgatggccatagaggttcagcagccgctgaattttctgtccgagcagttcctggatttctcaagcaatttggtcagggtgcaagcccaactgacgctctttcagaagcgtttgtaaggactgacatagcatttcgagagaactaattctcaccggaagtcaaaaaggatattcaaaagattggcatcctggttgccacggcataacgcctgatagtgagaaaacaagcttttgtagcaaatgctgtggattgcgagcatccttgaccgtaagggcaaccat

SEQ ID NO: 72466 - DNA, 625 bp, Zea Mays
ggacaagtacatcgacctggaagtttgaccagagacaggatttcgggaaagcctatcagcgaacctgaaaattaggagagactagattgacttagtgccagctcagatccagcaacatggattattctccagctgaaatcagactaatataatataatataatatttgttggatggggaccatgtttagtgccttgcgtccaagaaaaccaaagcgtttgagccgtaccaaaagacagcaatatcttgcaagaaagtgacacccaataaaaaaaagctacctgcgtctttattgaccacccatatgtgtaaaaacgaggttgcttctagtatgtctttggcaaagtctattgaagcaaacattttcaaaatgaacatgtgattgcttgcaggttatccgaacattagatatatacagactttttgtaagcagtatttaattgaagaacttatctatgacgtgtaaagatgaagttgctttaatgtgcagctgctacaacgttaccaaatggttataaagttaagagaaagagatgagagagcgagaacaaatgggcaggttatcgaaccttgttttttttcccttttggcatgctcatgtatgtgtgattagtaagggcagcttg

SEQ ID NO: 72467 - DNA, 810 bp, Zea Mays
cacatctcatgaagccggcgacgacggcgacaggagggacgaggtcaggtgagcccgcccgctccacgcttccatctagcctaggcgtgtgcttgattgaattgtttgcggccatggacgaggttcctagagaaggatcacgaatttctgtcgcaacaaccatggattttgggtctagccacacaattcgttctgtcacggtgcactttctttttcttactctctacgttttttatttattacgatttagttcaaaataaactaaagaataataaatattcgaaaacatgtagtattataaaacacacaagactggtccggcgagcacccgacattcaagactcaacaatcgaattttaagttccaatggtcgagatgatgtggcgctgatgtgttagggcattatggtgcaccagactcgttcgatgccacctcacattctctttagaacgatcattaaaacggtagtctaacaacaattcggtgttgcaccggaccaaacattatttgtggtccggtggacccaaaatgaatttaattttttggagaaaaaaggtcccaaaggctatttaggtggtcaggggctataaatacaccctcaaccagcccattcaatacaaaagacttgtgcaataactgcaatacactatcctcccaagtgacacaaaaagtgtgaattgagcatagagatagcaattcgcatgtgttttgtgatagagccttgagtgagagttgaatagaagagtgtgtattatgctcttgagtcttggtgcaaggcacctgtaaggaaaatagatcttagcccatttg

SEQ ID NO: 72468 - DNA, 785 bp, Zea Mays
taaaaaacacaataaaacatcactaaaaatctaaaaaacatgcaccagacttgatcatctaatatccgataaagtttaacttaaatatcatctaatatccatcaaagttaatctatccatcatcccacacataagatcatctccattcacacgtacaaatagataatataacatagaaacagagtacaagtcccttcattataaactttgacactagactaaattgagtttgactccttttttacaagcttcatgtggagtgtcgttccatcttccttttccatgtcagcttcatatgttgcttccacttaacactctacaccttgctgccgtagaggagggggagacgccatgggagggctgccaaggtgagggaggagcatgggagggctcggtcgccagctccatgggaggaggctgctgctgcatggggagctagagagagagatagagagagaggaagggagtagggaaagtggcatggggagagggagggagaggaaatggctggatggggaggtggcgtgggggatttaaaggagaagaaaaggggctggtttgattgcttagaagagaagcaaggggttgcttacaagagaagcaaaggttgcttagatgacaagcaaaatatgaagcaaagtaaattatttaaagggagaaaaatctctcgcgggatttgccggtgcggagaacagggagaaccggcgtctggcgaacgagagtccgaggaaagagaaaaatagttagtccaagaatttaatttttcagtgtcgctcgaaaaattg

SEQ ID NO: 72469 - DNA, 599 bp, Zea Mays
gatcatctaatatccgataaagtttaacttaaatatcatctaatatccatcaaagttaatctatccatcatcccacacataagatcatctccattcacacgtacaaatagataatataacatagaaacagagtacaagtcccttcattataaactttgacactagactaaattgagtttgactccttttttacaagcttcatgtggagtgtcgttccatcttccttttccatgtcagcttcatatgttgcttccacttaacactctacaccttgctgtcgtagaggagggggagacgccatgggagcgctgccaaggtgagggaggagcatgggagggttcggtcgccagctccatgggaggaggctgctgctgcatggggagctagagagagagagatagagagagagagaggaagggagtagggagagtggcatggggagagggagggagaggaaatggctggatggggaggtggcgtggggatttaaaggagaagaaaaggggctggtttgattgcttagaagtgaagcaaggggttgcttacaagaaaagcaaaggttgtttagatgacaagcaaattatgttgctttggagaag

SEQ ID NO: 72470 - DNA, 2081 bp, Zea Mays
acacagcaagcagtttgtaaaattcataactcctaaattgtaacacaagaaagataagaaaagcatctacaacttccttataacgaccacgaacagattgtaacattaacttgagcaaacaatgcagtttctgaaatctgtacagaatttggacagattcagttactgaatttgtgaaaagcataacttttaaacgatcagacttatgactgtcaaattttaacacaagtaagataataaagttatatacaactttcttgtgaccaccaataactgatttcaacattaacttaagaaaccactggaatctctgaaatctgttcagaaattcgacagattcaggtgctggacttatgaaaagcataactcctaaacgatcaggtttatggctgtcaaattttagtgcaagcaagataataaggttatctacaactcttctatatgacttttctatagaaaacatgatttagttcttcaaacatacaacacgagaaaatcactgtgggcagtccaaaacaacaactaataattttcagcttctatttacttcaaaaatcgtcgcgttctagagacttgaattattctaacacttaccatttgttagagttaaaacaatcaaatggggaccaacaagtcacttacaaatttcatccgagttatttcgtgcgctagagttaccacacaattaacaaacacatgcaccaaaacaaagtattttggcacacatatccaacatcactcaaaattatgatgaagtactaatatttaactttagaccatcatgacataaccatttaacctctaattggttttaaggtgtaactcaagcattccatgaaacatgcatgattttgtttactcctaatttttcactaactcttgtaattataaaagggtgttattttagcaccatataaaactatctaatttggtgctagaatttttatgaggtataggtaataacaaatgatgactaatgtataaatttcacatactcaggttttatattttatttactacaaaaataacaaattgttaatgcaataaagcatgtgagagcaagttaaatctaaaactaattattttttgtggatgcatgaccatattaagttttcttaggctactataatatcatgcaagcagtgtaacaccattttccatttttgcatctatacattatttttaaatcatttaaaactacttaaggtgcattaaacaagttaaatcactaacctaatcatccatgcacaacaattcatgaaatttgcacccgtcatcaagcatcacaccaagagtctactgtaaaaatctcaacccatttggagcactagagctacagatccaaaaacaacaagcatatacttcttcttttctctatttaaattgttttaattaacacaccaagaaactagtgaacaacatataagttttatatttttcttagatggagtatgacatcatctaactaataaaacaagtttcatcatttttagatttttataaataaaactatgtagagaagcaagttcgtttattctctaaacctctttttaagatttaatttgcacagacaaaaacgtctactaaaacaggtcatattataaatctaataggtagggcatttcatatggaagctaacgaaataagtcttactattttaggagctcccaaactcgagttatagattttagaagaaagtgcaagaatctgaaatttcagtacacaagttcttgacccggagctcacctacaccttgctgtcgtagaggagggggagacgccatgggagcgctgccaaggtgagggaggagcatgggagggttcggtcgccagctccatgggaggaggctgctgctgcatggggagctagagagagagagatagagagagagagaggaagggagtagggagagtggcatggggagagggagggagaggaaatggctggatggggaggtggcgtggggatttaaaggagaagaaaaggggctggtttgattgcttagaagtgaagcaaggggttgcttacaagaaaagcaaaggttgtttagatgacaagcaaattatgttgctttggagaag

SEQ ID NO: 72471 - DNA, 1375 bp, Zea Mays
ctcgtcgcggcaccatgagttgttagccataataccattaccaaaagcaaccaatgagaaatccacatagcacagatagatggagcccatgagagtttggctcagaaaataagaatgtgatcggagttgaagcagagactgctgtcaaaagagcatcacatgagaattttctttaactcagagaactattttatgatcatcacggggattatcagccaaagattgatatgatatttaatatgaggaggaaccaaccatgacatcaagattgatgagcttttagagacatgagagaaccaaggacaacaatcaaatccattgaaccaaatggatatgccatttagagataagttgataaaacaagcatcatgaccctcggagaagggggtatgagaatgaccagaaatgagacattttaagcaaatcaacatccgatacttgtggacggcttatagcagataaccagataatagggcagaataattaaaggatccagagattcagatgataaagccagcatgattcaccaggaaaaaggattaccggatccaggtgaaaggagaggtaggcaacaagatcagctgaatgatcaacaggaatgctatgaagttttaggggcaaggatttatggaaagaaacatggccttgatagggtttgtgcaactagacaccaacaacaattttttttgacacaacaagtgcataaggagacttgggttgttctagcagtcaagttatgggagtttacaagttgtgcaggtgcaactttaaggttaaaactcaagggctagaaaataccaacacaagcaggatttttttaaaagaggtttcacttgctaaactcaaggttgtttgggtggggtctttttatgaggaaacaaacaacatttttttgcaaaaagggttgaacaatttcaataccacctagatagcaaggcaagagaaacacataacacaacctaacaagacttaccaatctgacacgaggtaaggcatttctaacatagcagtacatcacattattcacaagttcttattattggaataaaggtgcgagaagcatgttgatgcacaaaagacaattataatgcgacaatcatgatgcatgctcattctagtcgtcttctcagacctagttaattttttggatgcttttacagcatccttattaatagtagtagtagcctttatggcctaaataactagccacctagctacccatctattcctagggcttcacgtcctatgtctatccttatcgtcctgacgatctatccaactttggtttctaagcaagttttactttagaaaaggttggtaatcatgacttattgacttctctgtaatggtattcgctccgataccagctgtggcg

SEQ ID NO: 72472 - DNA, 2212 bp, Zea Mays
tttaatgcagcggaaataactaacggagaaaaccgagtaacatggtgaagcctggccacactactcctcctggtcctctcctgcggtagcaataacccactcggctgtctatcccggtggcagggatggaggccaagtcacaccacaaccaattatcctaaggagtatctgcaaaaattatgccacaagcaaggttgagtatactaatactcagctagacttacccgatgtgaggagtctactcctctacctctagacatgcagctgtttggctaaggggtttggtttgccaaaagcactagctgagtctacaatcaaattttagcttttaatgttttagtgtgactctcttaagactaattgtgtacctagctaatcatacatggtatcaaacatttatcaatcaacatcttttgccaagtcaacacatttccgcttgttactcaatgtagtagcatggatcaagcagtctcattagctgcgagaagcagacgattcgaatcgagttttaaccttgcaaggtaaacctaaaaacacgacgtggcgaggcactccgtcccaacagacatcaatcgtccccatcgactccctcgcaacagaacagggctcaccgccttggcgtacaatgcctcactgaccccgactgccgtcgtgcagtgaccgcacttgtacccaccataaccggaatgggagaccacgtctcaagtcgcgtgaggggtcaagtctgcgggcaggtttacttaggtactaggtttaccgatttaccatatttctcggcatgtgcttagtacgttcaaacacttgacacacggtaccacaccttaatccttattccaatttccgtcttgtagacaacacatccccatggaccgttgtcaacagaccatcatcattccgatataaaatggatacaatcaattcctgacctcgcgcgagtgttagaaaaatcactcgacttctaccgagatccctagttagcaaagcagctactcgacctagcatactagtatccatctcaaaaaggaatcctgagttcatgcaactagggtttcaggcaactcctacacttaagtgtacagtataaacctacaatcattaagtgcactaaaatagcatatataacggttatgcataaaaccggggcttgcttttaatttaacacttagatagtgtttactgggggtactcgcttggcgagcatccactggttaggtacattcttcaggtcgtccaccaactgcatcttgtgggtggcaccacatcacttgcacgctcatcctctctcggtcctaaatgaggtgcaagatgcatatgtatgaatataatgaaatagcacaagatactttaagtacatgttagcgaattaaacactaagtagcgagacatcataagcaaccacacacactagcgttagctactacatatcattgagcgcacaacattaacaccactaaaatacgacaaacattttgtatatttacgcaacacaaatacaacctcataagtacgatcatttatttaatttgctacggcttttcattagttcttctatttatcacacaaaagcatactaagcacaagttcaacagaggagggattcctatccacaaccaactactcaagcaagcacattaattatggagcgcatgttaacctaagtttagacattacaagtctatgtatgttaagtgctaactaagcatttttagctaaatgggtgaactcaaccatcaaatgggcgcttgcagatttttggacaacagtacagcagttacttgttttaatcataacttttcaaatattaatccaaaaatagcaaactaggattttctggaaagtttaaaaagtgctctacaactttggtattgtcatcacaacatcattcaatacgtagcaaggtcaaaacgtgctaatacaacagctctatccaaatttggacagattcaggcttgcaacttcaaaaattcacaactaaagattcagacatccaaacaaagtgatcttagactttctggaaagctaattaaatgttctacaaattatttataaacatctcaaggtgattgaatatttaactaaggataaaatacactagaagacgttgctgtccaaaactggacagattcagacttcacacttcaaacgcatgtaacttaatcttcagaccaccaaaaagagtgatccaagactttttggaaagcttagaaaaagc

SEQ ID NO: 72473 - DNA, 1068 bp, Zea Mays
tggacacctaaccctttggccttcgttgcggacccgctactcaccgcttctcttgaccgcatctcttctctgcgccgccgctcgcctgcacttctacgtgtgaaacgcgtccgcgcctatggcctgcccgtgcccagctgccccctctccacgcgagcctctctaggcgtcaagcgtgccattaagcaaccgtggcccccacccctcctcggctctctgcgtgagcacaagcacgtctctgtagcccatgttcaacggaagcgaaaggaaacaggtcacccatcacattcgtcatgtgcaattctctcatgccgtgcagcccattaattccactgaagaaaacatagaatgtgcatcataatgtcacagaaggcctaaaatgttatagtgtgcggccattgctcacgaggaggcagagtgccgtgttgccgagtgccactggaccacatacgattgttgatggtaaagaagttgtgaactttgcatcagcaaagtacctcggtttaattggcaacgaaaagattattgattcttgcatcagttcattggagaagtatggtgttggttcttgtggtccacgtggcttttatggaacaattgatgtccatcttgactgtgagtcaaagatagctaaatttttggggactccagactccattctttattcatatgggatttctacaatattcagtgtgatacctgccttctgtaagaaagaagatatcatagtcgctgacgagggtgttgactgtttggtgaaatgcttgggacatgacggccagcaacaatggagtctgggaacaacgataggaggggtgcggcagcggcacccgatgtatcccttgaacaatctggttttgattgatgcagatcaatctgatgtacactgtattccgcacttgcactgattgtttggttaattacaagattatctcagtgttttggtttggatttagagtacacttatgtatgaaatattgattggtactcatctatattatattattattaaatatatgtgtgtgtatttctctttcaaattattataatgtggtatctcaaatgaat

SEQ ID NO: 72474 - DNA, 1128 bp, Zea Mays
tggacacctaaccctttggccttcgttgcggacccgctactcaccgcttctcttgaccgcatctcttctctgcgccgccgctcgcctgcacttctacgtgtgaaacgcgtccgcgcctatggcctgcccgtgcccagctgccccctctccacgcgagcctctctaggcgtcaagcgtgccattaagcaaccgtggcccccacccctcctcggctctctgcgtgagcacaagcacgtctctgtagcccatgttcaacggaagcgaaaggtgtcagtgctagaggatttggaaaggcgctgtttgataagaagacaaacccgtgtcctggaaacaggtcacccatcacattcgtcatgtgcaattctctcatgccgtgcagcccattaattccactgaagaaaacatagaatgtgcatcataatgtcacagaaggcctaaaatgttatagtgtgcggccattgctcacgaggaggcagagtgccgtgttgccgagtgccactggaccacatacgattgttgatggtaaagaagttgtgaactttgcatcagcaaagtacctcggtttaattggcaacgaaaagattattgattcttgcatcagttcattggagaagtatggtgttggttcttgtggtccacgtggcttttatggaacaattgatgtccatcttgactgtgagtcaaagatagctaaatttttggggactccagactccattctttattcatatgggatttctacaatattcagtgtgatacctgccttctgtaagaaagaagatatcatagtcgctgacgagggtgttgactgtttggtgaaatgcttgggacatgacggccagcaacaatggagtctgggaacaacgataggaggggtgcggcagcggcacccgatgtatcccttgaacaatctggttttgattgatgcagatcaatctgatgtacactgtattccgcacttgcactgattgtttggttaattacaagattatctcagtgttttggtttggatttagagtacacttatgtatgaaatattgattggtactcatctatattatattattattaaatatatgtgtgtgtatttctctttcaaattattataatgtggtatctcaaatgaat

SEQ ID NO: 72475 - DNA, 1168 bp, Zea Mays
ctttggccttcgttgcggacccgctactcaccgcttctcttgaccgcatctcttctctgcgccgccgctcgcctgcacttctacgtgtgaaacgcgtccgcgcctatggcctgcccgtgcccagctgccccctctccacgcgagcctctctaggcgtcaagcgtgccattaagcaaccgtggcccccacccctcctcggctctctgcgtgagcacaagcacgtctctgtagcccatgttcaacggaagcgaaaggaaacaggtcacccatcacattcgtcatgtgcaattctctcatgccgtgcagcccattaattccactgaagaaaacatagaatgtgcatcataatgtcacagaaggcctaaaatgttatagtgtgcggccattgctcacgaggaggcagagtgccgtgttgccgaggtttgcactacagcttggtttctgatggagttgtaccagattttttttgttcaaactagcagttgacgcattgttggaactttagcagtctataaaggattttttttcttaaatgccactggaccacatacgattgttgatggtaaagaagttgtgaactttgcatcagcaaagtacctcggtttaattggcaacgaaaagattattgattcttgcatcagttcattggagaagtatggtgttggttcttgtggtccacgtggcttttatggaacaattgatgtccatcttgactgtgagtcaaagatagctaaatttttggggactccagactccattctttattcatatgggatttctacaatattcagtgtgatacctgccttctgtaagaaagaagatatcatagtcgctgacgagggtgttgactgtttggtgaaatgcttgggacatgacggccagcaacaatggagtctgggaacaacgataggaggggtgcggcagcggcacccgatgtatcccttgaacaatctggttttgattgatgcagatcaatctgatgtacactgtattccgcacttgcactgattgtttggttaattacaagattatctcagtgttttggtttggatttagagtacacttatgtatgaaatattgattggtactcatctatattatattattattaaatatatgtgtgtgtatttctctttcaaattattataatgtggtatctcaaatgaat

SEQ ID NO: 72476 - DNA, 1273 bp, Zea Mays
gacccgctactcaccgcttctcttgaccgcatctcttctctgcgccgccgctcgcctgcacttctacgtgtgaaacgcgtccgcgcctatggcctgcccgtgcccagctgccccctctccacgcgagcctctctaggcgtcaagcgtgccattaagcaaccgtggcccccacccctcctcggctctctgcgtgagcacaagcacgtctctgtagcccatgttcaacggaagcgaaaggaaacaggtcacccatcacattcgtcatgtgcaattctctcatgccgtgcagcccattaattccactgaagaaaacatagaatgtgcatcataatgtcacagaaggcctaaaatgttatagtgtgcggccattgctcacgaggaggcagagtgccgtgttgccgagtgccactggaccacatacgattgttgatggtaaagaagttgtgaactttgcatcagcaaagtacctcggtttaattggcaacgaaaagattattgattcttgcatcagttcattggagaagtatggtgttggttcttgtggtccacgtggcttttatggaacaattgatgtccatcttgactgtgagtcaaagatagctaaatttttggggactccagactccattctttattcatatgggatttctacaatattcagtgtgatacctgccttctgtaagaaagaagatatcatagtcgcgtaagttcacctaagttcaccgtattaaaaaaattatgaaattcacaagtattattggaaccttgacttgtttggtgtatcgaggtctgcatgcttggccttttagacataatatggatttatccagctcaactttaggctttagcacaacattgttatctctttcttgtgtctattgatgagttgtttttcctctgtcagttaactgtacataggtagtttgatgtgattgcagtgacgagggtgttgactgtttggtgaaatgcttgggacatgacggccagcaacaatggagtctgggaacaacgataggaggggtgcggcagcggcacccgatgtatcccttgaacaatctggttttgattgatgcagatcaatctgatgtacactgtattccgcacttgcactgattgtttggttaattacaagattatctcagtgttttggtttggatttagagtacacttatgtatgaaatattgattggtactcatctatattatattattattaaatatatgtgtgtgtatttctctttcaaattattataatgtggtatctcaaatgaat

SEQ ID NO: 72477 - DNA, 1209 bp, Zea Mays
cccgctactcaccgcttctcttgaccgcatctcttctctgcgccgccgctcgcctgcacttctacgtgtgaaacgcgtccgcgcctatggcctgcccgtgcccagctgccccctctccacgcgagcctctctaggcgtcaagcgtgccattaagcaaccgtggcccccacccctcctcggctctctgcgtgagcacaagcacgtctctgtagcccatgttcaacggaagcgaaaggtgtcagtgctagaggatttggaaaggcgctgtttgataagaagacaaacccgtgtcctggaaacaggtcacccatcacattcgtcatgtgcaattctctcatgccgtgcagcccattaattccactgaagaaaacatagaatgtgcatcataatgtcacagaaggcctaaaatgttatagtgtgcggccattgctcacgaggaggcagagtgccgtgttgccgaggtttgcactacagcttggtttctgatggagttgtaccagattttttttgttcaaactagcagttgacgcattgttggaactttagcagtctataaaggattttttttcttaaatgccactggaccacatacgattgttgatggtaaagaagttgtgaactttgcatcagcaaagtacctcggtttaattggcaacgaaaagattattgattcttgcatcagttcattggagaagtatggtgttggttcttgtggtccacgtggcttttatggaacaattgatgtccatcttgactgtgagtcaaagatagctaaatttttggggactccagactccattctttattcatatgggatttctacaatattcagtgtgatacctgccttctgtaagaaagaagatatcatagtcgctgacgagggtgttgactgtttggtgaaatgcttgggacatgacggccagcaacaatggagtctgggaacaacgataggaggggtgcggcagcggcacccgatgtatcccttgaacaatctggttttgattgatgcagatcaatctgatgtacactgtattccgcacttgcactgattgtttggttaattacaagattatctcagtgttttggtttggatttagagtacacttatgtatgaaatattgattggtactcatctatattatattattattaaatatatgtgtgtgtatttctctttcaaattattataatgtggtatctcaaatgaat

SEQ ID NO: 72478 - DNA, 2264 bp, Zea Mays
gccaaaataattcgggtgacgtggacgttcctgggagcagttttccctgctgctttcataataaggaaaaccgatgtggacagtatcatcagaacccggtgggcctgttcagcctcctccacgaacccagcccacggccgcctctgcactagcacgatcacattacccatgtcgaaggctctgtcgcgcattccgtcgagcacattaacctcgctcctcccccgctccctcaacccccacgtcgccgtcgtcgacctcatcgccatccacctcaccgccgtcacggacgacgccaagcccgtaaacttcacctatctgctcccctatctcggccacgacgagctcactgctgtcgttctgcgcgcaggccactcccaaccgctccgaaccctccgtttcctcctcgcactcccgccaccgctccagccctcgcctccccaccttgcattccttgcgcactcgctcgcctcctcccgcctcttttcccacgcgctcgacgcgctctctcacctcatccgcctccacccgcggcacgacctgctgcccacgctgctcctcgcgtccgccaccgcgccgcacccttccctcccgggcctccttgtcaaggctctccttcgccacgcgcgcctccgggacgcgttccgctccgccctccgcgctacggccgccggcgcgccccccgacgccgctgccttcaacgcgctcctcgccgcgctctcccgcgcgaaccggttcgatgagctctgggccgcgcgcggcgccatggcgcgcgccggggtgcggcctgacgcccgtacgttcaacatcctcgtcgccgcgctgtgccgcggcgaggacgctgagcgcgcgtatgggtttctcgaggagctggaggagcaagggttcgagccggacgtcgtgacgtacaataccctccttgcgggctactgccgcaaggggaggctgcaggacgcgctgcacttgtttgacgtaatgccgcacaggcgcgtgccgcctgatttggtctctcacaccatcttgatggacgggctgtgcaaggcctggaggctgaaggatgctcgtcggatgtttgacaggatggtacatggggggttgcgccctgacgctgttgcttatagtgttctgatcacagggtactgcaacgagggacaactaaaggaagcgaggtcgctgctgatggagatggctgggagtgggctcttggacatagctttcgctctcagggttgtcgttcagggtcatgtaaaatttggaaagctacttacctgcttgaacatggtggcaccactaaggaaatatggtatcgtcatcccatcacagagttatagctgcttgattggtgcattgtgtgaggatatgcgccctaatgctgcgaggggcttgctgcagtggatgatagaggacgggcactgtcctagtttgcagatgtacaatatgattgtggattgcttctgtcgatgtgataatccaaaggaggctttggatgtgaaggttgagatgacctctagggaagtgaaaccgaactataacacttaccagacactcataatctgcctttgcagattgggaaagagcttgtcaggtcagtcagtaatggtggagatgattgagtccgatttccatccaaatgaggccatttgtactgccttggtttgtggcttctgcaaggaaggcgaccttgatagaggagaactaattgtgaagttgttcgcgctcgattttcagatccgctgtaatgagagctacactgcattgatgaggacttactgcgagactaggagcacagcagactcactagcactgcaggaccggatgttagagctgggttttgttccaaacagtgagacttgtcgatctattatctatggactttctagaagctctggttgagttgctgtcttgctaacatctgttacagaaggcaccagcttgaatcttattcttgaattatctacattattgcttaatgtgcgtgtatgatgcacccatttcccatagtgacggtgttccaaggccagactggagacaacattgcattctggtctgacataggatggaggtcaaagctgagtggttacccccattatcaaattctattagcaaatggcgcacaggacaaatcaattcctggtttctgacgaagcataatcaacactgagatgattttgacctgaggctccattttggagcccaatcttgtttttcctcctcatttcttcaacagagtactagtactacagtagttgagatccaatcaaatcaag

SEQ ID NO: 72479 - DNA, 265 bp, Zea Mays
aagaaccgtgaaattttgtttcattgccatagtggaaattgcagctgcaatgcgtgagggatggttgtcgggggtgtttccctgactatatatgccttaagatatttccatgaggaggcaatcaatccctgacatcatgcctcatcattgggtaagaatagtacttgttttattatatttatctttcatactctagaactgttgagctcaggtatgagtactccttttttggacaggagagaggatactactctacaactttcac

SEQ ID NO: 72480 - DNA, 1883 bp, Zea Mays
ccggtgcttggacgccatcgagctgttggtttggggaggtgtggctgttcacgcgtgaacaatagccgtggtgaacagtaatgttgatgaaccttagtaaccgggaaatgggaacttggccatgttcctcgttccgggaacgttcgttctgttctaggaacgtgggaacaatctcgttccagtagtgttaaatcctagttttagtagtgtatcgcgtatcacgttctcgttcctcgatcccatcgatccaggaacctggttactaagtgatgaacagtatcatcggtgaacaatatcgtgggtgaacagtgcacgtggtgaatagtaatactgataaacagcatcgccaatgaatagtatctcggatgaacagcacacggatgaacaatatatgagttgggggagcactggcaagatggggctatatatatggctgagatagcagcctcaaactctatccaagactaacaacctgatcctaacaaactctatccgatccaacaaactctattagatctaacaaactaagcaaattaacaaacggcggtatgggatgccagccataacaccaatgttgaaacaaaaccttgtagctagccaattatacttataccaattaataagttagagctaatgccaaaaaagaagaaataaaatcagtaagcatacaacttgcaacagggctgtggctgtgctgcttggtggaactgactcaacaccacaattttcctccaactcaaaataatattgaagatatgttagtttataaagtaataagttacaccatctctgtcagatttccagcttcacataagcacagtatatacaaaaaatatcacaatgatcatggtagaatactatattattgccatgatactccctacgatttagcaaaaattagaagatgcaataaagtgacttgctgtttgtttcaatttaacatgaacctaagaatgtaaattcaggtcccagctaaaaatataaagaaactagtcaaatgcacgtacattgctgcagcttctatatataagtagattttgtgtaaataaaacacaaaaatgtatgtgtcctgttggtaaggtgactgtgaatatgaagtcaacaaccaaggttcaaatcactagtgcacaattttaccttatttttgcataaaacaaggatatgtttagaccgcgggttaaattagaaagaagcataaggacttttttgtaaaagagacgatggtgaaaacccaaaaaaactggtgctttatattagtagagatagagattatcttaattttgcataaaacgagaaggagatgtttggaccgtgggccatgaaaccagaaaaattggtgctttataatagtagagaaggtaacaaattacaggttgttggcgcctttttggagcgtcaaatgctcaacaagaaccgtggtggtgccctctgcacaggggcggacggtccgcgacctagggccggacggtccgcggcctggtgcgaggcgcggcggtgctctctgcacaggggcggacggtccgcgcgcagggggccggacggtccgcggcctggtgcaaggctagggctcctgcctgacggccggacagtccgcaccctggggccggacggtccgcgcgtgcgcaggggcggcggaagatcgccggcggcgcctggatctcgctcccgggagggaccccgtcggggaggagagatcctaagagttgtctagactcggaccggccgacctagactcctctaatcggcgtagagtcgaagagaggcgaagaatttggggatcgagaggctaaactagaactagactaaaactactcctaattgtactagaaataaatgcgaaataaaagttgtattgattcgattgatgattccaaatcggccgt

SEQ ID NO: 72481 - DNA, 1047 bp, Zea Mays
gatctggcgagccactgtagcctacgctaccactgtagctgctttagggctcaccgttgcatgagatagcgtcgtaccgtggccgcttaacaaaggggagggggaggtcgcggcagccgttgaaagcgagcagctcaacaccatgtcgactcccgcgcttgcgactgctgccgagggagcgacgcgcatcatcctggtgcacggcacgggccacggcgggtggtgctggtaccgggtcgccacgctgctccgcgccgcgggacaccgcgtggacgcgccggacctcgcggcgtcgggcatcgactcgcggcagctccgcgacgtgcccaccttcgaggactacacgcggccgctgctcgacgcactccgggcgctcccgccgggagagagggcggtcctggtgggccacagcttcggcggcatgagcatcgcgctcgccgcggagacgttcccggagaaggtggcggccgccgtgtttgtcaccgcgttcctgccggactgcaccaacccgcgctcgcaggtcatcgagaaggtagtagcacgtgtacgcttgttgctgttggtctttcagtttagctaacggaagagctgaccctgatgccgacatgaatggtctcccctgttccggccggccggccggccgtcactaccgtcgaaggttaccgtgtcagactggatggacaccgtcacggatgcagagcacgttccagcctcggtgttcctggggcctgaatttctgcgccacaagctctaccagctgagcccaccggaggactacacgctgtcccagagcctggcccgggtgagctcctactacgtgcccgacctgcagagccagacgccgttcagcgaggccaggtacggcgcggtgagcaaggtgtacgtggtctgcaagcaggatcaggccatgaccgaggcgtaccagcacacgatgatcgccgcctgccccgtggcggaggttctcttggagttgctcttatatggtaaaatacccaaggacatgttcattcggagataatgaccaacaatcaacgaagctacacgctt

SEQ ID NO: 72482 - DNA, 5600 bp, Zea Mays
ccagcattctcttctccctgtcaacctacgagtcaatgaactattcatcacaaccaaaattatatcaaaaagggaacagttattacaaactaaggaaaaaagctaaaaactggatactcccaaaaaatacattacattttatagtgatgtagagtagttaaaacaagaatgaaacaagaaaacaaaaactaaggaacatgagttacagaaaatgactgcaatataaagaattactcaatattatggtacacaaactctctacatcaatgatcaaatattcaaagcctacacagaccaaaaggcttcttcggttatgggtggattgaagttcaaaattgaatagaaggggatttagggggtgtttgaatacactaaaactaatagttagctactagaattagccgagacatccaaacagtctagctaatagtttagctattagctacttttagtaaattagctactagttagctagctatttgttagctagctaattcaattagaaatatttagtcaactaactattagctctagtgtatttaaacacccacttaggccccgtttcaatgtcacgggataaactttagcttcctgctaaactttagctatatgaattgaaatgctaaagtttagcttcaattacccccattagctctcctgtttatattacaaatggctaaaagtagctaaaaaaagctgctaaagtttatctcgcgagattggaacatggccttaatctgcaaccgaacaaggcctaaatgaagaaatattatctagagagcaactgaatgcacgagaatccatgacagcaatggataaagaatatactgtgctttgaaattaaatatcgcttgcaatccactaaacttgtgtgcatgcacctagcgaagaactcaatacactatcctcatctacacattgatttttgcatgatcgtttctttgataatccatactatgcagtttcaaggagtaaaaaagttgaacacaaatggcaaacataatattcatgtcatgaccaaactgcattgcagaaaattcattacacacaaaaatctgcacaactaacaccaactggaagtcacaaagttatcaccaaccaaacactaggtgcgtttggttgcaatgacatgatgagacggccctcaaataaggttgtttggttcagggtcaagggttgggacaaaactatcccagtgttgtcccagttatccctcaaaattggatagacgagaaagaacgtcaggggacgtccctgtcctggctgtcccacaaccaaacgcaccatggtacacacacacgaacacagtgtggtttgatggctggaattacttacttttctgattttttcccctcatagctttaaacagtgctgacagccaggctgtgatagtgtgatagcttcttaatcaatgcaaaacattacccaaataatcagcttattactcctattacttcatgctgaaatctagcttaacgccacgaacgtagacactagcatgtatctagacacgtaggtattatttccaacaccacaaaaacccttccattttacaaatatattcactgacaacctagcatgcaagaattaacagttaggactggacaaaaaaaagatatacccgaacaaaatttcgggtagatagtccaaatagccgattttatttcaagaaattcaggtactaatccaaaatactaatattatgcaaaataacttaaagcctgcaaccaccagcagcccaatcagaaatctaggacatgcaaacacaaggcccatacatatatcgtgagaactaataagcaaaaaaaatctaccatgggtgacaactgacaagtgccaacctcctgagctgcagaccacagtgcaacatgcaccttctccttcacgagtaacctaccaccacgggcaaactaccaggccgccgccgtgcagtcgctctccttgatggctaccgctgttggtgtttcccgtccagatccagctgccttctacttcgatattacagcgcttggctccagcattccacaagaatcatggcaacaaccagatcctgctcccgccttccccagttccagcttcagcataggctccaaggcagctgtcacctccagcaacaagagttggtgattcagctctcgacagcacggtaatagtatccgccagcaggactggaaggggtgagacacaccgccgacagctgggtattttgggataacccagacctaaacccgatattatgggtacccaaaatttcaggatctataagttcgggtaattctctggtagtagttttgagaaactgcatttctaaatacccgaattagcgaaagggtctctagctaaggtggttaagtggtctgagtagcactcctcaggtcctaagttcgactccctatggaagcgaatttcaggttgtggttacaaaaattaccttgtttgtctcacgccaaagcacaggtctaagacccggtcacatgggctatggtgccactgtgtatggataccacagaggttcaggggttttctcgacctacgtgaggtcttcttattcgtaatataatgcctaagaactgtcttatagccgcaaatcgagtttttaaataccgaattacccaactcgaaattttgagtatacctgattgcccagtcctattagcagtagtgctcatctcaggtacaattaatttgaggcagtttttattggaacaagaggaagaaagggcgaatgggcggatgatgattgctagatgtctagcattgcaaaacagtctattaatctcttaacgaaatacaatagaattacattatttattgttttcaacataaattgagatgttacattctttgtaaaagaaacatatagctcctcggtttggtcatttaggtacagcaatgatttttctttggatttgggctaagctataaggctaatttaatttaagacagaggcttgtacaagcaggcaaataattgaatcatgatatcaatctccaacaacatactaaaatccttcagctttgaaatttgaaagcttgtgaaacaataaaactggcagaaatgcagtgccttgttacatatttattagactatatatcaactaatcaaacgatcggcatgtgtctcaactcgctaccatataatacatggaccctcataacattagtaccattgaagttctttattcggtcttcttaactatccaaaaactgactagtttataggccaaatttgtaagattgccagtgacatgccatccaataacagttgaagggaagagagttgtttggaaaattggagaagaatttatctaagcaaacaaggctgcaatatgccttgaacatcttatgatgcttcagcaaatcccaggtgttagtgacatgttggtgcatggtaagacttttaaagtcagataagtggaaaacaatcctctatcgaagttgcaagaatagaagataaacaaccagaacaaagggtttaaataacatccagcatgtaaatataattccaatgaggtggtaacagcgtaacacgtcataagctccccatgattatgctattaattcccagacacagaaatgatggagtatttgttagggcggtggctagggttgagagagcgcgggggagggggcgaccgcgggccttgccaacagtcgagcaaaagagaagggttttcttttttttaattctttaattcttgattgattatattgatatgtgttctctccttatacagagaggcttatttgtccctaaaggctagtttgggagccataaaaccggaggggaatgaaggggctaaaatcccctccttattcaattttgaataaggaggggattttagcccctccaatccctccggtatttggactcccaaattaacccaaaggaaatattctgaccaaaacaatcgaatttatctcttttttatcccaagtaaccaattactaccttatcctaactaaccgaatcaatctaacttattctttcattatcctaacaactccacttgccataacgctccactccttcaagacagctcgtcctagactgtgctggtggtcatggctgcagataccgatgttcccatggcgacggagtgacatgtgtacaaccacctgcatcccatggcataatctggcgggtgtcgatacctaagaatggtcagcctacaaggaatcacatgccctctcctagccagatggttgcttgtccacaccacaccaggacgtctttaatgccaaggtgccctaggggtcgaaagagttgcctccggagccagaagaagagtgacctaaggagttggaatagatgtgccgcaagggccaaaacagatgccctgagaggcccagccctgagagctagcgcaagaagtggctcgaggaccagaacaaatgcaccaggactgaggcgccagaggccaacacaagtgccccgagggccagggcaccagtgatcggcacacgaagggcctcgaagaccaaatgccttgagggccaaaacagatgtcgcaagggccagaacatatgccctgagggtcgaggcgccaggggtcgacgcatgaagtcccccggggtggaacaggtgccctgagggccaaaacaggtgccccaacaagtgaacgctgcctaaagaggaactactcgcgatagttgagccaattcaggggtccttaccaccgtaagtgaaggataggaatgttgttgtcccataccccgtcatctcgtagggaaagccgtaggatatacacccgccaatgaggacacccgatggctccctacgttggccaatcgtgagaggacagcaatctaatgcaccttgaggtaggtcagttgttggatgacctaggagagggcctttgttatgtcgtcaaggacggatggtggcaccccctgtggtgccagcgacatgacccgctatgccggtggaaaagaagtattggcgtccatcgcagcaatagcgtcggaacataagatctccgataccaaatgttattgcagcggctagagttgagggagcacaagggggccaaccaacgacaaagcaagagggttttcttcataattcttgtttgattagattcttacttgattagattgatacatcttctctccatatatagagagactaacttgacctctacggaaatatcctaattgaatcgatctaacttatctctttccttatcccaactaaccaaatcttttcttatcctaactaaccaaatcaatctaacttattctttccttatcctaacggctccacttgccataacagtattattgtacagagagatattagtatctgcagaactgcagtggttcatcaaaatgagaaatcaattcccaggcacaggaattgtatatctcccacaacttagaacaatatattcaaccttaaatgcacataatgaaacatatagatcagatgtttgcatatcagctcagtaaagatgacatcactagaagcttgcagaataacttttggttctttgtatgccacacaaggtgatagctgtaagagcaaactattgcaacttactattacttcctctgatcatacatataagtccatctaagtttaccctaagtcaaactatg

SEQ ID NO: 72483 - DNA, 1733 bp, Zea Mays
ctgccagctgataaacatcaatcatacagattgaaacgagcaaacgaggacacatgcagtggttacaccttttcccaatttacaaggtgttccgtcatttgcagcaatattgctgacctaggctcctagcattttgtgctgttgtacgcatatgcagctgcaagtggcccctgttgccctgtctcttgctctctattggtgtctggcaggggcagatgattacaccacatgtggggagatgagatgagccccactatcatctgaaaagtctgatggtgaatctttagaagccagcaatgccaggggagatggaagttgatgtttgctgtgtgctgaagagataaccttctttggttgagacgtgaggcagtttccaagtaaccagtcacaatcttccacgtcgcctccctcttggttagaaccctccttataatacataaaaacagacaccttcttcattccagttcaataattgagtagctaatagctgttaagatctaaaaccagccatccgtcttctgggaagaagagacctgagagacctttactcccatggttcagatgtctttgcagaggagcatagccgtatatcctcgttgctccttatctgattcgttccatcgtgtgggtggttcacgaagaagatgggcctcttgtaggtcccagtcatcacgttttgcttataatgcaagaccatccccaattgttctcaagaccgaccatgcaattgatccccctgaaccaaaggatttggatgcaagttcctcagcttcaagaagtggaccttacattgggacttgccatccatcaggcgcagtcggagtgatgggtgcgtcttcctcttcctgcctcagatttttagagaaatttgtgagttggagcactggaggtggagaagaggcacctccgttcatcatctgcaatgacccgcttgtcaagaaagagctgttgccatctggaacccaatccacttctggctgcagtgccagtattgctcttgggaagttaaggcagaagaggctcttcttggagcaatctggagcatgctgtattgttatgccatgccagttcttacatgcctggcatgatgagatttcgcagggttgctcggttccgttcatccatgttggtgattgcgttgtgaaggaactcaaagctgctaacttgaaacctgttgagtatggaagtaatgtccgtgtgggagttctcttcactgacaataaattggctacaaactgttacctagacaagttggagagccagggttttgaggtgctatgtccagataaggcttccatggagcgtacagtgttaccatcagtggctgcattcgggaagggggacatggaaggtgcgagaaacctgttgcgagtgtcgctgcaggttcttcttgtgagagctgtcaattcgataatccttgcgtccgatgaccttgtaggcattttgcctgatgatgaccctcttctcaagaaatgtatagacccactggatgccctggtccgagaggccatcgcatgcgcccgagcaccacagccatgatttgccgccctagctagattactctgtttacaccttggctgctctgctgatgagcacatatgtaaataagttttacacaaggtagaaaaagacggatattggttgaactcattacgcattttcatctatgttagcccatgtaatgttcggatactagttaaaaaatactaaatatagtctaattacaacactaa

SEQ ID NO: 72484 - DNA, 1463 bp, Zea Mays
aagtctgatggtgaatctttagaagccagcaatgccaggggagatggaagttgatgtttgctgtgtgctgaagagataaccttctttggttgagacgtgaggcagtttccaagtaaccagtcacaatcttccacgtcgcctccctcttgccatccgtcttctgggaagaagaggtatagtctcccgatcctagttctgcctctccagttgcatccttcgtcactcactctccctacatcctgtcacgagactggtgttcagacctgagagacctttactcccatggttcagatgtctttgcagaggagcatagccgtatatcctcgttgctccttatctgattcgttccatcgtgtgggtggttcacgaagaagatgggcctcttgtaggtcccagtcatcacgttttgcttataatgcaagaccatccccaattgttctcaagaccgaccatgcaattgatccccctgaaccaaaggatttggatgcaagttcctcagcttcaagaagtggaccttacattgggacttgccatccatcaggcgcagtcggagtgatgggtgcgtcttcctcttcctgcctcagatttttagagaaatttgtgagttggagcactggaggtggagaagaggcacctccgttcatcatctgcaatgacccgcttgtcaagaaagagctgttgccatctggaacccaatccacttctggctgcagtgccagtattgctcttgggaagttaaggcagaagaggctcttcttggagcaatctggagcatgctgtattgttatgccatgccagttcttacatgcctggcatgatgagatttcgcagggttgctcggttccgttcatccatgttggtgattgcgttgtgaaggaactcaaagctgctaacttgaaacctgttgagtatggaagtaatgtccgtgtgggagttctcttcactgacaataaattggctacaaactgttacctagacaagttggagagccagggttttgaggtgctatgtccagataaggcttccatggagcgtacagtgttaccatcagtggctgcattcgggaagggggacatggaaggtgcgagaaacctgttgcgagtgtcgctgcaggttcttcttgtgagagctgtcaattcgataatccttgcgtccgatgaccttgtaggcattttgcctgatgatgaccctcttctcaagaaatgtatagacccactggatgccctggtccgagaggccatcgcatgcgcccgagcaccacagccatgatttgccgccctagctagattactctgtttacaccttggctgctctgctgatgagcacatatgtaaataagttttacacaaggtagaaaaagacggatattggttgaactcattacgcattttcatctatgttagcccatgtaatgttcggatactagttaaaaaatactaaatatagtctaattacaacactaa

SEQ ID NO: 72485 - DNA, 2415 bp, Zea Mays
ctccttctctctttccggtggcgaagcaccgctctcgccctagtggtcgcttgaactcagcggtggttgcggcgtgcaagttgtattggccctcgactcttgctgtcggcccgccgctgcttcttgttttttttttctatccttcgttccgtctctttccgttgtttcttcgagtaccgctgttggtaacgcgtgaccaatttgtgcttgcagagtctcggtatatagatcacgcacgagtgaaagcccataatagggctcgactttagatagtctgttgaagaagatatggattgcaaaccgtgtctatttagaatctattttgggttttaagttggatttggatcctctgttggacttagtctgagatacagtttccgtccgtggtctgcgagcgagagcaggaggcggccacgcaagctccacgaagggaacgaaaccgacgccgagcccgagacggcgagccgttgcttcgcgacacctcgctcgcttctcttccaggcttccacctccacttccacatggccgctcccatccacgcgcgtctcctcccgctccccttgcacccgaacccaagccccagtctccacgcgagcggcacacgacgggtgccctggcccccgcgccaccgccgccgctgcttcgcgacgccgccgtcgcggaacgggagctcctcctcgccggagatcgactggtgcccggtgccgccggaccagctccccgtgaacgagtacgaggcgcttgcggcctccctgcccttctcctgggcggcggggggcctccgcgtctactgctcccgcctcgcgctcacgggcgccgccgtcgcgctcttcgtcgggctcccggtcgccgccttcgggggccgcggcggggccggcggcgacgctctgcacctcgcgctcggtgccacggggtccgggatcctcgccgtcacgctcgctgtcgtgcggatgtacctcgggtgggcctacgtcggcaaccgcctgctcagcgccacagtggagtatgaggagacgggatggtatgatggtcaggtgagatgtttctgttgatcccgtcctttcttgtacttgatcctaattttctaataaatttctagattgaactgtagtacttagaggtactccgtgtcactcaggtagaacggggatcatttctagaggctagagctgacttgctgcttggttaggccttgaaatgttttggtgatacaaacaattggacaaaaggaatatgatctagaaaactacggggaatcatccaaccattgatacacacttagtgccaccaaaacagatactgaaaatgtgcccctatggtcctatgggccccgtgtgcatccatcgttggatacttggatgcatacgaggaagcatgtgagcaggaaagagaaatattgagggcacctctctccggctgtacacggatcccatggggatatgtccttagggcaaaattaacattcacccactgaaaaaacttctgcggctgttttctgttgctttatctttatcaagcctgacattattgatattcatgccatagaaaaacgtgaggtgttaatctaccgctgtttcatattatagcaagtgcttccttgtaaattaagcattgatgtagaattgctgagttattttagtccttgtaagttgttgtaacatgcagacagctgtctcgaaaaggaggagaaaaacatgtacacacatccttatggtgcttctgtaaatttgttttactagtgttagtcaagatggtttgtggttttccgcttcgtttgatcttattcttgataagtacttgtattcttcttaataaaaatttgtatgcatggaattcattatacttggctcatcacaccagggttaacttttggtgctaaaatcatttcttacctttggcagatatgggttaaaactccagaagttttagctcgtgatcggcttctaggctcattttctgtcaagcctgtgctaaacagggtgaagttcaccttggtgggtctggcaggctccctgatcctttgcattcttctgtacgtgaacacggaaaccccaaaggaaccttatggaaatacaggtggaaggtctatcccgggagtgtacagcgacgctgctgcaaggtcgtttgagcccgatgcattctgtggagaacctgatttgtcgtagcatcgtaaagcgtggagcatggaaggtttgtagatggcagtatatatggtctcacagggtatatacgggggtttctgtacggggtttttaatccatcaaactagggtaatgtaaatatttggccacacccacactagtatcgatattttagacgcaagcctcttatgaaaatttatgctgacgggccacggtgaagtgaaagggggtcacgcctgtttccgaagagcggagccgggtgcatagcatatgt

SEQ ID NO: 72486 - DNA, 1173 bp, Zea Mays
gtttccgtccgtggtctgcgagcgagagcaggaggcggccacgcaagctccacgaagggaacgaaaccgacgccgagcccgagacggcgagccgttgcttcgcgacacctcgctcgcttctcttccaggcttccacctccacttccacatggccgctcccatccacgcgcgtctcctcccgctccccttgcacccgaacccaagccccagtctccacgcgagcggcacacgacgggtgccctggcccccgcgccaccgccgccgctgcttcgcgacgccgccgtcgcggaacgggagctcctcctcgccggagatcgactggtgcccggtgccgccggaccagctccccgtgaacgagtacgaggcgcttgcggcctccctgcccttctcctgggcggcggggggcctccgcgtctactgctcccgcctcgcgctcacgggcgccgccgtcgcgctcttcgtcgggctcccggtcgccgccttcgggggccgcggcggggccggcggcgacgctctgcacctcgcgctcggtgccacggggtccgggatcctcgccgtcacgctcgctgtcgtgcggatgtacctcgggtgggcctacgtcggcaaccgcctgctcagcgccacagtggagtatgaggagacgggatggtatgatggtcagatgggttaaaactccagaagttttagctcgtgatcggcttctaggctcattttctgtcaagcctgtgctaaacagggtgaagttcaccttggtgggtctggcaggctccctgatcctttgcattcttctgtacgtgaacacggaaaccccaaaggaaccttatggaaatacaggtggaaggtctatcccgggagtgtacagcgacgctgctgcaaggtcgtttgagcccgatgcattctgtggagaacctgatttgtcgtagcatcgtaaagcgtggagcatggaaggtttgtagatggcagtatatatggtctcacagggtatatacgggggtttctgtacggggtttttaatccatcaaactagggtaatgtaaatatttggccacacccacactagtatcgatattttagacgcaagcctcttatgaaaatttatgctgacgggccacggtgaagtgaaagggggtcacgcctgtttccgaagagcggagccgggtgcatagcatatgt

SEQ ID NO: 72487 - DNA, 3025 bp, Zea Mays
cctttggtcgaagcagtagcgcggcatccaaatgaccccctgccgtccgtccgctttggtcgtcagccgtcgcgcctcacctccccggcaaagcaggtcgccactaggaccgcgaggaggctctggctcgctgcccgatatattgattaattaatcgcccgttaattgcccgctaatcctctgccggccgctgccgcctcgctttttctcgcttaaataattgcctagtcaagctgatccagctcggcgggctgcgggcggacttggggagacagacaaacatacagagagagagagaggggcagaggcagcccgggatccgatcgggcggtcgatgctacggccggtggcgggcgtcgtcggggcatggctagccaggctgcgcggcgaggaggcgcgatgagaccaccgagcagcggcgtgcgcacggcggccgcgcggccgccggccgcctcgttcctgctggccacggcggccacggcggcgctcgtcggagggttctacttctggttggtggtctcgtcgttccggctccccgactcgggcgccgtcgggtgccgccccgacggcgaggggtcgtgggcggtcggcatgttctacggcagcagccccctcgcgctccgtcccatcgagctgggaggagcaatggcaacagctcggcgtggccggtggcgaaccccgtcctgacctgcgggactgcgacggaggcggggtacccgagcaactttgtcgccgacccgttcctctacgtcgagggggacacactatttattttctttgaaacaaaaacaacaacctcaatgcaaggtgatattggagttgcaagaagcttcgaccaaggtgcaacgtgggaatttcttggcattgcactagatgaggcatggcatctgtcatatccttttgtgttcaagtatgagaacgagatttatatgatgccagagggaaacaagaagaaggagctgcgcctttatcgtgctactaagtttcccctcgaatggacattggagaaggttcttgtcaataagccacttattgatgcctcgttagtccaatttgagggatactggtggctatttgcatctgattttacacggtatggtgttgagaagaatgcggagcttgagatttggtacagcaattctcctcttggtccttggactgagcacaagaaaaatcctatctacaaatcagacaaaagtttgggagctcgaaatggtgggagactcttcatttttgaagggtcattatatcgccccggccaggattgcagtggtacttatggccggatggttaagttgcacaaggttgaaaagctaagcaaggaggaatacaaagaggtccctgtaaatcttgggatagaggagccaaagaaagggagaaatgcatggaatggcatgaggtaccatcacatggatgcacaacaactcgcatctggtggatggattgctgtaatggatggtgatcgagttccttcaggtgattcaaccagacgctctctcattggttacttagctttcctgttggccagtgcccttgtcgtttttgtgggttttatgaaaggtgcaatcagttgttacgttcctcccagtttatgggttcctctcacaaggagaacagaattatcccgtatcttctacgtgcaccgcttcaaccagaaagtccgcagatattctaccagcatcagcagatatatctctgctgctaaaaccaagctcagcgaaaagacttggtccaacgtgcttttcttctgtgtagttgctctatttggtgccataaatgtctgcattgccgtgcatttcttatgtggcggcaatggcgctgaagaggcgtacacatatcaagggcaacactcccagtttacgatgatcacaatgacatatgaagcccgtctctggaatttgaaagtgttcatcgaacactactctagatgtgaatcggttagggagatagttgttgtttggaacaaaggtaaccctccaagtagtgacgcgtttgactccactgtgcctgtgaggatacgggtcgaggagaccaattctcttaacaacagatttagggtggatcctctgataaagaccagagctgttcttgaactggacgatgatatcatgatgacttgcaccgacttagagaaaggatttagggtctggagagaacaccctgagcggatggtgggcttctacccccggatgatagatggcaaccctatgcagtacaggaatgagaggtacgctaggggtaagaatggatacaatctgatactcacaggtgctgccttcatggacaaagagtttgctttcaagacttactggagcgagaaggctcgtgaggggagggactatgtgcacaagaacttcaactgcgaggacttgctcatgaattttctgtatgcgaatgcaagctccaccacaaggaccgtggagtacgtccaccccgcatgggctatcgatacgtccaagctttcttctgttgccattagccgggacacccagaagcactatgacatcagaacgcattgcttggcaaacttttcctccatatatggccccctccctcagaaatgggagttcggcatgcgtgaagaccgttgggacaaataggatggcgacggtggtacacgacggacaaacacatgatggtgaaaccttctcttttttttttgtcaatcccctggaaagttttgtagcttcgggcgaaggtataggtccttggggcagaagtgcccctggtttgtgatgtgcctattagatctggctagaagcttagacctgatcaggatagaccattgttcaaaagttgaggatagaccaaaggcagtgcagtgtatgtgtatgtgaattgtggaaggcaaagagggaatttgagaactgcatagtgggtggaaagtttagactgttgggttcccttctctgtagtttgtgtacatctcttcctttctaagattcagctagcatgttgtgtgattatttaccgtaaggattctttttacagctcgtagtgtttattatttcagtctaatgaggac

SEQ ID NO: 72488 - DNA, 2990 bp, Zea Mays
ggcccgcacgacccaactattgaatacaatgaacaaacgcgtcggcccattgcgaagcctcacgtctccagcaccgggccaccggcggcgaggtcgcgcgagcgcaggcaggggtggtactgggaggggaggaggggaagaaggaggtgactgcgatgtcgagccggttctggaggtggtacgcggaccggcagttccacaagtgggagaagacggtgctgtgggacatggtggagccctaccgcccgccgcgctccttcgcgccactcgtcggcacctacgtcgccgccttctacaccggcgtcgtcggggccgccgtcaccgagcagctctacaaggagaagtactgggaggatcaccccggcgaggcggtgccgatcatgccgcccaagttctactgggggccttggagggtgatgaacggagaagttccgcgcttcattcagccgcccgacgaggccaagacggcgtaggagcttcgagcttgcttcaaaacttttcagaagaagcatgtatctggtctcgatcgaaaaaaagaaattggagccctgcttttgtgcctctcccactctcctggttgtacgcctgtacctgtctgtctggaatacacgagtaagataagatcaggagaactgaagacctcaaataaagaaaaaaatcagaaaacgttggcatggatacctactaccctaccctagctagattctagctcccattctgttctattgcttgagtattgttgcacgtctccacaatattctgtcgttctaacttccaggcaaacatgctgccgattgatgatcatatctgaatagaatataaagatagctcaaatatgatcgtgtttttcatgtgtgttattttccaaataaacaatacaatctccattcacctttaagcacacaaccgcggactcgaactaggctcaccggagttgaagaaaccctgtaagcacacaaccgcgtggtggatctcgcggccgactgcactgggaggtggccggcgcggcgcagcgctggcggcatgctctgggcgagttgaagcttttgggctgggctaatttcggttctttttgacgttcgggtaccgggctggtactgggagtcagtacccaaatggagggcatcagacaaacaaacagaacctttaaagtgccagaccgccgcatccgccgccactagcggagactgccccgccgcgctttctccaagttcagctgacggccgccgtgcctactccaggccccgccgacgccctgtgaagaagaccctggttgcgctggcgcccatcgcgagcaagaagctctgaaactcgacggcggagcctcaagctcgtgcgccgaagttcattctttcgccctgtagaaacaaagggcagatgagaggataactgtactggtcattggtggtggaggcagggagcatgctctttgttatgccttgaaccattccccatcatgtgctgcagttctatgtgcccctggtaatgctggtattgctcagtcccgggatgcaacatgtatcccagatttggacatctcgagtagtgatgatgttatctcattctgccgcaagaggggagtgggaatggttgtagtgggccctgaagcccctcttgtcgcgggtcttgcaaatgaccttgtcaaagttgggataccaacctttggcccttcatcagaggctgcagctttagaaggatcaaaggacttcatgaagaagctgtgtgataagtataatatccctacagctaagtatcacacatttacggatgctgtggaagctaaaaaatatgtaaaaaatgaaggagcacctattgttgttaaagctgatggactggctgctggaaagggtgtggttgttgcaatgactttggatgaggcgttggaagccatagattctatgttggttgaaggctcattcggttctgctggttcacgggttatcatcgaagaatttctagagggtgaagaagcgtctttctttgcattggtagacggcgaaaatgctttgcctcttgaatcggcacaggatcacaaaagagttggtgatggtgatgttggcccaaataccggtggtatgggtgcatactcccctgctccaatagtgacagatgagctcaaacgcattgtaatggaaagtataattatccctactgttaaaggcatggcagccgaaggttgcaaatttgttggtgtattatacgcagggcttatgatagagaagaaatctgggctgcccaagcttattgagtacaatgtaagatttggtgacccagaatgccaggttctgatgatgcgattagaatctgatctggcacaagttctgttatctgcttgcaaaggagagttgagcaatgtttcactgacctggtctcctgaaatggctatggtggttgtgatggcaagccagggataccctggctcttataagaaggggaccgtaataaaaaacgtggacaaggctgagcgagtgtctccagctgtcaagatattccatgctgggacagcagtagatggtgatggcaatcttgttgccgttggagggagagtccttggcttcactgccaagggcaaggacatcgaggaagcaagggcaagagcgtacggtgcggtagacgctatcgagtgggtagaagggttctgcaggcgtgacattggttggagagcactgaggcagaagcaagtggctaaccagtagctattccatgaccatgagatttccccagagaaccgcaactacggtgagcctgtactgtttacaagtaataaaaagggaaacggtgcgacccccattgtttttggttgtggaaagacaagtattgctgatcaaacagtagttaacacctgttgatttcagcatgattcggtatatgtttgcaccgatattgtgttcagagtccagacaagcgctagagtgaaaacagcgcgcgccatctgaattctgaccaattgtcttcagttatcggataagtggacctttccaaataattgt

SEQ ID NO: 72489 - DNA, 3188 bp, Zea Mays
ggcccgcacgacccaactattgaatacaatgaacaaacgcgtcggcccattgcgaagcctcacgtctccagcaccgggccaccggcggcgaggtcgcgcgagcgcaggcaggggtggtactgggaggggaggaggggaagaaggaggtgactgcgatgtcgagccggttctggaggtggtacgcggaccggcagttccacaagtgggagaagacggtgctgtgggacatggtggagccctaccgcccgccgcgctccttcgcgccactcgtcggcacctacgtcgccgccttctacaccggcgtcgtcggggccgccgtcaccgagcagctctacaaggagaagtactgggaggatcaccccggcgaggcggtgccgatcatgccgcccaagttctactgggggccttggagggtgatgaacggagaagttccgcgcttcattcagccgcccgacgaggccaagacggcgtaggagcttcgagcttgcttcaaaacttttcagaagaagcatgtatctggtctcgatcgaaaaaaagaaattggagccctgcttttgtgcctctcccactctcctggttgtacgcctgtacctgtctgtctggaatacacgagtaagataagatcaggagaactgaagacctcaaataaagaaaaaaatcagaaaacgttggcatggatacctactaccctaccctagctagattctagctcccattctgttctattgcttgagtattgttgcacgtctccacaatattctgtcgttctaacttccaggcaaacatgctgccgattgatgatcatatctgaatagaatataaagatagctcaaatatgatcgtgtttttcatgtgtgttattttccaaataaacaatacaatctccattcacctttaagcacacaaccgcggactcgaactaggctcaccggagttgaagaaaccctgtaagcacacaaccgcgtggtggatctcgcggccgactgcactgggaggtggccggcgcggcgcagcgctggcggcatgctctgggcgagttgaagcttttgggctgggctaatttcggttctttttgacgttcgggtaccgggctggtactgggagtcagtacccaaatggagggcatcagacaaacaaacagaacctttaaagtgccagaccgccgcatccgccgccactagcggagactgccccgccgcgctttctccaagttcagctgacggccgccgtgcctactccaggccccgccgacgccctgtgaagaagaccctggttgcgctggcgcccatcgcgagcaagaagctctgaaactcgacggcggagcctcaagctcgtgcgccgaagttcattctttcgccctgtagaaacaaagggcagaaattggctaggactatcctggccccccactggccatggcgtgtgctgcttacagcatcagaagccctctcaagctcgctgtaagcaactgctcagccgtcacaatgcggcatgtcgcatcccattgtcactcgattgttaagactccagcaatgtggccctcaaaagcttcagcaactgatgcagccacagcttccgatgagaggataactgtactggtcattggtggtggaggcagggagcatgctctttgttatgccttgaaccattccccatcatgtgctgcagttctatgtgcccctggtaatgctggtattgctcagtcccgggatgcaacatgtatcccagatttggacatctcgagtagtgatgatgttatctcattctgccgcaagaggggagtgggaatggttgtagtgggccctgaagcccctcttgtcgcgggtcttgcaaatgaccttgtcaaagttgggataccaacctttggcccttcatcagaggctgcagctttagaaggatcaaaggacttcatgaagaagctgtgtgataagtataatatccctacagctaagtatcacacatttacggatgctgtggaagctaaaaaatatgtaaaaaatgaaggagcacctattgttgttaaagctgatggactggctgctggaaagggtgtggttgttgcaatgactttggatgaggcgttggaagccatagattctatgttggttgaaggctcattcggttctgctggttcacgggttatcatcgaagaatttctagagggtgaagaagcgtctttctttgcattggtagacggcgaaaatgctttgcctcttgaatcggcacaggatcacaaaagagttggtgatggtgatgttggcccaaataccggtggtatgggtgcatactcccctgctccaatagtgacagatgagctcaaacgcattgtaatggaaagtataattatccctactgttaaaggcatggcagccgaaggttgcaaatttgttggtgtattatacgcagggcttatgatagagaagaaatctgggctgcccaagcttattgagtacaatgtaagatttggtgacccagaatgccaggttctgatgatgcgattagaatctgatctggcacaagttctgttatctgcttgcaaaggagagttgagcaatgtttcactgacctggtctcctgaaatggctatggtggttgtgatggcaagccagggataccctggctcttataagaaggggaccgtaataaaaaacgtggacaaggctgagcgagtgtctccagctgtcaagatattccatgctgggacagcagtagatggtgatggcaatcttgttgccgttggagggagagtccttggcttcactgccaagggcaaggacatcgaggaagcaagggcaagagcgtacggtgcggtagacgctatcgagtgggtagaagggttctgcaggcgtgacattggttggagagcactgaggcagaagcaagtggctaaccagtagctattccatgaccatgagatttccccagagaaccgcaactacggtgagcctgtactgtttacaagtaataaaaagggaaacggtgcgacccccattgtttttggttgtggaaagacaagtattgctgatcaaacagtagttaacacctgttgatttcagcatgattcggtatatgtttgcaccgatattgtgttcagagtccagacaagcgctagagtgaaaacagcgcgcgccatctgaattctgaccaattgtcttcagttatcggataagtggacctttccaaataattgt

SEQ ID NO: 72490 - DNA, 570 bp, Zea Mays
ccttgaccctccttgcccttgttcctctcccgccggccacaggagaagtactgggaggatcaccccggcgaggcggtgccgatcatgccgcccaagttctactgggggccttggagggtgatgaacggagaagttccgcgcttcattcagccgcccgacgaggccaagacggcgtaggagcttcgagcttgcttcaaaacttttcagaagaagcatgtatctggtctcgatcgaaaaaaagaaattggagccctgcttttgtgcctctcccactctcctggttgtacgcctgtacctgtctgtctggaatacacgagtaagataagatcaggagaactgaagacctcaaataaagaaaaaaatcagaaaacgttggcatggatacctactaccctaccctagctagattctagctcccattctgttctattgcttgagtattgttgcacgtctccacaatattctgtcgttctaacttccaggcaaacatgctgccgattgatgatcatatctgaatagaatataaagatagctcaaatatgatcgtgtttttcatgtgtgttattttcc

SEQ ID NO: 72491 - DNA, 2150 bp, Zea Mays
aatggagggcatcagacaaacaaacagaacctttaaagtgccagaccgccgcatccgccgccactagcggagactgccccgccgcgctttctccaagttcagctgacggccgccgtgcctactccaggccccgccgacgccctgtgaagaagaccctggttgcgctggcgcccatcgcgagcaagaagctctgaaactcgacggcggagcctcaagctcgtgcgccgaagttcattctttcgccctgtagaaacaaagggcaggactatcctggccccccactggccatggcgtgtgctgcttacagcatcagaagccctctcaagctcgctgtaaggcacggctcggatgtgttgagtagcaacaacttgtgcaatggctttaagtcttcggtgtcttacctcaattctcaacgttggagcagcaactgctcagccgtcacaatgcggcatgtcgcatcccattgtcactcgattgttaagactccagcaatgtggccctcaaaagcttcagcaactgatgcagccacagcttccgatgagaggataactgtactggtcattggtggtggaggcagggagcatgctctttgttatgccttgaaccattccccatcatgtgctgcagttctatgtgcccctggtaatgctggtattgctcagtcccgggatgcaacatgtatcccagatttggacatctcgagtagtgatgatgttatctcattctgccgcaagaggggagtgggaatggttgtagtgggccctgaagcccctcttgtcgcgggtcttgcaaatgaccttgtcaaagttgggataccaacctttggcccttcatcagaggctgcagctttagaaggatcaaaggacttcatgaagaagctgtgtgataagtataatatccctacagctaagtatcacacatttacggatgctgtggaagctaaaaaatatgtaaaaaatgaaggagcacctattgttgttaaagctgatggactggctgctggaaagggtgtggttgttgcaatgactttggatgaggcgttggaagccatagattctatgttggttgaaggctcattcggttctgctggttcacgggttatcatcgaagaatttctagagggtgaagaagcgtctttctttgcattggtagacggcgaaaatgctttgcctcttgaatcggcacaggatcacaaaagagttggtgatggtgatgttggcccaaataccggtggtatgggtgcatactcccctgctccaatagtgacagatgagctcaaacgcattgtaatggaaagtataattatccctactgttaaaggcatggcagccgaaggttgcaaatttgttggtgtattatacgcagggcttatgatagagaagaaatctgggctgcccaagcttattgagtacaatgtaagatttggtgacccagaatgccaggttctgatgatgcgattagaatctgatctggcacaagttctgttatctgcttgcaaaggagagttgagcaatgtttcactgacctggtctcctgaaatggctatggtggttgtgatggcaagccagggataccctggctcttataagaaggggaccgtaataaaaaacgtggacaaggctgagcgagtgtctccagctgtcaagatattccatgctgggacagcagtagatggtgatggcaatcttgttgccgttggagggagagtccttggcttcactgccaagggcaaggacatcgaggaagcaagggcaagagcgtacggtgcggtagacgctatcgagtgggtagaagggttctgcaggcgtgacattggttggagagcactgaggcagaagcaagtggctaaccagtagctattccatgaccatgagatttccccagagaaccgcaactacggtgagcctgtactgtttacaagtaataaaaagggaaacggtgcgacccccattgtttttggttgtggaaagacaagtattgctgatcaaacagtagttaacacctgttgatttcagcatgattcggtatatgtttgcaccgatattgtgttcagagtccagacaagcgctagagtgaaaacagcgcgcgccatctgaattctgaccaattgtcttcagttatcggataagtggacctttccaaataattgt

SEQ ID NO: 72492 - DNA, 1630 bp, Zea Mays
aatggagggcatcagacaaacaaacagaacctttaaagtgccagaccgccgcatccgccgccactagcggagactgccccgccgcgctttctccaagttcagctgacggccgccgtgcctactccaggccccgccgacgccctgtgaagaagaccctggttgcgctggcgcccatcgcgagcaagaagctctgaaactcgacggcggagcctcaagctcgtgcgccgaagttcattctttcgccctgtagaaacaaagggcagaaattggctaggactatcctggccccccactggccatggcgtgtgctgcttacagcatcagaagccctctcaagctcgctgtaaggcacggctcggatgtgttgagtagcaacaacttgtgcaatggctttaagtcttcggtgtcttacctcaattctcaacgttggagcagcaactgctcagccgtcacaatgcggcatgtcgcatcccattgtcactcgattgttaagactccagcaatgtggccctcaaaagcttcagcaactgatgcagccacagcttccgatgagaggataactgtactggtcattggtggtggaggcagggagcatgctctttgttatgccttgaaccattccccatcatgtgctgcagttctatgtgcccctggtaatgctggtattgctcagtcccgggatgcaacatgtatcccagatttggacatctcgagtagtgatgatgttatctcattctgccgcaagaggggagtgggaatggttgtagtgggccctgaagcccctcttgtcgcgggtcttgcaaatgaccttgtcaaagttgggataccaacctttggcccttcatcagaggctgcagctttagaaggatcaaaggacttcatgaagaagctgtgtgataagtataatatccctacagctaaggttctgatgatgcgattagaatctgatctggcacaagttctgttatctgcttgcaaaggagagttgagcaatgtttcactgacctggtctcctgaaatggctatggtggttgtgatggcaagccagggataccctggctcttataagaaggggaccgtaataaaaaacgtggacaaggctgagcgagtgtctccagctgtcaagatattccatgctgggacagcagtagatggtgatggcaatcttgttgccgttggagggagagtccttggcttcactgccaagggcaaggacatcgaggaagcaagggcaagagcgtacggtgcggtagacgctatcgagtgggtagaagggttctgcaggcgtgacattggttggagagcactgaggcagaagcaagtggctaaccagtagctattccatgaccatgagatttccccagagaaccgcaactacggtgagcctgtactgtttacaagtaataaaaagggaaacggtgcgacccccattgtttttggttgtggaaagacaagtattgctgatcaaacagtagttaacacctgttgatttcagcatgattcggtatatgtttgcaccgatattgtgttcagagtccagacaagcgctagagtgaaaacagcgcgcgccatctgaattctgaccaattgtcttcagttatcggataagtggacctttccaaataattgt

SEQ ID NO: 72493 - DNA, 1367 bp, Zea Mays
aaagactcccatattagtggagtctggggaaaggataaaccgaggcgagtcttccttccgcagatgcagagaggctacctcgaaaccgtgacctggtgactgtgagacatctctaattactacacaagtatcacacatttacggatgctgtggaagctaaaaaatatgtaaaaaatgaaggagcacctattgttgttaaagctgatggactggctgctggaaagggtgtggttgttgcaatgactttggatgaggcgttggaagccatagattctatgttggttgaaggctcattcggttctgctggttcacgggttatcatcgaagaatttctagagggtgaagaagcgtctttctttgcattggtagacggcgaaaatgctttgcctcttgaatcggcacaggatcacaaaagagttggtgatggtgatgttggcccaaataccggtggtatgggtgcatactcccctgctccaatagtgacagatgagctcaaacgcattgtaatggaaagtataattatccctactgttaaaggcatggcagccgaaggttgcaaatttgttggtgtattatacgcagggcttatgatagagaagaaatctgggctgcccaagcttattgagtacaatgtaagatttggtgacccagaatgccaggttctgatgatgcgattagaatctgatctggcacaagttctgttatctgcttgcaaaggagagttgagcaatgtttcactgacctggtctcctgaaatggctatggtggttgtgatggcaagccagggataccctggctcttataagaaggggaccgtaataaaaaacgtggacaaggctgagcgagtgtctccagctgtcaagatattccatgctgggacagcagtagatggtgatggcaatcttgttgccgttggagggagagtccttggcttcactgccaagggcaaggacatcgaggaagcaagggcaagagcgtacggtgcggtagacgctatcgagtgggtagaagggttctgcaggcgtgacattggttggagagcactgaggcagaagcaagtggctaaccagtagctattccatgaccatgagatttccccagagaaccgcaactacggtgagcctgtactgtttacaagtaataaaaagggaaacggtgcgacccccattgtttttggttgtggaaagacaagtattgctgatcaaacagtagttaacacctgttgatttcagcatgattcggtatatgtttgcaccgatattgtgttcagagtccagacaagcgctagagtgaaaacagcgcgcgccatctgaattctgaccaattgtcttcagttatcggataagtggacctttccaaataattgt

SEQ ID NO: 72494 - DNA, 1467 bp, Zea Mays
gcagggatgaagagagacattctaccgtgagatcagcggtggaagatggcccggcgcagccgcgacaggatcgagctccggtgtgcgcgacgggtccggagcggagcggagcggagcgggggagaaggcatataaaatgcgaagatgagacgagaagcggaggattaacagagcaggaaggtgaattgggcgcagagactctcagacgcgcagtttttgaaggaacacagaagagtttgcgatcatgaaatcgccagcacggcaacaacagaacagcaggatcgacgcagttgcttcaccggacagggagtgccctggtagaggtaacaacaacaacaacggaggtccacagacctgtccagatgacaagaaaggctcttcatcggggagtgaggggtccatctggccgaagtttgcagtcaccctgtcgaacagggaaaaggaagaggatttcctggtgttcagaggatccaagctgcctcaaagacccaagaaaagagccaaggtcatccagagaactgtcaatttcgtatgcccaggaacgtggctgtgtgacctgactcttgaaagatacgaagtccgagagaagaaggtttccaagaagcgccccaggggattgaaagctatgcacgacttggacagtgactcggaataaaaaacagagagagaagagatcactgaacatgagaagctgaacattagagagaaggccaggacagatgcagcagatggaggtcgaccataaagcttcctgatggaatgaggaccaacgggtcaccactcctcgcgattgatactggagatcgatttgtccaaaaggactaggtttttttaaaagcaaatggcaggagctctgcctatccattaagagagagggagagagagaaatttacaagaagtgagcacaataaaagcacgcccaaacataacgagggatcccaataagaagtcgtccctgctgctacaaaaaaaaaaggacttgtagcgatcggaggacgaccgagatgtcaggaagttgcacggaagaacagagaggagagctgcaggagctggagttcctgaacattagcaaactattcaattccctggaaagcagcaacgctgttttgctattctctcatgttaatatgaatggcgagctagccagtcctgtcgcgtctagtttgccttccgtagtttttttttatcctctggtgctgtatgaaaggtcagtggatattctttcaggggcatgagacagtgtccggcactctcagtccagtgcgagtggatcaggattcaggcaaacatagaccgacgatcggactttatgtgttttcaggactgccagacttgtaaattctgaaagtttcagtgaattttttttatagtttaaattttatataggcctaccctccgtataaaaaaattgagaactttttttacgtgatattggaagatgtttggcattggttttgcaaactctat

SEQ ID NO: 72495 - DNA, 1617 bp, Zea Mays
agaaattcaatttgaatgaatgtggacaaagatgtggtctgtctttttttcctgaagaactcgatttgtacatcgaattcgaagatgtggtctgtctttttcatgaagaactgataataccgaagttgctagttttctggtagtatggagtagtccgtgcccagtactgccgagttcagtatttgttggttttttacttgcatcgctaaaatcaggcctgtttttttttcttccaaaaaaggggtcctggaaggctaaaagaagacggtgtttagaacagaaatcttgatatcagttgcgaacactgagattagaagctagtttaaggaccaacaggctccttatcgccatcttcgatccatccagctgaatgaacacagaagagtttgcgatcatgaaatcgccagcacggcaacaacagaacagcaggatcgacgcagttgcttcaccggacagggagtgccctggtagaggtaacaacaacaacaacggaggtccacagacctgtccagatgacaagaaaggctcttcatcggggagtgaggggtccatctggccgaagtttgcagtcaccctgtcgaacagggaaaaggaagaggatttcctggtgttcagaggatccaagctgcctcaaagacccaagaaaagagccaaggtcatccagagaactgtcaatttcgtatgcccaggaacgtggctgtgtgacctgactcttgaaagatacgaagtccgagagaagaaggtttccaagaagcgccccaggggattgaaagctatgcacgacttggacagtgactcggaataaaaaacagagagagaagagatcactgaacatgagaagctgaacattagagagaaggccaggacagatgcagcagatggaggtcgaccataaagcttcctgatggaatgaggaccaacgggtcaccactcctcgcgattgatactggagatcgatttgtccaaaaggactaggtttttttaaaagcaaatggcaggagctctgcctatccattaagagagagggagagagagaaatttacaagaagtgagcacaataaaagcacgcccaaacataacgagggatcccaataagaagtcgtccctgctgctacaaaaaaaaaaggacttgtagcgatcggaggacgaccgagatgtcaggaagttgcacggaagaacagagaggagagctgcaggagctggagttcctgaacattagcaaactattcaattccctggaaagcagcaacgctgttttgctattctctcatgttaatatgaatggcgagctagccagtcctgtcgcgtctagtttgccttccgtagtttttttttatcctctggtgctgtatgaaaggtcagtggatattctttcaggggcatgagacagtgtccggcactctcagtccagtgcgagtggatcaggattcaggcaaacatagaccgacgatcggactttatgtgttttcaggactgccagacttgtaaattctgaaagtttcagtgaattttttttatagtttaaattttatataggcctaccctccgtataaaaaaattgagaactttttttacgtgatattggaagatgtttggcattggttttgcaaactctat

SEQ ID NO: 72496 - DNA, 2135 bp, Zea Mays
agaaattcaatttgaatgaatgtggacaaagatgtggtctgtctttttttcctgaagaactcgatttgtacatcgaattcgaagatgtggtctgtctttttcatgaagaactgataataccgaagttgctagttttctggtagtatggagtagtccgtgcccagtactgccgagttcagtatttgttggttttttacttgcatcgctaaaatcaggcctgtttttttttcttccaaaaaaggggtcctggaaggctaaaagaagacggtgtttagaacagaaatcttgatatcagttgcgaacactgagattagaagctagtttaaggaccaacaggctccttatcgccatcttcgatccatccagctgaatgtatttggagttattattattctctgaattttcagtattttctagcttatgtgccaattcgatttctgcatcacatgaatttttacgtgcccttttgttggtacagttttctcagactggtttgtgattttgcttcgccgaaactattacaagaaagaactcctagactgctgtcaataatagcttatccgtgttctcttaaaaaagggacttatcggcattacgataaattttgatggctgagtattctttgccttcatctgttgctatctttggactctagtcacatcatatcaactatattttgttgactaattttggattccgaagaaaacaacaattttatcttgaatcagtcaccaccacacgtataagtggatggtgagggcctgctcattattgctcttccttttgcatcctcgaattcatagcttggtgcctggacggtacgaagcgttggtataggtagtaggtggaagcttttgccttctatgttacccctctcccctaaattggaggaacacagaagagtttgcgatcatgaaatcgccagcacggcaacaacagaacagcaggatcgacgcagttgcttcaccggacagggagtgccctggtagaggtaacaacaacaacaacggaggtccacagacctgtccagatgacaagaaaggctcttcatcggggagtgaggggtccatctggccgaagtttgcagtcaccctgtcgaacagggaaaaggaagaggatttcctggtgttcagaggatccaagctgcctcaaagacccaagaaaagagccaaggtcatccagagaactgtcaatttcgtatgcccaggaacgtggctgtgtgacctgactcttgaaagatacgaagtccgagagaagaaggtttccaagaagcgccccaggggattgaaagctatgcacgacttggacagtgactcggaataaaaaacagagagagaagagatcactgaacatgagaagctgaacattagagagaaggccaggacagatgcagcagatggaggtcgaccataaagcttcctgatggaatgaggaccaacgggtcaccactcctcgcgattgatactggagatcgatttgtccaaaaggactaggtttttttaaaagcaaatggcaggagctctgcctatccattaagagagagggagagagagaaatttacaagaagtgagcacaataaaagcacgcccaaacataacgagggatcccaataagaagtcgtccctgctgctacaaaaaaaaaaggacttgtagcgatcggaggacgaccgagatgtcaggaagttgcacggaagaacagagaggagagctgcaggagctggagttcctgaacattagcaaactattcaattccctggaaagcagcaacgctgttttgctattctctcatgttaatatgaatggcgagctagccagtcctgtcgcgtctagtttgccttccgtagtttttttttatcctctggtgctgtatgaaaggtcagtggatattctttcaggggcatgagacagtgtccggcactctcagtccagtgcgagtggatcaggattcaggcaaacatagaccgacgatcggactttatgtgttttcaggactgccagacttgtaaattctgaaagtttcagtgaattttttttatagtttaaattttatataggcctaccctccgtataaaaaaattgagaactttttttacgtgatattggaagatgtttggcattggttttgcaaactctat

SEQ ID NO: 72497 - DNA, 1084 bp, Zea Mays
gttcgctctcgccaatgatgctatcagctcaatggcgtattgttctccagttccatgatcgtccaccagacctttcatgcccgtccctttactgacaaagcatagctagcttgactgggagagaaaaaatgttcttgagtcaccatcgttttctgtttttcgagtcaccatctgatgtaagtaaaggtaccaagaccttgtgagcttggagtctaagggagcactgcgaccgttgttagatcttccatttttcttgaagcaatcgcagaggaagatggtggtgtcgaagaagaagctgatcaaggtcggcccatggggcggcgccgggggacacccgtgggacgacggcggctactccgggatccgcagcatcaccatgtcctacgaccggttcatggagtccatcagcgtggagtacgacagggacggcatgcccgtcactggggagcggcacggaggagccgccgccagccacacgacccagatcaagctgggctacccggacgagtacctgacaacggtgagcgggcactacgcgccgatcgcgcccggcggctcgccggtcatccgctcgctggcgttccggaccaaccagggggcgtacgggccgttcggcgtggcggagggcacgcccttcgagttcccggtggacggcggcgtcatcgtcggcttctgcgggaggagcgggtggcagctcgacgccgtcggcctctacgtcgcgccgctgcgcccggagaccgtgtacgacagggtgcacaagcttggcctcacggcttaccgcgcagtttggcagcggatcgggtcccagcagcagcagcaagaaccggtgaaactgctgaacggcaacgcgcagattactcacaagatgtaaccaactgccaggatgccaaccatgactatctatattctgcagtccgaatgtatccagctagcgtatggatctaatgtacctgtacctcatcctgatttgaacacttcagcgtatgaatctaaacatgcagcaaacagtcctgcgacgggacttggctgctggccacgtctaacagcaatagttggtattttcattcctaagccacaatgggcc

SEQ ID NO: 72498 - DNA, 858 bp, Zea Mays
ccgttgttagatcttccatttttcttgaagcagcaatcgcagaggaagatggtggtgtcgaagaagaagctgatcaaggtcggcccatggggcggcgccgggggacacccgtgggacgacggcggctactccgggatccgcagcatcaccatgtcctacgaccggttcatggagtccatcagcgtggagtacgacagggacggcatgcccgtcactggggagcggcacggaggagccgccgccagccacacgacccagatcaagctgggctacccggacgagtacctgacaacggtgagcgggcactacgcgccgatcgcgcccggcggctcgccggtcatccgctcgctggcgttccggaccaaccagggggcgtacgggccgttcggcgtggcggagggcacgcccttcgagttcccggtggacggcggcgtcatcgtcggcttctgcgggaggagcgggtggcagctcgacgccgtcggcctctacgtcgcgccgctgcgcccggagaccgtgtacgacagggtgcacaagcttggcctcacggcttaccgcgcagtttggcagcggatcgggtcccagcagcagcagcaagaaccggtgaaactgctgaacggcaacgcgcagattactcacaagatgtaaccaactgccaggatgccaaccatgactatctatattctgcagtccgaatgtatccagctagcgtatggatctaatgtacctgtacctcatcctgatttgaacacttcagcgtatgaatctaaacatgcagcaaacagtcctgcgacgggacttggctgctggccacgtctaacagcaatagttggtattttcattcctaagccacaatgggcc

SEQ ID NO: 72499 - DNA, 951 bp, Zea Mays
gctgggcaatttcttcagtacctcttgtctatctattaagcacccttgctcttcaaggaactttggctgcaaaacctaaccacttgtgcattctctcaagacccccctggaagggaaggaaacatgcaatcgcagaggaagatggtggtgtcgaagaagaagctgatcaaggtcggcccatggggcggcgccgggggacacccgtgggacgacggcggctactccgggatccgcagcatcaccatgtcctacgaccggttcatggagtccatcagcgtggagtacgacagggacggcatgcccgtcactggggagcggcacggaggagccgccgccagccacacgacccagatcaagctgggctacccggacgagtacctgacaacggtgagcgggcactacgcgccgatcgcgcccggcggctcgccggtcatccgctcgctggcgttccggaccaaccagggggcgtacgggccgttcggcgtggcggagggcacgcccttcgagttcccggtggacggcggcgtcatcgtcggcttctgcgggaggagcgggtggcagctcgacgccgtcggcctctacgtcgcgccgctgcgcccggagaccgtgtacgacagggtgcacaagcttggcctcacggcttaccgcgcagtttggcagcggatcgggtcccagcagcagcagcaagaaccggtgaaactgctgaacggcaacgcgcagattactcacaagatgtaaccaactgccaggatgccaaccatgactatctatattctgcagtccgaatgtatccagctagcgtatggatctaatgtacctgtacctcatcctgatttgaacacttcagcgtatgaatctaaacatgcagcaaacagtcctgcgacgggacttggctgctggccacgtctaacagcaatagttggtattttcattcctaagccacaatgggcc

SEQ ID NO: 72500 - DNA, 5701 bp, Zea Mays
gtgaggtccaaccgataggctgacggcatattcagagttgccaattggaatattcctcgcgcgcgcgcgaatattttgcccggacgagcgaatctaccgtcgctgcagcacctgcacggctgcacccgccttgtttggaccgcacgcgcggccacccttctcctcctctcctctcttcttcacctacctattctctctcgctcggcgcgcgtagaagagaagaggcacttcttcctcctcgccggcttcccctcgcgtgtcgcaagtgctttaccctacaccgtggcccgtggatcgtcgccggacgccaggcatcggcaagcggcagcgcagccgtccaccctgagtccctgattttgccaaggttattagccctccctcctccgcactatctctgtaacaccaattcattctagcttacttctcatgagatgagaggggcgcatccagcaccggggcggccgctgtccgggctcgatcgagcccccgctacggtccccggaggccggaagccggaagcccctcttaagtttctgctataattttatacttgaaatttaaaaatgcgattttaaatacagaaaataaaaggaataagtccatcctccgtatctttctggatccgctgctcgcgtggtgtttttagtttgtgtgtgtgtaagggtggtcaccagcacgtctcgtaactggcggcgtgcttctttgatccgtttgcttatgtcgcctgacgtcaatacatcagctaaggtgccctttcccggttgtggatcggggttcaggaatcaggatatattcattctttctccaaaaactatagaattcattcagtgtcggacggaccttgacaaaatggaagaagcagggcgcagaggcatcagcttatttccacacgaccgcgtattttctatttaaccagcgcagcgcagcgcaggcatggaagcacagcggccgttcatgcagatgaaagatgagagagacctgaatgaaagaacaacaggaggacaaggaaggaggacgccgtcagccctctgtttaggaagctcaaccgggccatggagtcctcttcagcccgcaccatctacgtgagcactgagccgtcagataagaacatcagaggtggcactggatctggatggtccgcgagctagcagagataatagataacgcacgtcatttcaggtgttttacccgtatgctctttagtgaactaagactatgtttgatttctttagtctagggactaaagtttagttaggggattaaagtttagtccctaacatatttagttatagggctaaaaatagtaagaatatactaaatgacttataagaagactaaaatgacttttaacattctcctgctattagtacaattgaactaaatgaagggtaaatatggaattaatatggtttagtctcttttagcacatatgcgaaggactaaagactaaattattttagtccaaattttagttctagtgtttggtaaaaaagggactaaatgagacaaaaagctagagactaatctttagtccctctaaccaaacaccccctaaagctaacgtgtcctacagacacactaagggcttgttcggttagctcccaatccacatggattgagtgagattggatgagtttaaatcccaactaagtcaaatcctttcttaatttttttcaatctcacccaatccatgggtaacgggattaaccgaacaaggctttatctcatccaatccatgggtaacgggattaaccgaacaaggcttaaggtttcacccaatccatgggtaacgggattaaccgaacaaggctttatctcatccaatccatgggtaacgggattaaccgaacaaggcttaaggttggcacgccgtcccagccagatcgtctaggccctggatattatcgtgttgtacgtcgtgaaacccagatctgtggctgccgctctcgttcgcttttcagttttaccctatgctactatttgctgaaatgtattgcagcatcttcacgtttgcagcgtttcggccgcttaagcgcagtgtatgtctttgcaagaaagatgatgatgtcagctcgatcggaacagattaactgctgctgcaataacccactcagagcacctacatctgctactgcagaaaacagacagcggagcaagccacacggaaatgagcaacaaagaatggttttgaaatttcagtatggtacagaagcatggtggacagcaccagcacagcatgtggccgtgaaatagaagcagcaagttacagatactctttatacaggcctttcctccgaagagtttcacatgtgttggagatgctactctaaaatcatcatctccagaatcagaggaagttcagtaggtgcgaagccacaaggcaaataataatttgtttggtattgcaatcgagggagcaggatgcgtatccttttatttacctcacgagtcaattggtgcaacccttgctggcttcattatccttacaatgttcctgatgtgctcaaaccccatgactatcacccctatgagataaagaaagcttagttgcagcttgccaagcaagttatagactgctacggcagcatttgcaccttcatctgttcgcatcgtgacggtaatgggcctcgcggaaatgagtgccccggtctctgatgaggacgcagcgtaagagatttgatccagaacagttagccttgaagagaaatcggagatccggtggcctttatcagatccataagtgcattgttcacctgcaattcgtagaaggttacatgagttcctactgaacttttcatgatagactgtgaccaagcgagagaagcaaacaccagaaagtattgtgctgagtgcgtgctaagccacatgcctagatacttgaggcaacttgatcccaaatacgacttttagtaacctattgtgtcgtataattccgttattctctgctagacctagtaatggggaacaactatctccaagagtaacatttggttaggtgaccaatgatgctttcagataactgcaacgtctgatgtcatctaagttcgctcagtatatatgacaaaagtgcagcagatttttctcactcaattcttcttcctagtttggtagacaaaacttgagcattagaaagcttaaatttctcaggagaagcttgcagacagacactgtttttgatgttatcttcgttgttggccataatttttgggattttgcaccactatacaacagtttaagaaaataagcagatcgatagattctatcaatgtccttcctagcatttcagtggcacatttcgctattgttttattgaagtccgcattttacctcatctagtttttcatggttccctagatgtgtgccatgcttgagcatgtggtaagccagtaagccacatacctagatacttgaggcaacttggtttcgttataacttttggtaacctattggatcctataattctgtcttttcatgctaaacctagtaatggggaacagctgccttcaaaagcaacatgtattctgtttcacgtttaggtgatggatgatgctttcggataactgagatgtctggtgtcgtcttagttcactcggcaattctggtattctgttgcacgtttaggtgatgaaatatgctttcagttaactgagatggctggcatcttgctcgttcagcaactatggacaagttgcaacagaaatttctcattcggtgctccttcctagtttggttagacaaaagtttagtgttagctagctcaattttgagaaacttgcaaagccacagcttgggatgttaccttcattgcttagcaattttggggagtttcagtttaattaagcaaataagcaaaacaaccaatcacatcaatgcccttaatgtttcagtggcacatgttgctgttttatgagagttctcactttacctcgtctggtctttcatggctcactagatgtgcaccatgaagttctaccattcttgcaacaggaagaaggctttctgctagacgttttgcatggcacaattgcgcaatgatatcgtacctgaattttgtaatgtaagccacatgaaatgcatgtgcaccattctctgaacaagattatccactgttaacaaaactaaccttccatgaataactgaaactagaaagccggcagatcgtattgtatctagctccttagtagtcatgttgtgagtccaacatgcattgatttgcccttcaaaaccacaattagattgcatccctgtcgacgatatgcccttcacatattcctgaaagaagacacggtacagataaaccttccatgaataggttgatgcatgtatgtatgttgtcttcattctggtgtctacctactaatatgtttatattctaaagagggggtatgcaaaacacaaaaccatatattcacaacaaaagacccattcaggaagaatcagaacaaaaaatgaccaaatcaaaaccacataatccaagagtatgggacatatacaaatatgattatattctaaaagggtatgaacaacatagaaccagattcataacaaaagacgacctatccaaatcacatgatccaatggtatgggacagctgaaaaataatgtgtaaaaacaacaaacgtcagccaaaatacccaaatcaatgtctcgggacagaacatgacatatcactcacttgatagaggaccattcttctggtacacgacccaacagtctcctcaaggtattcctgcatagttgcattgttaaatcaaacatataatgcaatggatctgaaaaaaaactaattttcatcaaacgggggattataatggatgcaccgttagttccttaccttcgtataatgcgtttccaagtccacaagggctctttcctctggtgtttttgcccttaagaaacggaatgcaagagaaagcatctgcccatctacctacagaagcaggaagggagaggcttagctcgtgccacgaatagttgaaaataataattggtgtctcttgtagcatttcctttgcattgaacgtattcagcccacaaatatgtatgcaaatatcaaaactccagtacctttgggaagcactgaaagccacctccagtgacattaagcaatgccagcgaacatagcctgtgaggcgcaatcgccgcaagcttgcaagcaatcatggcacctggttgcacacagataacagggtcaatgcctaataaaggtcacacattggagagagagagagagagagagagagagagagagagagagtctcagaatcgaaagacgcacaataggaataggacttacccatggagtggccaaagacgtgagctttcttccaccccaaatgatccatcaaggccaaggcatccgtcgccatgattgccgtcctgccagatacaaaagaacacgtttgaaaacaaatgctcgcccatttttttacatgagcgcgtgaactgaacgtgatggaagatatgattccccccttctttcttccccgtcactcgtttttctcgtggaaaaaactattgtggcagaaagggagcgaaatgtgggatttttctcgtcgaaagctacatgcagctgatgtcgtccaccaaatccccgtgtacggtccttctgaatcgcaaggcgaggaagcaagcaatcctgcgacacctaacgaacggaacggcccaccgatcgttgcaaccgacgacgacgagggaggat

SEQ ID NO: 72501 - DNA, 3955 bp, Zea Mays
ctgcacggctgcacccgccttgtttggaccgcacgcgcggccacccttctcctcctctcctctcttcttcacctacctattctctctcgctcggcgcgcgtagaagagaagaggcacttcttcctcctcgccggcttcccctcgcgtgtcgcaagtgctttaccctacaccgtggcccgtggatcgtcgccggacgccaggcatcggcaagcggcagcgcagccgtccaccctgagtccctgattttgccaagcatcttcacgtttgcagcgtttcggccgcttaagcgcagtgtatgtctttgcaagaaagatgatgatgtcagctcgatcggaacagattaactgctgctgcaataacccactcagagcacctacatctgctactgcagaaaacagacagcggagcaagccacacggaaatgagcaacaaagaatggttttgaaatttcagtatggtacagaagcatggtggacagcaccagcacagcatgtggccgtgaaatagaagcagcaagttacagatactctttatacaggcctttcctccgaagagtttcacatgtgttggagatgctactctaaaatcatcatctccagaatcagaggaagttcagtaggtgcgaagccacaaggcaaataataatttgtttggtattgcaatcgagggagcaggatgcgtatccttttatttacctcacgagtcaattggtgcaacccttgctggcttcattatccttacaatgttcctgatgtgctcaaaccccatgactatcacccctatgagataaagaaagcttagttgcagcttgccaagcaagttatagactgctacggcagcatttgcaccttcatctgttcgcatcgtgacggtaatgggcctcgcggaaatgagtgccccggtctctgatgaggacgcagcgtaagagatttgatccagaacagttagccttgaagagaaatcggagatccggtggcctttatcagatccataagtgcattgttcacctgcaattcgtagaaggttacatgagttcctactgaacttttcatgatagactgtgaccaagcgagagaagcaaacaccagaaagtattgtgctgagtgcgtgctaagccacatgcctagatacttgaggcaacttgatcccaaatacgacttttagtaacctattgtgtcgtataattccgttattctctgctagacctagtaatggggaacaactatctccaagagtaacatttggttaggtgaccaatgatgctttcagataactgcaacgtctgatgtcatctaagttcgctcagtatatatgacaaaagtgcagcagatttttctcactcaattcttcttcctagtttggtagacaaaacttgagcattagaaagcttaaatttctcaggagaagcttgcagacagacactgtttttgatgttatcttcgttgttggccataatttttgggattttgcaccactatacaacagtttaagaaaataagcagatcgatagattctatcaatgtccttcctagcatttcagtggcacatttcgctattgttttattgaagtccgcattttacctcatctagtttttcatggttccctagatgtgtgccatgcttgagcatgtggtaagccagtaagccacatacctagatacttgaggcaacttggtttcgttataacttttggtaacctattggatcctataattctgtcttttcatgctaaacctagtaatggggaacagctgccttcaaaagcaacatgtattctgtttcacgtttaggtgatggatgatgctttcggataactgagatgtctggtgtcgtcttagttcactcggcaattctggtattctgttgcacgtttaggtgatgaaatatgctttcagttaactgagatggctggcatcttgctcgttcagcaactatggacaagttgcaacagaaatttctcattcggtgctccttcctagtttggttagacaaaagtttagtgttagctagctcaattttgagaaacttgcaaagccacagcttgggatgttaccttcattgcttagcaattttggggagtttcagtttaattaagcaaataagcaaaacaaccaatcacatcaatgcccttaatgtttcagtggcacatgttgctgttttatgagagttctcactttacctcgtctggtctttcatggctcactagatgtgcaccatgaagttctaccattcttgcaacaggaagaaggctttctgctagacgttttgcatggcacaattgcgcaatgatatcgtacctgaattttgtaatgtaagccacatgaaatgcatgtgcaccattctctgaacaagattatccactgttaacaaaactaaccttccatgaataactgaaactagaaagccggcagatcgtattgtatctagctccttagtagtcatgttgtgagtccaacatgcattgatttgcccttcaaaaccacaattagattgcatccctgtcgacgatatgcccttcacatattcctgaaagaagacacggtacagataaaccttccatgaataggttgatgcatgtatgtatgttgtcttcattctggtgtctacctactaatatgtttatattctaaagagggggtatgcaaaacacaaaaccatatattcacaacaaaagacccattcaggaagaatcagaacaaaaaatgaccaaatcaaaaccacataatccaagagtatgggacatatacaaatatgattatattctaaaagggtatgaacaacatagaaccagattcataacaaaagacgacctatccaaatcacatgatccaatggtatgggacagctgaaaaataatgtgtaaaaacaacaaacgtcagccaaaatacccaaatcaatgtctcgggacagaacatgacatatcactcacttgatagaggaccattcttctggtacacgacccaacagtctcctcaaggtattcctgcatagttgcattgttaaatcaaacatataatgcaatggatctgaaaaaaaactaattttcatcaaacgggggattataatggatgcaccgttagttccttaccttcgtataatgcgtttccaagtccacaagggctctttcctctggtgtttttgcccttaagaaacggaatgcaagagaaagcatctgcccatctacctacagaagcaggaagggagaggcttagctcgtgccacgaatagttgaaaataataattggtgtctcttgtagcatttcctttgcattgaacgtattcagcccacaaatatgtatgcaaatatcaaaactccagtacctttgggaagcactgaaagccacctccagtgacattaagcaatgccagcgaacatagcctgtgaggcgcaatcgccgcaagcttgcaagcaatcatggcacctggttgcacacagataacagggtcaatgcctaataaaggtcacacattggagagagagagagagagagagagagagagagagagagagtctcagaatcgaaagacgcacaataggaataggacttacccatggagtggccaaagacgtgagctttcttccaccccaaatgatccatcaaggccaaggcatccgtcgccatgattgccgtcctgccagatacaaaagaacacgtttgaaaacaaatgctcgcccatttttttacatgagcgcgtgaactgaacgtgatggaagatatgattccccccttctttcttccccgtcactcgtttttctcgtggaaaaaactattgtggcagaaagggagcgaaatgtgggatttttctcgtcgaaagctacatgcagctgatgtcgtccaccaaatccccgtgtacggtccttctgaatcgcaaggcgaggaagcaagcaatcctgcgacacctaacgaacggaacggcccaccgatcgttgcaaccgacgacgacgagggaggat

SEQ ID NO: 72502 - DNA, 3938 bp, Zea Mays
ctgcacggctgcacccgccttgtttggaccgcacgcgcggccacccttctcctcctctcctctcttcttcacctacctattctctctcgctcggcgcgcgtagaagagaagaggcacttcttcctcctcgccggcttcccctcgcgtgtcgcaagtgctttaccctacaccgtggcccgtggatcgtcgccggacgccaggcatcggcaagcggcagcgcagccgtccaccctgagtccctgattttgccaagcgtttcggccgcttaagcgcagtgtatgtctttgcaagaaagatgatgatgtcagctcgatcggaacagattaactgctgctgcaataacccactcagagcacctacatctgctactgcagaaaacagacagcggagcaagccacacggaaatgagcaacaaagaatggttttgaaatttcagtatggtacagaagcatggtggacagcaccagcacagcatgtggccgtgaaatagaagcagcaagttacagatactctttatacaggcctttcctccgaagagtttcacatgtgttggagatgctactctaaaatcatcatctccagaatcagaggaagttcagtaggtgcgaagccacaaggcaaataataatttgtttggtattgcaatcgagggagcaggatgcgtatccttttatttacctcacgagtcaattggtgcaacccttgctggcttcattatccttacaatgttcctgatgtgctcaaaccccatgactatcacccctatgagataaagaaagcttagttgcagcttgccaagcaagttatagactgctacggcagcatttgcaccttcatctgttcgcatcgtgacggtaatgggcctcgcggaaatgagtgccccggtctctgatgaggacgcagcgtaagagatttgatccagaacagttagccttgaagagaaatcggagatccggtggcctttatcagatccataagtgcattgttcacctgcaattcgtagaaggttacatgagttcctactgaacttttcatgatagactgtgaccaagcgagagaagcaaacaccagaaagtattgtgctgagtgcgtgctaagccacatgcctagatacttgaggcaacttgatcccaaatacgacttttagtaacctattgtgtcgtataattccgttattctctgctagacctagtaatggggaacaactatctccaagagtaacatttggttaggtgaccaatgatgctttcagataactgcaacgtctgatgtcatctaagttcgctcagtatatatgacaaaagtgcagcagatttttctcactcaattcttcttcctagtttggtagacaaaacttgagcattagaaagcttaaatttctcaggagaagcttgcagacagacactgtttttgatgttatcttcgttgttggccataatttttgggattttgcaccactatacaacagtttaagaaaataagcagatcgatagattctatcaatgtccttcctagcatttcagtggcacatttcgctattgttttattgaagtccgcattttacctcatctagtttttcatggttccctagatgtgtgccatgcttgagcatgtggtaagccagtaagccacatacctagatacttgaggcaacttggtttcgttataacttttggtaacctattggatcctataattctgtcttttcatgctaaacctagtaatggggaacagctgccttcaaaagcaacatgtattctgtttcacgtttaggtgatggatgatgctttcggataactgagatgtctggtgtcgtcttagttcactcggcaattctggtattctgttgcacgtttaggtgatgaaatatgctttcagttaactgagatggctggcatcttgctcgttcagcaactatggacaagttgcaacagaaatttctcattcggtgctccttcctagtttggttagacaaaagtttagtgttagctagctcaattttgagaaacttgcaaagccacagcttgggatgttaccttcattgcttagcaattttggggagtttcagtttaattaagcaaataagcaaaacaaccaatcacatcaatgcccttaatgtttcagtggcacatgttgctgttttatgagagttctcactttacctcgtctggtctttcatggctcactagatgtgcaccatgaagttctaccattcttgcaacaggaagaaggctttctgctagacgttttgcatggcacaattgcgcaatgatatcgtacctgaattttgtaatgtaagccacatgaaatgcatgtgcaccattctctgaacaagattatccactgttaacaaaactaaccttccatgaataactgaaactagaaagccggcagatcgtattgtatctagctccttagtagtcatgttgtgagtccaacatgcattgatttgcccttcaaaaccacaattagattgcatccctgtcgacgatatgcccttcacatattcctgaaagaagacacggtacagataaaccttccatgaataggttgatgcatgtatgtatgttgtcttcattctggtgtctacctactaatatgtttatattctaaagagggggtatgcaaaacacaaaaccatatattcacaacaaaagacccattcaggaagaatcagaacaaaaaatgaccaaatcaaaaccacataatccaagagtatgggacatatacaaatatgattatattctaaaagggtatgaacaacatagaaccagattcataacaaaagacgacctatccaaatcacatgatccaatggtatgggacagctgaaaaataatgtgtaaaaacaacaaacgtcagccaaaatacccaaatcaatgtctcgggacagaacatgacatatcactcacttgatagaggaccattcttctggtacacgacccaacagtctcctcaaggtattcctgcatagttgcattgttaaatcaaacatataatgcaatggatctgaaaaaaaactaattttcatcaaacgggggattataatggatgcaccgttagttccttaccttcgtataatgcgtttccaagtccacaagggctctttcctctggtgtttttgcccttaagaaacggaatgcaagagaaagcatctgcccatctacctacagaagcaggaagggagaggcttagctcgtgccacgaatagttgaaaataataattggtgtctcttgtagcatttcctttgcattgaacgtattcagcccacaaatatgtatgcaaatatcaaaactccagtacctttgggaagcactgaaagccacctccagtgacattaagcaatgccagcgaacatagcctgtgaggcgcaatcgccgcaagcttgcaagcaatcatggcacctggttgcacacagataacagggtcaatgcctaataaaggtcacacattggagagagagagagagagagagagagagagagagagagagtctcagaatcgaaagacgcacaataggaataggacttacccatggagtggccaaagacgtgagctttcttccaccccaaatgatccatcaaggccaaggcatccgtcgccatgattgccgtcctgccagatacaaaagaacacgtttgaaaacaaatgctcgcccatttttttacatgagcgcgtgaactgaacgtgatggaagatatgattccccccttctttcttccccgtcactcgtttttctcgtggaaaaaactattgtggcagaaagggagcgaaatgtgggatttttctcgtcgaaagctacatgcagctgatgtcgtccaccaaatccccgtgtacggtccttctgaatcgcaaggcgaggaagcaagcaatcctgcgacacctaacgaacggaacggcccaccgatcgttgcaaccgacgacgacgagggaggat

SEQ ID NO: 72503 - DNA, 2016 bp, Zea Mays
atgatcgtgaaatcaaggggggtgaagaggacctgcggaggcatgaaggaaatgtctggcatggggacggagaaaaccagtggattgggagctcacatcgcctgtgaatgttttgtgccgtggatgggtctttcttcgcgcttggaactgaacagaaaatctactcaaagtttcacagattggtatgagctgatcacccctggttgtgtagttccttctgcaatgatttactgcactcactgtgctgattactgcccctccataaaggaccctgacaaaggatacatatgttgtggtacatgtgggaaggttcttgatcaggaggtatacactgatgagcctacttttgttaaggataacacaggacagagtcgcttagctggaagtattcttgcaagcattgagtctggatattcgatttctcatcaaagaaccttagacaaaggtagggatgagattaggcagattgtcaataacttacatgtcagcggtggagaaactgtcgttagcaaggcttatcgcttctatgagctagctgtcgaccgtaattttaccaggggccgtagaacaagccatgttgcagctgcttgcctttacattgcctgcaggcaaagtaagaaggcttatcttcttattgatttctctgattatctccaaataagtgtttacgtgctaggtgctgtttttctccagctctgccaagttttgctactcgcggatcatccagttgttcagaaacttgtagatcccagccttttcatccatcgctttaccaaatgtttgctgggaagaagagataatgctgtctcagacacagctttttctcgagaagtctcagacacagctttacgcattgtagctagcatgaagagagattggatgcagactgggaggaaaccaagtggattatgtggtgcagcattatacattgctgcactctctcatgggtgtaattacaccaaggcagatattgtctctgttgtgcatgtgtgtgaggccactctaacgaagcgattgatagagtttgaaaatacggattctggcagcttaacggctttaagcggggataaatcttcaacaattggatctgggggactcataaatgactctgtgccaccgaaggatcctgaagagggaggtgaaaattgtgaaggcaatgctgatccagaaagcctttctgacatcgacgatgtagaggttgattggtaccttcacaatgaggaagaaacacaatataaaaagattatctgggaggaaatgaacaaagagtaccttgaggaacaagcagccaaggaagctttggcagctgaattggcagctagagggattgttgtggaagagggaaagaaaaaacggaaacgtaacgaagacaccaagagctcgacgcctgctgacacaccggcagaagccacatacaacatgctgaaacggaagggacttggttccaagatcaatgagggagctgttggcgaattatacaagactaaagatgaagttgagagcgcgagtaggaaagaagagatggagttcgacgcactgtttgggccggacaacgctgatggcgagacggtcgatgatggtggttacggctatgggggctgcggcgatggtggcgcggaagcctacaatggcattgatgacgattttgatttctaggaggatgtgttatgtgtagcagcatttgcagctgaccagcacgggctagattcttcatctgtgcgttatagtttatagttagtttcatttttcttttgttaggggagtttgaccaaatcattatggagctattggatagtgcacttagttttggttgtataataatgttgggaactaggttctgcatgggcgtcgtaactgtcgcaagccctatgtggtcaagcgcctataccatgggcatttgttgtacatcccacctccaaaagattgcaagtggtgatgtaacattttgtattagcaataaaggacacaagaatgcattcatttgaaactttgaaaatctctctctctctctctctc

SEQ ID NO: 72504 - DNA, 2263 bp, Zea Mays
atgatcgtgaaatcaaggggggtgaagaggacctgcggaggcatgaaggaaatgtctggcatggggacggagaaaaccagtggattgggagctcacatcgcctgtgaatgttttgtgccgtggatgggtctttcttcgcgcttggaactgaacagaaaatctactcaaagtttcacagattggtatgagctgatcacccctggttgtgtagttccttctgcaatgatttactgcactcactgtgctgattactgcccctccataaaggaccctgacaaaggatacatatgttgtggtacatgtgggaaggttcttgatcaggaggtatacactgatgagcctacttttgttaaggataacacaggacagagtcgcttagctggaagtattcttgcaagcattgagtctggatattcgatttctcatcaaagaaccttagacaaagctagctgtcgaccgtaattttaccaggggccgtagaacaagccatgttgcagctgcttgcctttacattgcctgcaggcaaagtaagaaggcttatcttcttattgatttctctgattatctccaaataagtgtttacgtgctaggtgctgtttttctccagctctgccaagttttgctactcgcggatcatccagttgttcagaaacttgtagatcccagccttttcatccatcgctttaccaaatgtttgctgggaagaagagataatgctgtctcagacacagctttttctcgagaagtctcagacacagctttacgcattgtagctagcatgaagagagattggatgcagactgggaggaaaccaagtggattatgtggtgcagcattatacattgctgcactctctcatgggtgtaattacaccaaggcagatattgtctctgttgtgcatgtgtgtgaggccactctaacgaagcgattgatagagtttgaaaatacggattctggcagcttaacgattgaagaatttctagcaacagctgatgaatataatgaagcgtctgtttcaaaatattcgcctaagtctggggaaatcctttgcaaacacaagggtaaagattttgagcattttgcccatggactttgtgaaaaatgcttcaataagttcactaaactgtcgggtggactagaaggtggtgctaaccctccagcattccaacgagctgaaaacaaaagacttgaagctgctaaaagggctgaagaagctgctgcagttaaggaggcagcgctggaagaatctctttgcgacacacagaattctgagattgagagtaccacaactcctaaaaaggctttaagcggggataaatcttcaacaattggatctgggggactcataaatgactctgtgccaccgaaggatcctgaagagggaggtgaaaattgtgaaggcaatgctgatccagaaagcctttctgacatcgacgatgtagaggttgattggtaccttcacaatgaggaagaaacacaatataaaaagattatctgggaggaaatgaacaaagagtaccttgaggaacaagcagccaaggaagctttggcagctgaattggcagctagagggattgttgtggaagagggaaagaaaaaacggaaacgtaacgaagacaccaagagctcgacgcctgctgacacaccggcagaagccacatacaacatgctgaaacggaagggacttggttccaagatcaatgagggagctgttggcgaattatacaagactaaagatgaagttgagagcgcgagtaggaaagaagagatggagttcgacgcactgtttgggccggacaacgctgatggcgagacggtcgatgatggtggttacggctatgggggctgcggcgatggtggcgcggaagcctacaatggcattgatgacgattttgatttctaggaggatgtgttatgtgtagcagcatttgcagctgaccagcacgggctagattcttcatctgtgcgttatagtttatagttagtttcatttttcttttgttaggggagtttgaccaaatcattatggagctattggatagtgcacttagttttggttgtataataatgttgggaactaggttctgcatgggcgtcgtaactgtcgcaagccctatgtggtcaagcgcctataccatgggcatttgttgtacatcccacctccaaaagattgcaagtggtgatgtaacattttgtattagcaataaaggacacaagaatgcattcatttgaaactttgaaaatctctctctctctctctctc

SEQ ID NO: 72505 - DNA, 2624 bp, Zea Mays
gcgggtgtgggaggttggacaggagacgtttttttttccaccgtcgccgccgcccctgcttgccgctgcgcgcccccgcctcctacgcaggtcgtctgctccgaagccggtggccgaagctcgcgtcgccctctccctcaccggattcatcgtccgagccctcgctagagctcgtgacctcgccgtcgccggagccctcactctcactggattcgtgtcctcgccggagctcgcgctaacctgctcgaccacacctcgccgcccgcggccatctcacacccactccgcgcgaccgcggtcctctcctcacctatcggtcgttcctgccctcgcgaggaagacgacgcctcaagctatcctccctccctctcgatctgatccggagtggctcacgttttcctattcctcgccagcggcagaggcggcaaccctcgatccgtgtcaatcctctattagtttcacagattggtatgagctgatcacccctggttgtgtagttccttctgcaatgatttactgcactcactgtgctgattactgcccctccataaaggaccctgacaaaggatacatatgttgtggtacatgtgggaaggttcttgatcaggaggtatacactgatgagcctacttttgttaaggataacacaggacagagtcgcttagctggaagtattcttgcaagcattgagtctggatattcgatttctcatcaaagaaccttagacaaaggtagggatgagattaggcagattgtcaataacttacatgtcagcggtggagaaactgtcgttagcaaggcttatcgcttctatgagctagctgtcgaccgtaattttaccaggggccgtagaacaagccatgttgcagctgcttgcctttacattgcctgcaggcaaagtaagaaggcttatcttcttattgatttctctgattatctccaaataagtgtttacgtgctaggtgctgtttttctccagctctgccaagttttgctactcgcggatcatccagttgttcagaaacttgtagatcccagccttttcatccatcgctttaccaaatgtttgctgggaagaagagataatgctgtctcagacacagctttttctcgagaagtctcagacacagctttacgcattgtagctagcatgaagagagattggatgcagactgggaggaaaccaagtggattatgtggtgcagcattatacattgctgcactctctcatgggtgtaattacaccaaggcagatattgtctctgttgtgcatgtgtgtgaggccactctaacgaagcgattgatagagtttgaaaatacggattctggcagcttaacgattgaagaatttctagcaacagctgatgaatataatgaagcgtctgtttcaaaatattcgcctaagtctggggaaatcctttgcaaacacaaggactagactacatttgcttttgacacttagtctgattgcccagttcactaaactgtcgggtggactagaaggtggtgctaaccctccagcattccaacgagctgaaaacaaaagacttgaagctgctaaaagggctgaagaagctgctgcagttaaggaggcagcgctggaagaatctctttgcgacacacagaattctgagattgagagtaccacaactcctaaaaaggctttaagcggggataaatcttcaacaattggatctgggggactcataaatgactctgtgccaccgaaggatcctgaagagggaggtgaaaattgtgaaggcaatgctgatccagaaagcctttctgacatcgacgatgtagaggttgattggtaccttcacaatgaggaagaaacacaatataaaaagattatctgggaggaaatgaacaaagagtaccttgaggaacaagcagccaaggaagctttggcagctgaattggcagctagagggattgttgtggaagagggaaagaaaaaacggaaacgtaacgaagacaccaagagctcgacgcctgctgacacaccggcagaagccacatacaacatgctgaaacggaagggacttggttccaagatcaatgagggagctgttggcgaattatacaagactaaagatgaagttgagagcgcgagtaggaaagaagagatggagttcgacgcactgtttgggccggacaacgctgatggcgagacggtcgatgatggtggttacggctatgggggctgcggcgatggtggcgcggaagcctacaatggcattgatgacgattttgatttctaggaggatgtgttatgtgtagcagcatttgcagctgaccagcacgggctagattcttcatctgtgcgttatagtttatagttagtttcatttttcttttgttaggggagtttgaccaaatcattatggagctattggatagtgcacttagttttggttgtataataatgttgggaactaggttctgcatgggcgtcgtaactgtcgcaagccctatgtggtcaagcgcctataccatgggcatttgttgtacatcccacctccaaaagattgcaagtggtgatgtaacattttgtattagcaataaaggacacaagaatgcattcatttgaaactttgaaaatctctctctctctctctctc

SEQ ID NO: 72506 - DNA, 2518 bp, Zea Mays
gcgggtgtgggaggttggacaggagacgtttttttttccaccgtcgccgccgcccctgcttgccgctgcgcgcccccgcctcctacgcaggtcgtctgctccgaagccggtggccgaagctcgcgtcgccctctccctcaccggattcatcgtccgagccctcgctagagctcgtgacctcgccgtcgccggagccctcactctcactggattcgtgtcctcgccggagctcgcgctaacctgctcgaccacacctcgccgcccgcggccatctcacacccactccgcgcgaccgcggtcctctcctcacctatcggtcgttcctgccctcgcgaggaagacgacgcctcaagctatcctccctccctctcgatctgatccggagtggctcacgttttcctattcctcgccagcggcagaggcggcaaccctcgatccgtgtcaatcctctattagatgttgtggtacatgtgggaaggttcttgatcaggaggtatacactgatgagcctacttttgttaaggataacacaggacagagtcgcttagctggaagtattcttgcaagcattgagtctggatattcgatttctcatcaaagaaccttagacaaaggtagggatgagattaggcagattgtcaataacttacatgtcagcggtggagaaactgtcgttagcaaggcttatcgcttctatgagctagctgtcgaccgtaattttaccaggggccgtagaacaagccatgttgcagctgcttgcctttacattgcctgcaggcaaagtaagaaggcttatcttcttattgatttctctgattatctccaaataagtgtttacgtgctaggtgctgtttttctccagctctgccaagttttgctactcgcggatcatccagttgttcagaaacttgtagatcccagccttttcatccatcgctttaccaaatgtttgctgggaagaagagataatgctgtctcagacacagctttttctcgagaagtctcagacacagctttacgcattgtagctagcatgaagagagattggatgcagactgggaggaaaccaagtggattatgtggtgcagcattatacattgctgcactctctcatgggtgtaattacaccaaggcagatattgtctctgttgtgcatgtgtgtgaggccactctaacgaagcgattgatagagtttgaaaatacggattctggcagcttaacgattgaagaatttctagcaacagctgatgaatataatgaagcgtctgtttcaaaatattcgcctaagtctggggaaatcctttgcaaacacaagggtaaagattttgagcattttgcccatggactttgtgaaaaatgcttcaataagttcactaaactgtcgggtggactagaaggtggtgctaaccctccagcattccaacgagctgaaaacaaaagacttgaagctgctaaaagggctgaagaagctgctgcagttaaggaggcagcgctggaagaatctctttgcgacacacagaattctgagattgagagtaccacaactcctaaaaaggctttaagcggggataaatcttcaacaattggatctgggggactcataaatgactctgtgccaccgaaggatcctgaagagggaggtgaaaattgtgaaggcaatgctgatccagaaagcctttctgacatcgacgatgtagaggttgattggtaccttcacaatgaggaagaaacacaatataaaaagattatctgggaggaaatgaacaaagagtaccttgaggaacaagcagccaaggaagctttggcagctgaattggcagctagagggattgttgtggaagagggaaagaaaaaacggaaacgtaacgaagacaccaagagctcgacgcctgctgacacaccggcagaagccacatacaacatgctgaaacggaagggacttggttccaagatcaatgagggagctgttggcgaattatacaagactaaagatgaagttgagagcgcgagtaggaaagaagagatggagttcgacgcactgtttgggccggacaacgctgatggcgagacggtcgatgatggtggttacggctatgggggctgcggcgatggtggcgcggaagcctacaatggcattgatgacgattttgatttctaggaggatgtgttatgtgtagcagcatttgcagctgaccagcacgggctagattcttcatctgtgcgttatagtttatagttagtttcatttttcttttgttaggggagtttgaccaaatcattatggagctattggatagtgcacttagttttggttgtataataatgttgggaactaggttctgcatgggcgtcgtaactgtcgcaagccctatgtggtcaagcgcctataccatgggcatttgttgtacatcccacctccaaaagattgcaagtggtgatgtaacattttgtattagcaataaaggacacaagaatgcattcatttgaaactttgaaaatctctctctctctctctctc

SEQ ID NO: 72507 - DNA, 2551 bp, Zea Mays
gcgggtgtgggaggttggacaggagacgtttttttttccaccgtcgccgccgcccctgcttgccgctgcgcgcccccgcctcctacgcaggtcgtctgctccgaagccggtggccgaagctcgcgtcgccctctccctcaccggattcatcgtccgagccctcgctagagctcgtgacctcgccgtcgccggagccctcactctcactggattcgtgtcctcgccggagctcgcgctaacctgctcgaccacacctcgccgcccgcggccatctcacacccactccgcgcgaccgcggtcctctcctcacctatcggtcgttcctgccctcgcgaggaagacgacgcctcaagctatcctccctccctctcgatctgatccggagtggctcacgttttcctattcctcgccagcggcagaggcggcaaccctcgatccgtgtcaatcctctattagattggtatgagctgatcacccctggttgtgtagttccttctgcaatgatttactgcactcactgtgctgattactgcccctccataaaggaccctgacaaaggatacatatgttgtggtacatgtgggaaggttcttgatcaggaggtatacactgatgagcctacttttgttaaggataacacaggacagagtcgcttagctggaagtattcttgcaagcattgagtctggatattcgatttctcatcaaagaaccttagacaaaggtagggatgagattaggcagattgtcaataacttacatgtcagcggtggagaaactgtcgttagcaaggcttatcgcttctatgagctagctgtcgaccgtaattttaccaggggccgtagaacaagccatgttgcagctgcttgcctttacattgcctgcaggcaaagtaagaaggcttatcttcttattgatttctctgattatctccaaataagtgtttacgtgctaggtgctgtttttctccagctctgccaagttttgctactcgcggatcatccagttgttcagaaacttgtagatcccagccttttcatccatcgctttaccaaatgtttgctgggaagaagagataatgctgtctcagacacagctttttctcgagaagtctcagacacagctttacgcattgtagctagcatgaagagagattggatgcagactgggaggaaaccaagtggattatgtggtgcagcattatacattgctgcactctctcatgggtgtaattacaccaaggcagatattgtctctgttgtgcatgtgtgtgaggccactctaacgaagcgattgatagagtttgaaaatacggattctggcagcttaacgttcactaaactgtcgggtggactagaaggtggtgctaaccctccagcattccaacgagctgaaaacaaaagacttgaagctgctaaaagggctgaagaagctgctgcagttaaggaggcagcgctggaagaatctctttgcgacacacagaattctgagattgagagtaccacaactcctaaaaaggctttaagcggggataaatcttcaacaattggatctgggggactcataaatgactctgtgccaccgaaggatcctgaagagggaggtgaaaattgtgaaggcaatgctgatccagaaagcctttctgacatcgacgatgtagaggttgattggtaccttcacaatgaggaagaaacacaatataaaaagattatctgggaggaaatgaacaaagagtaccttgaggtaagtaacactatggtcacattttttcatcttgaccagagaatgctactacctgcatttttattttacaggaacaagcagccaaggaagctttggcagctgaattggcagctagagggattgttgtggaagagggaaagaaaaaacggaaacgtaacgaagacaccaagagctcgacgcctgctgacacaccggcagaagccacatacaacatgctgaaacggaagggacttggttccaagatcaatgagggagctgttggcgaattatacaagactaaagatgaagttgagagcgcgagtaggaaagaagagatggagttcgacgcactgtttgggccggacaacgctgatggcgagacggtcgatgatggtggttacggctatgggggctgcggcgatggtggcgcggaagcctacaatggcattgatgacgattttgatttctaggaggatgtgttatgtgtagcagcatttgcagctgaccagcacgggctagattcttcatctgtgcgttatagtttatagttagtttcatttttcttttgttaggggagtttgaccaaatcattatggagctattggatagtgcacttagttttggttgtataataatgttgggaactaggttctgcatgggcgtcgtaactgtcgcaagccctatgtggtcaagcgcctataccatgggcatttgttgtacatcccacctccaaaagattgcaagtggtgatgtaacattttgtattagcaataaaggacacaagaatgcattcatttgaaactttgaaaatctctctctctctctctctc

SEQ ID NO: 72508 - DNA, 2503 bp, Zea Mays
gcgggtgtgggaggttggacaggagacgtttttttttccaccgtcgccgccgcccctgcttgccgctgcgcgcccccgcctcctacgcaggtcgtctgctccgaagccggtggccgaagctcgcgtcgccctctccctcaccggattcatcgtccgagccctcgctagagctcgtgacctcgccgtcgccggagccctcactctcactggattcgtgtcctcgccggagctcgcgctaacctgctcgaccacacctcgccgcccgcggccatctcacacccactccgcgcgaccgcggtcctctcctcacctatcggtcgttcctgccctcgcgaggaagacgacgcctcaagctatcctccctccctctcgatctgatccggagtggctcacgttttcctattcctcgccagcggcagaggcggcaaccctcgatccgtgtcaatcctctattaggcttggaactgaacagaaaatctactcaaagtttcacagattggtatgagctgatcacccctggttgtgtagttccttctgcaatgatttactgcactcactgtgctgattactgcccctccataaaggaccctgacaaaggatacatatgttgtggtacatgtgggaaggttcttgatcaggaggtatacactgatgagcctacttttgttaaggataacacaggacagagtcgcttagctggaagtattcttgcaagcattgagtctggatattcgatttctcatcaaagaaccttagacaaaggcaaagtaagaaggcttatcttcttattgatttctctgattatctccaaataagtgtttacgtgctaggtgctgtttttctccagctctgccaagttttgctactcgcggatcatccagttgttcagaaacttgtagatcccagccttttcatccatcgctttaccaaatgtttgctgggaagaagagataatgctgtctcagacacagctttttctcgagaagtctcagacacagctttacgcattgtagctagcatgaagagagattggatgcagactgggaggaaaccaagtggattatgtggtgcagcattatacattgctgcactctctcatgggtgtaattacaccaaggcagatattgtctctgttgtgcatgtgtgtgaggccactctaacgaagcgattgatagagtttgaaaatacggattctggcagcttaacgattgaagaatttctagcaacagctgatgaatataatgaagcgtctgtttcaaaatattcgcctaagtctggggaaatcctttgcaaacacaagggtaaagattttgagcattttgcccatggactttgtgaaaaatgcttcaataagttcactaaactgtcgggtggactagaaggtggtgctaaccctccagcattccaacgagctgaaaacaaaagacttgaagctgctaaaagggctgaagaagctgctgcagttaaggaggcagcgctggaagaatctctttgcgacacacagaattctgagattgagagtaccacaactcctaaaaaggctttaagcggggataaatcttcaacaattggatctgggggactcataaatgactctgtgccaccgaaggatcctgaagagggaggtgaaaattgtgaaggcaatgctgatccagaaagcctttctgacatcgacgatgtagaggttgattggtaccttcacaatgaggaagaaacacaatataaaaagattatctgggaggaaatgaacaaagagtaccttgaggaacaagcagccaaggaagctttggcagctgaattggcagctagagggattgttgtggaagagggaaagaaaaaacggaaacgtaacgaagacaccaagagctcgacgcctgctgacacaccggcagaagccacatacaacatgctgaaacggaagggacttggttccaagatcaatgagggagctgttggcgaattatacaagactaaagatgaagttgagagcgcgagtaggaaagaagagatggagttcgacgcactgtttgggccggacaacgctgatggcgagacggtcgatgatggtggttacggctatgggggctgcggcgatggtggcgcggaagcctacaatggcattgatgacgattttgatttctaggaggatgtgttatgtgtagcagcatttgcagctgaccagcacgggctagattcttcatctgtgcgttatagtttatagttagtttcatttttcttttgttaggggagtttgaccaaatcattatggagctattggatagtgcacttagttttggttgtataataatgttgggaactaggttctgcatgggcgtcgtaactgtcgcaagccctatgtggtcaagcgcctataccatgggcatttgttgtacatcccacctccaaaagattgcaagtggtgatgtaacattttgtattagcaataaaggacacaagaatgcattcatttgaaactttgaaaatctctctctctctctctctc

SEQ ID NO: 72509 - DNA, 2586 bp, Zea Mays
gcgggtgtgggaggttggacaggagacgtttttttttccaccgtcgccgccgcccctgcttgccgctgcgcgcccccgcctcctacgcaggtcgtctgctccgaagccggtggccgaagctcgcgtcgccctctccctcaccggattcatcgtccgagccctcgctagagctcgtgacctcgccgtcgccggagccctcactctcactggattcgtgtcctcgccggagctcgcgctaacctgctcgaccacacctcgccgcccgcggccatctcacacccactccgcgcgaccgcggtcctctcctcacctatcggtcgttcctgccctcgcgaggaagacgacgcctcaagctatcctccctccctctcgatctgatccggagtggctcacgttttcctattcctcgccagcggcagaggcggcaaccctcgatccgtgtcaatcctctattagtttcacagattggtatgagctgatcacccctggttgtgtagttccttctgcaatgatttactgcactcactgtgctgattactgcccctccataaaggaccctgacaaaggatacatatgttgtggtacatgtgggaaggttcttgatcaggaggtatacactgatgagcctacttttgttaaggataacacaggacagagtcgcttagctggaagtattcttgcaagcattgagtctggatattcgatttctcatcaaagaaccttagacaaaggtagggatgagattaggcagattgtcaataacttacatgtcagcggtggagaaactgtcgttagcaaggcttatcgcttctatgagctagctgtcgaccgtaattttaccaggggccgtagaacaagccatgttgcagctgcttgcctttacattgcctgcaggcaaagtaagaaggcttatcttcttattgatttctctgattatctccaaataagtgtttacgtgctaggtgctgtttttctccagctctgccaagttttgctactcgcggatcatccagttgttcagaaacttgtagatcccagccttttcatccatcgctttaccaaatagaagtctcagacacagctttacgcattgtagctagcatgaagagagattggatgcagactgggaggaaaccaagtggattatgtggtgcagcattatacattgctgcactctctcatgggtgtaattacaccaaggcagatattgtctctgttgtgcatgtgtgtgaggccactctaacgaagcgattgatagagtttgaaaatacggattctggcagcttaacgattgaagaatttctagcaacagctgatgaatataatgaagcgtctgtttcaaaatattcgcctaagtctggggaaatcctttgcaaacacaagggtaaagattttgagcattttgcccatggactttgtgaaaaatgcttcaataagttcactaaactgtcgggtggactagaaggtggtgctaaccctccagcattccaacgagctgaaaacaaaagacttgaagctgctaaaagggctgaagaagctgctgcagttaaggaggcagcgctggaagaatctctttgcgacacacagaattctgagattgagagtaccacaactcctaaaaaggctttaagcggggataaatcttcaacaattggatctgggggactcataaatgactctgtgccaccgaaggatcctgaagagggaggtgaaaattgtgaaggcaatgctgatccagaaagcctttctgacatcgacgatgtagaggttgattggtaccttcacaatgaggaagaaacacaatataaaaagattatctgggaggaaatgaacaaagagtaccttgaggaacaagcagccaaggaagctttggcagctgaattggcagctagagggattgttgtggaagagggaaagaaaaaacggaaacgtaacgaagacaccaagagctcgacgcctgctgacacaccggcagaagccacatacaacatgctgaaacggaagggacttggttccaagatcaatgagggagctgttggcgaattatacaagactaaagatgaagttgagagcgcgagtaggaaagaagagatggagttcgacgcactgtttgggccggacaacgctgatggcgagacggtcgatgatggtggttacggctatgggggctgcggcgatggtggcgcggaagcctacaatggcattgatgacgattttgatttctaggaggatgtgttatgtgtagcagcatttgcagctgaccagcacgggctagattcttcatctgtgcgttatagtttatagttagtttcatttttcttttgttaggggagtttgaccaaatcattatggagctattggatagtgcacttagttttggttgtataataatgttgggaactaggttctgcatgggcgtcgtaactgtcgcaagccctatgtggtcaagcgcctataccatgggcatttgttgtacatcccacctccaaaagattgcaagtggtgatgtaacattttgtattagcaataaaggacacaagaatgcattcatttgaaactttgaaaatctctctctctctctctctc

SEQ ID NO: 72510 - DNA, 2373 bp, Zea Mays
gcgggtgtgggaggttggacaggagacgtttttttttccaccgtcgccgccgcccctgcttgccgctgcgcgcccccgcctcctacgcaggtcgtctgctccgaagccggtggccgaagctcgcgtcgccctctccctcaccggattcatcgtccgagccctcgctagagctcgtgacctcgccgtcgccggagccctcactctcactggattcgtgtcctcgccggagctcgcgctaacctgctcgaccacacctcgccgcccgcggccatctcacacccactccgcgcgaccgcggtcctctcctcacctatcggtcgttcctgccctcgcgaggaagacgacgcctcaagctatcctccctccctctcgatctgatccggagtggctcacgttttcctattcctcgccagcggcagaggcggcaaccctcgatccgtgtcaatcctctattagtttcacagattggtatgagctgatcacccctggttgtgtagttccttctgcaatgatttactgcactcactgtgctgattactgcccctccataaaggaccctgacaaaggatacatatgttgtggtacatgtgggaaggttcttgatcaggaggtatacactgatgagcctacttttgttaaggataacacaggacagagtcgcttagctggaagtattcttgcaagcattgagtctggatattcgatttctcatcaaagaaccttagacaaaggtagggatgagattaggcagattgtcaataacttacatgtcagcggtggagaaactgtcgttagcaaggcttatcgcttctatgagctagctgtcgaccgtaattttaccaggggccgtagaacaagccatgttgcagctgcttgcctttacattgcctgcaggcaaagtaagaaggcttatcttcttattgatttctctgattatctccaaataagtgtttacgtgctaggtgctgtttttctccagctctgccaagttttgctactcgcggatcatccagttgttcagaaacttgtagatcccagccttttcatccatcgctttaccaaatgtttgctgggaagaagagataatgctgtctcagacacagctttttctcgagaagtctcagacacagctttacgcattgtagctagcatgaagagagattggatgcagactgggaggaaaccaagtggattatgtggtgcagcattatacattgctgcactctctcatgggtgtaattacaccaaggcagatattgtctctgttgtgcatgtgtgtgaggccactctaacgaagcgattgatagagtttgaaaatacggattctggcagcttaacggctttaagcggggataaatcttcaacaattggatctgggggactcataaatgactctgtgccaccgaaggatcctgaagagggaggtgaaaattgtgaaggcaatgctgatccagaaagcctttctgacatcgacgatgtagaggttgattggtaccttcacaatgaggaagaaacacaatataaaaagattatctgggaggaaatgaacaaagagtaccttgaggtaagtaacactatggtcacattttttcatcttgaccagagaatgctactacctgcatttttattttacaggaacaagcagccaaggaagctttggcagctgaattggcagctagagggattgttgtggaagagggaaagaaaaaacggaaacgtaacgaagacaccaagagctcgacgcctgctgacacaccggcagaagccacatacaacatgctgaaacggaagggacttggttccaagatcaatgagggagctgttggcgaattatacaagactaaagatgaagttgagagcgcgagtaggaaagaagagatggagttcgacgcactgtttgggccggacaacgctgatggcgagacggtcgatgatggtggttacggctatgggggctgcggcgatggtggcgcggaagcctacaatggcattgatgacgattttgatttctaggaggatgtgttatgtgtagcagcatttgcagctgaccagcacgggctagattcttcatctgtgcgttatagtttatagttagtttcatttttcttttgttaggggagtttgaccaaatcattatggagctattggatagtgcacttagttttggttgtataataatgttgggaactaggttctgcatgggcgtcgtaactgtcgcaagccctatgtggtcaagcgcctataccatgggcatttgttgtacatcccacctccaaaagattgcaagtggtgatgtaacattttgtattagcaataaaggacacaagaatgcattcatttgaaactttgaaaatctctctctctctctctctc

SEQ ID NO: 72511 - DNA, 2465 bp, Zea Mays
gcgggtgtgggaggttggacaggagacgtttttttttccaccgtcgccgccgcccctgcttgccgctgcgcgcccccgcctcctacgcaggtcgtctgctccgaagccggtggccgaagctcgcgtcgccctctccctcaccggattcatcgtccgagccctcgctagagctcgtgacctcgccgtcgccggagccctcactctcactggattcgtgtcctcgccggagctcgcgctaacctgctcgaccacacctcgccgcccgcggccatctcacacccactccgcgcgaccgcggtcctctcctcacctatcggtcgttcctgccctcgcgaggaagacgacgcctcaagctatcctccctccctctcgatctgatccggagtggctcacgttttcctattcctcgccagcggcagaggcggcaaccctcgatccgtgtcaatcctctattagatgttgtggtacatgtgggaaggttcttgatcaggaggtatacactgatgagcctacttttgttaaggataacacaggacagagtcgcttagctggaagtattcttgcaagcattgagtctggatattcgatttctcatcaaagaaccttagacaaaggtagggatgagattaggcagattgtcaataacttacatgtcagcggtggagaaactgtcgttagcaaggcttatcgcttctatgagctagctgtcgaccgtaattttaccaggggccgtagaacaagccatgttgcagctgcttgcctttacattgcctgcaggcaaagtaagaaggcttatcttcttattgatttctctgattatctccaaataagtgtttacgtgctaggtgctgtttttctccagctctgccaagttttgctactcgcggatcatccagttgttcagaaacttgtagatcccagccttttcatccatcgctttaccaaatgtttgctgggaagaagagataatgctgtctcagacacagctttttctcgagaagtctcagacacagctttacgcattgtagctagcatgaagagagattggatgcagactgggaggaaaccaagtggattatgtggtgcagcattatacattgctgcactctctcatgggtgtaattacaccaaggcagatattgtctctgttgtgcatgtgtgtgaggccactctaacgaagcgattgatagagtttgaaaatacggattctggcagcttaacgattgaagaatttctagcaacagctgatgaatataatgaagcgtctgtttcaaaatattcgcctaagtctggggaaatcctttgcaaacacaaggttcactaaactgtcgggtggactagaaggtggtgctaaccctccagcattccaacgagctgaaaacaaaagacttgaagctgctaaaagggctgaagaagctgctgcagttaaggaggcagcgctggaagaatctctttgcgacacacagaattctgagattgagagtaccacaactcctaaaaaggctttaagcggggataaatcttcaacaattggatctgggggactcataaatgactctgtgccaccgaaggatcctgaagagggaggtgaaaattgtgaaggcaatgctgatccagaaagcctttctgacatcgacgatgtagaggttgattggtaccttcacaatgaggaagaaacacaatataaaaagattatctgggaggaaatgaacaaagagtaccttgaggaacaagcagccaaggaagctttggcagctgaattggcagctagagggattgttgtggaagagggaaagaaaaaacggaaacgtaacgaagacaccaagagctcgacgcctgctgacacaccggcagaagccacatacaacatgctgaaacggaagggacttggttccaagatcaatgagggagctgttggcgaattatacaagactaaagatgaagttgagagcgcgagtaggaaagaagagatggagttcgacgcactgtttgggccggacaacgctgatggcgagacggtcgatgatggtggttacggctatgggggctgcggcgatggtggcgcggaagcctacaatggcattgatgacgattttgatttctaggaggatgtgttatgtgtagcagcatttgcagctgaccagcacgggctagattcttcatctgtgcgttatagtttatagttagtttcatttttcttttgttaggggagtttgaccaaatcattatggagctattggatagtgcacttagttttggttgtataataatgttgggaactaggttctgcatgggcgtcgtaactgtcgcaagccctatgtggtcaagcgcctataccatgggcatttgttgtacatcccacctccaaaagattgcaagtggtgatgtaacattttgtattagcaataaaggacacaagaatgcattcatttgaaactttgaaaatctctctctctctctctctc

SEQ ID NO: 72512 - DNA, 1629 bp, Zea Mays
gtttatcagaacatcctaagcgtgctattctgtttgttgcaactaacgagatccttatgtttgctgggaagaagagataatgctgtctcagacacagctttttctcgagaagtctcagacacagctttacgcattgtagctagcatgaagagagattggatgcagactgggaggaaaccaagtggattatgtggtgcagcattatacattgctgcactctctcatgggtgtaattacaccaaggcagatattgtctctgttgtgcatgtgtgtgaggccactctaacgaagcgattgatagagtttgaaaatacggattctggcagcttaacgattgaagaatttctagcaacagctgatgaatataatgaagcgtctgtttcaaaatattcgcctaagtctggggaaatcctttgcaaacacaagggtaaagattttgagcattttgcccatggactttgtgaaaaatgcttcaataagttcactaaactgtcgggtggactagaaggtggtgctaaccctccagcattccaacgagctgaaaacaaaagacttgaagctgctaaaagggctgaagaagctgctgcagttaaggaggcagcgctggaagaatctctttgcgacacacagaattctgagattgagagtaccacaactcctaaaaaggctttaagcggggataaatcttcaacaattggatctgggggactcataaatgactctgtgccaccgaaggatcctgaagagggaggtgaaaattgtgaaggcaatgctgatccagaaagcctttctgacatcgacgatgtagaggttgattggtaccttcacaatgaggaagaaacacaatataaaaagattatctgggaggaaatgaacaaagagtaccttgaggaacaagcagccaaggaagctttggcagctgaattggcagctagagggattgttgtggaagagggaaagaaaaaacggaaacgtaacgaagacaccaagagctcgacgcctgctgacacaccggcagaagccacatacaacatgctgaaacggaagggacttggttccaagatcaatgagggagctgttggcgaattatacaagactaaagatgaagttgagagcgcgagtaggaaagaagagatggagttcgacgcactgtttgggccggacaacgctgatggcgagacggtcgatgatggtggttacggctatgggggctgcggcgatggtggcgcggaagcctacaatggcattgatgacgattttgatttctaggaggatgtgttatgtgtagcagcatttgcagctgaccagcacgggctagattcttcatctgtgcgttatagtttatagttagtttcatttttcttttgttaggggagtttgaccaaatcattatggagctattggatagtgcacttagttttggttgtataataatgttgggaactaggttctgcatgggcgtcgtaactgtcgcaagccctatgtggtcaagcgcctataccatgggcatttgttgtacatcccacctccaaaagattgcaagtggtgatgtaacattttgtattagcaataaaggacacaagaatgcattcatttgaaactttgaaaatctctctctctctctctctc

SEQ ID NO: 72513 - DNA, 698 bp, Zea Mays
caagtttaacaagataaggttaaggttaagcgaaacggaaacgtaacgaagacaccaagagctcgacgcctgctgacacaccggcagaagccacatacaacatgctgaaacggaagggacttggttccaagatcaatgagggagctgttggcgaattatacaagactaaagatgaagttgagagcgcgagtaggaaagaagagatggagttcgacgcactgtttgggccggacaacgctgatggcgagacggtcgatgatggtggttacggctatgggggctgcggcgatggtggcgcggaagcctacaatggcattgatgacgattttgatttctaggaggatgtgttatgtgtagcagcatttgcagctgaccagcacgggctagattcttcatctgtgcgttatagtttatagttagtttcatttttcttttgttaggggagtttgaccaaatcattatggagctattggatagtgcacttagttttggttgtataataatgttgggaactaggttctgcatgggcgtcgtaactgtcgcaagccctatgtggtcaagcgcctataccatgggcatttgttgtacatcccacctccaaaagattgcaagtggtgatgtaacattttgtattagcaataaaggacacaagaatgcattcatttgaaactttgaaaatctctctctctctctctctc

SEQ ID NO: 72514 - DNA, 1817 bp, Zea Mays
ataatgacataattcccgttttctcccgcacggccgcacccaccaccccaccgccgccggaaaccccagccgatcgacggtggcggagatgtcgttgtcctcggtgaagatcggcgaggaggtgtggctcacatgcctctcccacgccctcactaccgagaccgaggaggtcatggggctcctcctcggcgacatcgagctttccagcaaggtcgccacagccctggtatggggggcgtcgccgcagatgaggtgcgagcggaagaaggaccgcgtcgagctcaaccccgagcttctcgccgccgcatccgcgcaagccgagaaaatgacggccaccatcaagaggactacgagggtgatcggatggtaccactcgcacccacatatcaccgttctaccgtcccatgtagatgttcgtacccaagcaatgtttcagttgctggatacaggctttgtgggccttatattttcttgttttagtgaagatgctcaaaaggttggaaaaatccaagtgactgcctttcagtcagagggtggacaacagcatccccttcctcttgccatcgatccagtcattgaccttgattcatcctgtagttcatcagataatgtgtccgcttcacattctgcatcggttgaaggcatggaacaggacacaggggattccagggtctcaaagaataacaaggcctggagaagatctatggattctactcccatcatgacacaaatcattccacaaattatgaacccagagaaagcgtactcgttccgcacaatcctgataacacacaagaagcgtatgttgatccatatgattcagatatgactccaagcctcctggaggctttgcactggtcaactatggacataagtggtgcagagtatagagggaaggaggtaccacttcttgtggtccctacaaggtatctcctcaagctggacaccacgatgatctcttactgtgatatgcagcgagtcctctttgaagaggagaaatcagcatataatcaagctatgcaacaaaatatttgtgatgggaagattcaccctcttacatccattcaccatacatctacatacaactctctctgcaaactaatggagtactggatcgcctgaaggaaaatgaacttcggctatcaatgttacaagaggaggctaagcaacttgaggctgatacccaaaacatgagaaacggttctcctcgtcgcctcatgaatcatggagctggtggcaagagttcacctacggctcagagcaggcatcctttctccaaccaagggagccctagaagcccgagcggtggcagccggaggagggcttgttgatgatcctgttccgcctgatccattggcttgtggcttaaccagatgctccctgaatccccagatatatgatggatggacgaagtgccccggcaatagcactgtacctgtacatacccattgccgtccagcgctgtgctgttgtcgaatcccaacggtctcactttgctttgtagtattggcctattggggttccttatcctgttgtcggagttgtgccattatcctttccatggttgacctgagctttagcctgtacactgtagactctactagaggtttacctgaggctgaattcccgctgctaagatgtgatgttcccggccataagcaaagatgcaggttgtctttgctttgtaaagatgaaggttgtctttgttttgtaatcgaaaaaaaaaccctccgacttcgatagcaatccatttcttgaaacgatatagctataagctgcagccacaccttgcgttgatgatgccaaagctttctttc

SEQ ID NO: 72515 - DNA, 1699 bp, Zea Mays
gacataattcccgttttctcccgcacggccgcacccaccaccccaccgccgccggaaaccccagccgatcgacggtggcggagatgtcgttgtcctcggtgaagatcggcgaggaggtgtggctcacatgcctctcccacgccctcactaccgagaccgaggaggtcatggggctcctcctcggcgacatcgagctttccagcaaggtcgccacagccctggtatggggggcgtcgccgcagatgaggtgcgagcggaagaaggaccgcgtcgagctcaaccccgagcttctcgccgccgcatccgcgcaagccgagaaaatgacggccaccatcaagaggactacgagggtgatcggatggtaccactcgcacccacatatcaccgttctaccgtcccatgtagatgttcgtacccaagcaatgtttcagttgctggatacaggctttgtgggccttatattttcttgttttagtgaagatgctcaaaaggttggaaaaatccaagtgactgcctttcagtcagagggtggacaacagcatccccttcctcttgccatcgatccagtcattgaccttgattcatcctgtagttcatcagataatgtgtccgcttcacattctgcatcggttgaaggcatggaacaggacacaggggattccagggtctcaaagaataacaagtggtgcagagtatagagggaaggaggtaccacttcttgtggtccctacaaggtatctcctcaagctggacaccacgatgatctcttactgtgatatgcagcgagtcctctttgaagaggagaaatcagcatataatcaagctatgcaacaaaatatttgtgatgggaagattcaccctcttacatccattcaccatacatctacatacaactctctctgcaaactaatggagtactggatcgcctgaaggaaaatgaacttcgggtgaatagactagcctgcatcttttgacgactcttggccttgtaagtcattagcattgaacctgcatgtgtcagctatcaatgttacaagaggaggctaagcaacttgaggctgatacccaaaacatgagaaacggttctcctcgtcgcctcatgaatcatggagctggtggcaagagttcacctacggctcagagcaggcatcctttctccaaccaagggagccctagaagcccgagcggtggcagccggaggagggcttgttgatgatcctgttccgcctgatccattggcttgtggcttaaccagatgctccctgaatccccagatatatgatggatggacgaagtgccccggcaatagcactgtacctgtacatacccattgccgtccagcgctgtgctgttgtcgaatcccaacggtctcactttgctttgtagtattggcctattggggttccttatcctgttgtcggagttgtgccattatcctttccatggttgacctgagctttagcctgtacactgtagactctactagaggtttacctgaggctgaattcccgctgctaagatgtgatgttcccggccataagcaaagatgcaggttgtctttgctttgtaaagatgaaggttgtctttgttttgtaatcgaaaaaaaaaccctccgacttcgatagcaatccatttcttgaaacgatatagctataagctgcagccacaccttgcgttgatgatgccaaagctttctttc

SEQ ID NO: 72516 - DNA, 1905 bp, Zea Mays
gacataattcccgttttctcccgcacggccgcacccaccaccccaccgccgccggaaaccccagccgatcgacggtggcggagatgtcgttgtcctcggtgaagatcggcgaggaggtgtggctcacatgcctctcccacgccctcactaccgagaccgaggaggtcatggggctcctcctcggcgacatcgagctttccagcaaggtcgccacagccctggtatggggggcgtcgccgcagatgaggtgcgagcggaagaaggaccgcgtcgagctcaaccccgagcttctcgccgccgcatccgcgcaagccgagatatccttttctcagcttcattttttcttctctgagtttttgcttgttcctcttcctttggtgctgtgtgcggtggtatttggtattttggttttccgggagtagacttaactcctgttcgcacaaaatgacggccaccatcaagaggactacgagggtgatcggatggtaccactcgcacccacatatcaccgttctaccgtcccatatgttcgtacccaagcaatgtttcagttgctggatacaggctttgtgggccttatattttcttgttttagtgaagatgctcaaaaggttggaaaaatccaagtgactgcctttcagtcagagggtggacaacagcatccccttcctcttgccatcgatccagtcattgaccttgattcatcctgtagttcatcagataatgtgtccgcttcacattctgcatcggttgaaggcatggaacaggacacaggggattccagggtctcaaagaataacaaggcctggagaagatctatggattctactcccatcatgacacaaatcattccacaaattatgaacccagagaaagcgtactcgttccgcacaatcctgataacacacaagaagcgtatgttgatccatatgattcagatatgactccaagcctcctggaggctttgcactggtcaactatggacataagtggtgcagagtatagagggaaggaggtaccacttcttgtggtccctacaaggtatctcctcaagctggacaccacgatgatctcttactgtgatatgcagcgagtcctctttgaagaggagaaatcagcatataatcaagctatgcaacaaaatatttgtgatgggaagattcaccctcttacatccattcaccatacatctacatacaactctctctgcaaactaatggagtactgctatcaatgttacaagaggaggctaagcaacttgaggctgatacccaaaacatgagaaacggttctcctcgtcgcctcatgaatcatggagctggtggcaagagttcacctacggctcagagcaggcatcctttctccaaccaagggagccctagaagcccgagcggtggcagccggaggagggcttgttgatgatcctgttccgcctgatccattggcttgtggcttaaccagatgctccctgaatccccagatatatgatggatggacgaagtgccccggcaatagcactgtacctgtacatacccattgccgtccagcgctgtgctgttgtcgaatcccaacggtctcactttgctttgtagtattggcctattggggttccttatcctgttgtcggagttgtgccattatcctttccatggttgacctgagctttagcctgtacactgtagactctactagaggtttacctgaggctgaattcccgctgctaagatgtgatgttcccggccataagcaaagatgcaggttgtctttgctttgtaaagatgaaggttgtctttgttttgtaatcgaaaaaaaaaccctccgacttcgatagcaatccatttcttgaaacgatatagctataagctgcagccacaccttgcgttgatgatgccaaagctttctttc

SEQ ID NO: 72517 - DNA, 2456 bp, Zea Mays
gacataattcccgttttctcccgcacggccgcacccaccaccccaccgccgccggaaaccccagccgatcgacggtggcggagatgtcgttgtcctcggtgaagatcggcgaggaggtgtggctcacatgcctctcccacgccctcactaccgagaccgaggaggtcatggggctcctcctcggcgacatcgagctttccagcaaggtcgccacagccctggtatggggggcgtcgccgcagatgaggtgcgagcggaagaaggaccgcgtcgagctcaaccccgagcttctcgccgccgcatccgcgcaagccgagatatccttttctcagcttcattttttcttctctgagtttttgcttgttcctcttcctttggtgctgtgtgcggtggtatttggtattttggttttccgggagtagacttaactcctgttcgcacaaaatgacggccaccatcaagaggactacgagggtgatcggatggtaccactcgcacccacatatcaccgttctaccgtcccatgtaggtaagaaattcacatttcctccacttgcagatttgtgcttcagctagctcaagtgccctcagtttgatgttggtgtttgtttgtctcataggatagcctaaatgctgtcaaacatgccctactggaatgtgtaggaatttcctgattatattgttatttgcttgcatgctcttctaagtgatttggcccttactaggtaccaactgatgtccacctgccgtttctgataatgtataccaagtatgatagcggcccttggcactaagtagctttgcttttgagtactcgggcttgggaacatggtaaaaatagacattaacttcgctccagagctttaagatgataatttcctttattacaaaggcagagtgtccatttgttgaccatttgacggtggctatggtcctatggagtatggaggtcttgagaattcactagtgtatctgcttttataggttttttctcttcattctcttgtgagatgctgcccatctacaatcagttcaaacttttttttttggtaacccccatgagttgtattttccagatgttcgtacccaagcaatgtttcagttgctggatacaggctttgtgggccttatattttcttgttttagtgaagatgctcaaaaggttggaaaaatccaagtgactgcctttcagtcagagggtggacaacagcatccccttcctcttgccatcgatccagtcattgaccttgattcatcctgtagttcatcagataatgtgtccgcttcacattctgcatcggttgaaggcatggaacaggacacaggggattccagggtctcaaagaataacaaggcctggagaagatctatggattctactcccatcatgacacaaatcattccacaaattatgaacccagagaaagcgtactcgttccgcacaatcctgataacacacaagaagcgtatgttgatccatatgattcagatatgactccaagcctcctggaggctttgcactggtcaactatggacataagtggtgcagagtatagagggaaggaggtaccacttcttgtggtccctacaaggtatctcctcaagctggacaccacgatgatctcttactgtgatatgcagcgagtcctctttgaagaggagaaatcagcatataatcaagctatgcaacaaaatatttgtgatgggaagattcaccctcttacatccattcaccatacatctacatacaactctctctgcaaactaatggagtactgctatcaatgttacaagaggaggctaagcaacttgaggctgatacccaaaacatgagaaacggttctcctcgtcgcctcatgaatcatggagctggtggcaagagttcacctacggctcagagcaggcatcctttctccaaccaagggagccctagaagcccgagcggtggcagccggaggagggcttgttgatgatcctgttccgcctgatccattggcttgtggcttaaccagatgctccctgaatccccagatatatgatggatggacgaagtgccccggcaatagcactgtacctgtacatacccattgccgtccagcgctgtgctgttgtcgaatcccaacggtctcactttgctttgtagtattggcctattggggttccttatcctgttgtcggagttgtgccattatcctttccatggttgacctgagctttagcctgtacactgtagactctactagaggtttacctgaggctgaattcccgctgctaagatgtgatgttcccggccataagcaaagatgcaggttgtctttgctttgtaaagatgaaggttgtctttgttttgtaatcgaaaaaaaaaccctccgacttcgatagcaatccatttcttgaaacgatatagctataagctgcagccacaccttgcgttgatgatgccaaagctttctttc

SEQ ID NO: 72518 - DNA, 1785 bp, Zea Mays
gacataattcccgttttctcccgcacggccgcacccaccaccccaccgccgccggaaaccccagccgatcgacggtggcggagatgtcgttgtcctcggtgaagatcggcgaggaggtgtggctcacatgcctctcccacgccctcactaccgagaccgaggaggtcatggggctcctcctcggcgacatcgagctttccagcaaggtcgccacagccctggtatggggggcgtcgccgcagatgaggtgcgagcggaagaaggaccgcgtcgagctcaaccccgagcttctcgccgccgcatccgcgcaagccgagaaaatgacggccaccatcaagaggactacgagggtgatcggatggtaccactcgcacccacatatcaccgttctaccgtcccatgtagatgttcgtacccaagcaatgtttcagttgctggatacaggctttgtgggccttatattttcttgttttagtgaagatgctcaaaaggttggaaaaatccaagtgactgcctttcagtcagagggtggacaacagcatccccttcctcttgccatcgatccagtcattgaccttgattcatcctgtagttcatcagataatgtgtccgcttcacattctgcatcggttgaaggcatggaacaggacacaggggattccagggtctcaaagaataacaaggcctggagaagatctatggattctactcccatcatgacacaaatcattccacaaattatgaacccagagaaagcgtactcgttccgcacaatcctgataacacacaagaagcgtatgttgatccatatgattcagatatgactccaagcctcctggaggctttgcactggtcaactatggacataagtggtgcagagtatagagggaaggaggtaccacttcttgtggtccctacaaggtatctcctcaagctggacaccacgatgatctcttactgtgatatgcagcgagtcctctttgaagaggagaaatcagcatataatcaagctatgcaacaaaatatttgtgatgggaagattcaccctcttacatccattcaccatacatctacatacaactctctctgcaaactaatggagtactgctatcaatgttacaagaggaggctaagcaacttgaggctgatacccaaaacatgagaaacggttctcctcgtcgcctcatgaatcatggagctggtggcaagagttcacctacggctcagagcaggcatcctttctccaaccaagggagccctagaagcccgagcggtggcagccggaggagggcttgttgatgatcctgttccgcctgatccattggcttgtggcttaaccagatgctccctgaatccccagatatatgatggatggacgaagtgccccggcaatagcactgtacctgtacatacccattgccgtccagcgctgtgctgttgtcgaatcccaacggtctcactttgctttgtagtattggcctattggggttccttatcctgttgtcggagttgtgccattatcctttccatggttgacctgagctttagcctgtacactgtagactctactagaggtttacctgaggctgaattcccgctgctaagatgtgatgttcccggccataagcaaagatgcaggttgtctttgctttgtaaagatgaaggttgtctttgttttgtaatcgaaaaaaaaaccctccgacttcgatagcaatccatttcttgaaacgatatagctataagctgcagccacaccttgcgttgatgatgccaaagctttctttc

SEQ ID NO: 72519 - DNA, 1739 bp, Zea Mays
gacataattcccgttttctcccgcacggccgcacccaccaccccaccgccgccggaaaccccagccgatcgacggtggcggagatgtcgttgtcctcggtgaagatcggcgaggaggtgtggctcacatgcctctcccacgccctcactaccgagaccgaggaggtcatggggctcctcctcggcgacatcgagctttccagcaaggtcgccacagccctggtatggggggcgtcgccgcagatgaggtgcgagcggaagaaggaccgcgtcgagctcaaccccgagcttctcgccgccgcatccgcgcaagccgagaaaatgacggccaccatcaagaggactacgagggtgatcggatggtaccactcgcacccacatatcaccgttctaccgtcccatgtagatgttcgtacccaagcaatgtttcagttgctggatacaggctttgtgggccttatattttcttgttttagtgaagatgctcaaaagttcatcagataatgtgtccgcttcacattctgcatcggttgaaggcatggaacaggacacaggggattccagggtctcaaagaataacaaggcctggagaagatctatggattctactcccatcatgacacaaatcattccacaaattatgaacccagagaaagcgtactcgttccgcacaatcctgataacacacaagaagcgtatgttgatccatatgattcagatatgactccaagcctcctggaggctttgcactggtcaactatggacataagtggtgcagagtatagagggaaggaggtaccacttcttgtggtccctacaaggtatctcctcaagctggacaccacgatgatctcttactgtgatatgcagcgagtcctctttgaagaggagaaatcagcatataatcaagctatgcaacaaaatatttgtgatgggaagattcaccctcttacatccattcaccatacatctacatacaactctctctgcaaactaatggagtactgtttgagtccagctgttactacgctccaggatcgcctgaaggaaaatgaacttcggctatcaatgttacaagaggaggctaagcaacttgaggctgatacccaaaacatgagaaacggttctcctcgtcgcctcatgaatcatggagctggtggcaagagttcacctacggctcagagcaggcatcctttctccaaccaagggagccctagaagcccgagcggtggcagccggaggagggcttgttgatgatcctgttccgcctgatccattggcttgtggcttaaccagatgctccctgaatccccagatatatgatggatggacgaagtgccccggcaatagcactgtacctgtacatacccattgccgtccagcgctgtgctgttgtcgaatcccaacggtctcactttgctttgtagtattggcctattggggttccttatcctgttgtcggagttgtgccattatcctttccatggttgacctgagctttagcctgtacactgtagactctactagaggtttacctgaggctgaattcccgctgctaagatgtgatgttcccggccataagcaaagatgcaggttgtctttgctttgtaaagatgaaggttgtctttgttttgtaatcgaaaaaaaaaccctccgacttcgatagcaatccatttcttgaaacgatatagctataagctgcagccacaccttgcgttgatgatgccaaagctttctttc

SEQ ID NO: 72520 - DNA, 1867 bp, Zea Mays
gacataattcccgttttctcccgcacggccgcacccaccaccccaccgccgccggaaaccccagccgatcgacggtggcggagatgtcgttgtcctcggtgaagatcggcgaggaggtgtggctcacatgcctctcccacgccctcactaccgagaccgaggaggtcatggggctcctcctcggcgacatcgagctttccagcaaggtcgccacagccctggtatggggggcgtcgccgcagatgaggtgcgagcggaagaaggaccgcgtcgagctcaaccccgagcttctcgccgccgcatccgcgcaagccgagaaaatgacggccaccatcaagaggactacgagggtgatcggatggtaccactcgcacccacatatcaccgttctaccgtcccatcaatgtttcagttgctggatacaggctttgtgggccttatattttcttgttttagtgaagatgctcaaaaggttggaaaaatccaagtgactgcctttcagtcagagggtggacaacagcatccccttcctcttgccatcgatccagtcattgaccttgattcatcctgtagttcatcagataatgtgtccgcttcacattctgcatcggttgaaggcatggaacaggacacaggggattccagggtctcaaagaataacaaggcctggagaagatctatggattctactcccatcatgacacaaatcattccacaaattatgaacccagagaaagcgtactcgttccgcacaatcctgataacacacaagaagcgtatgttgatccatatgattcagatatgactccaagcctcctggaggctttgcactggtcaactatggacataagtggtgcagagtatagagggaaggaggtaccacttcttgtggtccctacaaggtatctcctcaagctggacaccacgatgatctcttactgtgatatgcagcgagtcctctttgaagaggagaaatcagcatataatcaagctatgcaacaaaatatttgtgatgggaagattcaccctcttacatccattcaccatacatctacatacaactctctctgcaaactaatggagtactggatcgcctgaaggaaaatgaacttcgggtgaatagactagcctgcatcttttgacgactcttggccttgtaagtcattagcattgaacctgcatgtgtcagctatcaatgttacaagaggaggctaagcaacttgaggctgatacccaaaacatgagaaacggttctcctcgtcgcctcatgaatcatggagctggtggcaagagttcacctacggctcagagcaggcatcctttctccaaccaagggagccctagaagcccgagcggtggcagccggaggagggcttgttgatgatcctgttccgcctgatccattggcttgtggcttaaccagatgctccctgaatccccagatatatgatggatggacgaagtgccccggcaatagcactgtacctgtacatacccattgccgtccagcgctgtgctgttgtcgaatcccaacggtctcactttgctttgtagtattggcctattggggttccttatcctgttgtcggagttgtgccattatcctttccatggttgacctgagctttagcctgtacactgtagactctactagaggtttacctgaggctgaattcccgctgctaagatgtgatgttcccggccataagcaaagatgcaggttgtctttgctttgtaaagatgaaggttgtctttgttttgtaatcgaaaaaaaaaccctccgacttcgatagcaatccatttcttgaaacgatatagctataagctgcagccacaccttgcgttgatgatgccaaagctttctttc

SEQ ID NO: 72521 - DNA, 1653 bp, Zea Mays
gacataattcccgttttctcccgcacggccgcacccaccaccccaccgccgccggaaaccccagccgatcgacggtggcggagatgtcgttgtcctcggtgaagatcggcgaggaggtgtggctcacatgcctctcccacgccctcactaccgagaccgaggaggtcatggggctcctcctcggcgacatcgagctttccagcaaggtcgccacagccctggtatggggggcgtcgccgcagatgaggtgcgagcggaagaaggaccgcgtcgagctcaaccccgagcttctcgccgccgcatccgcgcaagccgagaaaatgacggccaccatcaagaggactacgagggtgatcggatggtaccactcgcacccacatatcaccgttctaccgtcccatgtagatgttcgtacccaagcaatgtttcagttgctggatacaggctttgtgggccttatattttcttgttttagtgaagatgctcaaaaggttggaaaaatccaagtgactgcctttcagtcagagggtggacaacagcatccccttcctcttgccatcgatccagtcattgaccttgattcatcctgtagttcatcagataatgtgtccgcttcacattctgcatcggttgaaggcatggaacaggacacaggggattccagggtctcaaagaataacaagtggtgcagagtatagagggaaggaggtaccacttcttgtggtccctacaaggtatctcctcaagctggacaccacgatgatctcttactgtgatatgcagcgagtcctctttgaagaggagaaatcagcatataatcaagctatgcaacaaaatatttgtgatgggaagattcaccctcttacatccattcaccatacatctacatacaactctctctgcaaactaatggagtactgtttgagtccagctgttactacgctccaggatcgcctgaaggaaaatgaacttcggctatcaatgttacaagaggaggctaagcaacttgaggctgatacccaaaacatgagaaacggttctcctcgtcgcctcatgaatcatggagctggtggcaagagttcacctacggctcagagcaggcatcctttctccaaccaagggagccctagaagcccgagcggtggcagccggaggagggcttgttgatgatcctgttccgcctgatccattggcttgtggcttaaccagatgctccctgaatccccagatatatgatggatggacgaagtgccccggcaatagcactgtacctgtacatacccattgccgtccagcgctgtgctgttgtcgaatcccaacggtctcactttgctttgtagtattggcctattggggttccttatcctgttgtcggagttgtgccattatcctttccatggttgacctgagctttagcctgtacactgtagactctactagaggtttacctgaggctgaattcccgctgctaagatgtgatgttcccggccataagcaaagatgcaggttgtctttgctttgtaaagatgaaggttgtctttgttttgtaatcgaaaaaaaaaccctccgacttcgatagcaatccatttcttgaaacgatatagctataagctgcagccacaccttgcgttgatgatgccaaagctttctttc

SEQ ID NO: 72522 - DNA, 1730 bp, Zea Mays
cataattcccgttttctcccgcacggccgcacccaccaccccaccgccgccggaaaccccagccgatcgacggtggcggagatgtcgttgtcctcggtgaagatcggcgaggaggtgtggctcacatgcctctcccacgccctcactaccgagaccgaggaggtcatggggctcctcctcggcgacatcgagctttccagcaaggtcgccacagccctggtatggggggcgtcgccgcagatgaggtgcgagcggaagaaggaccgcgtcgagctcaaccccgagcttctcgccgccgcatccgcgcaagccgagaaaatgacggccaccatcaagaggactacgagggtgatcggatggtaccactcgcacccacatatcaccgttctaccgtcccatgtagatgttcgtacccaagcaatgtttcagttgctggatacaggctttgtgggccttatattttcttgttttagtgaagatgctcaaaaggttggaaaaatccaagtgactgcctttcagtcagagggtggacaacagcatccccttcctcttgccatcgatccagtcattgaccttgattcatcctgtagttcatcagataatgtgtccgcttcacattctgcatcggttgaaggcatggaacaggacacaggggattccagggtctcaaagaataacaaggcctggagaagatctatggattctactcccatcatgacacaaatcattccacaaattatgaacccagagaaagcgtactcgttccgcacaatcctgataacacacaagaagcgtatgttgatccatatgattcagatatgactccaagcctcctggaggctttgcactggtcaactatggacataagtggtgcagagtatagagggaaggaggtaccacttcttgtggtccctacaagtgatgggaagattcaccctcttacatccattcaccatacatctacatacaactctctctgcaaactaatggagtactgtttgagtccagctgttactacgctccaggatcgcctgaaggaaaatgaacttcggctatcaatgttacaagaggaggctaagcaacttgaggctgatacccaaaacatgagaaacggttctcctcgtcgcctcatgaatcatggagctggtggcaagagttcacctacggctcagagcaggcatcctttctccaaccaagggagccctagaagcccgagcggtggcagccggaggagggcttgttgatgatcctgttccgcctgatccattggcttgtggcttaaccagatgctccctgaatccccagatatatgatggatggacgaagtgccccggcaatagcactgtacctgtacatacccattgccgtccagcgctgtgctgttgtcgaatcccaacggtctcactttgctttgtagtattggcctattggggttccttatcctgttgtcggagttgtgccattatcctttccatggttgacctgagctttagcctgtacactgtagactctactagaggtttacctgaggctgaattcccgctgctaagatgtgatgttcccggccataagcaaagatgcaggttgtctttgctttgtaaagatgaaggttgtctttgttttgtaatcgaaaaaaaaaccctccgacttcgatagcaatccatttcttgaaacgatatagctataagctgcagccacaccttgcgttgatgatgccaaagctttctttc

SEQ ID NO: 72523 - DNA, 1785 bp, Zea Mays
ctttgcttttgagtactcgggcttgggaacatggtaaaaatagacattaacttcgctccagagctttaagatgataatttcctttattacaaaggcagagtgtccatttgttgaccatttgacggtggctatggtcctatggagtatggaggtcttgagaattcactagtgtatctgcttttatagatgttcgtacccaagcaatgtttcagttgctggatacaggctttgtgggccttatattttcttgttttagtgaagatgctcaaaaggttggaaaaatccaagtgactgcctttcagtcagagggtggacaacagcatccccttcctcttgccatcgatccagtcattgaccttgattcatcctgtagttcatcagataatgtgtccgcttcacattctgcatcggttgaaggcatggaacaggacacaggggattccagggtctcaaagaataacaaggcctggagaagatctatggattctactcccatcatgacacaaatcattccacaaattatgaacccagagaaagcgtactcgttccgcacaatcctgataacacacaagaagcgtatgttgatccatatgattcagatatgactccaagcctcctggaggctttgcactggtcaactatggacataagtggtgcagagtatagagggaaggaggtaccacttcttgtggtccctacaaggtatctcctcaagctggacaccacgatgatctcttactgtgatatgcagcgagtcctctttgaagaggagaaatcagcatataatcaagctatgcaacaaaatatttgtgatgggaagattcaccctcttacatccattcaccatacatctacatacaactctctctgcaaactaatggagtactggtgagagcacagtctccttgtctcatttcagctaaattaatatactgcataatatcagttaatttatgtgattcacattttattcaatagtttgagtccagctgttactacgctccaggatcgcctgaaggaaaatgaacttcgggtgaatagactagcctgcatcttttgacgactcttggccttgtaagtcattagcattgaacctgcatgtgtcagctatcaatgttacaagaggaggctaagcaacttgaggctgatacccaaaacatgagaaacggttctcctcgtcgcctcatgaatcatggagctggtggcaagagttcacctacggctcagagcaggcatcctttctccaaccaagggagccctagaagcccgagcggtggcagccggaggagggcttgttgatgatcctgttccgcctgatccattggcttgtggcttaaccagatgctccctgaatccccagatatatgatggatggacgaagtgccccggcaatagcactgtacctgtacatacccattgccgtccagcgctgtgctgttgtcgaatcccaacggtctcactttgctttgtagtattggcctattggggttccttatcctgttgtcggagttgtgccattatcctttccatggttgacctgagctttagcctgtacactgtagactctactagaggtttacctgaggctgaattcccgctgctaagatgtgatgttcccggccataagcaaagatgcaggttgtctttgctttgtaaagatgaaggttgtctttgttttgtaatcgaaaaaaaaaccctccgacttcgatagcaatccatttcttgaaacgatatagctataagctgcagccacaccttgcgttgatgatgccaaagctttctttc

SEQ ID NO: 72524 - DNA, 1307 bp, Zea Mays
ctccaactccaactgtcgcccgccggtagccgcgctcgcggcagtggacctcgcctcctgcgcggctgtgcccagactgctgtgctgtttcggtctcttcggttggcagcagccacgccgggaacaagatggcggcggcgttgccgcagctggacgacgagatcgtccacggcatggccatcggcgctgtcttcacggactataccgggaagatcaattgcctcgacttccaccgcacggaagatctcatgatcacctctagcgaggacgactccatccgcctatacaacatcaccagcgcgacgttgttaaagactacgtatcacaggaaacatggtgctgaccgtgtctgttttagtcatcatccaagttctatcttatgctcttcacgatgctgagagatgttccgtttcgtctcagggtcgtttcattatgtatgtcacctgtcaatgatagctttatgtcaggatcacttgatcacagtgtcagaatatgggatcttcgggtaaatgcttgtcagggcatactaaggctgcgtggtagaccttctgttgcatatgatcaacagggacttgtttttgctgtagcaatggaaggtggtgctattaatttatttgattcccgatcttatgacaagggtccattcgacactttcttggttggtggagatacagctgaagtttctgacatcaaatttagcaatgatggcaagtctatgcttttgacaacaactaacaaccatatatatgttctggatgcatatgttggggataagaggtgtggttttagtttagagccatctcccaatgtaacaaatgaagctgctttcactccagatggtcaatatgtaatttcaggatcaggtgatggaacactgcacgcttggaacatcaatacagtacaagaggttgcttgttggaacagtcgcattggtcctattacagcattgaagtgggcccctcgtcgagccatgtttgcaaccgcatcaactgccctaactttctggattcccaaccgatcgaattaggatcaggtgcctggaaaaacaaggggtggaatttcatatatgttaacttggcaaatgtttatgctctgttgttttctccaaaagatagatgccatgtatgaaatcacttcattaccatttacggaggcaatggcatagttccaggcagataccggttaaattgttgtgttagcactcataaaggtttttttggtgatttactctggacttgtgcttcgaaaaacaggcgcttgtaacttctggaaaccactgatttaatatggacatgttggagaatcat

SEQ ID NO: 72525 - DNA, 1359 bp, Zea Mays
ctccaactccaactgtcgcccgccggtagccgcgctcgcggcagtggacctcgcctcctgcgcggctgtgcccagactgctgtgctgtttcggtctcttcggttggcagcagccacgccgggaacaagatggcggcggcgttgccgcagctggacgacgagatcgtccacggcatggccatcggcgctgtcttcacggactataccgggaagatcaattgcctcgacttccaccgcacggaagatctcatgatcacctctagcgaggacgactccatccgcctatacaacatcaccagcgcgacgttgttaaagactacgtatcacaggaaacatggtgctgaccgtgtctgttttagtcatcatccaagttctatcttatgctcttcacggtacaacctagagtctatagagtcacttcgttatctgtcattgtatgacaaccgttgcttaagatacttcaaaggacacaaagacagggtcgtttcattatgtatgtcacctgtcaatgatagctttatgtcaggatcacttgatcacagtgtcagaatatgggatcttcgggtaaatgcttgtcagggcatactaaggctgcgtggtagaccttctgttgcatatgatcaacagggacttgtttttgctgtagcaatggaaggtggtgctattaatttatttgattcccgatcttatgacaagggtccattcgacactttcttggttggtggagatacagctgaagtttctgacatcaaatttagcaatgatggcaagtctatgcttttgacaacaactaacaaccatatatatgttctggatgcatatgttggggataagaggtgtggttttagtttagagccatctcccaatgtaacaaatgaagctgctttcactccagatggtcaatatgtaatttcaggtgatggaacactgcacgcttggaacatcaatacagtacaagaggttgcttgttggaacagtcgcattggtcctattacagcattgaagtgggcccctcgtcgagccatgtttgcaaccgcatcaactgccctaactttctggattcccaaccgatcgaattaggatcaggtgcctggaaaaacaaggggtggaatttcatatatgttaacttggcaaatgtttatgctctgttgttttctccaaaagatagatgccatgtatgaaatcacttcattaccatttacggaggcaatggcatagttccaggcagataccggttaaattgttgtgttagcactcataaaggtttttttggtgatttactctggacttgtgcttcgaaaaacaggcgcttgtaacttctggaaaccactgatttaatatggacatgttggagaatcat

SEQ ID NO: 72526 - DNA, 1292 bp, Zea Mays
ctccccctcgcgcgtcgcgcggcagtctgggcacaacacgccgccgccgtggcacggctcgcccagcgccgagccggctgcccgcctgaccgcctccccacctcttccccttcctcgcaagtggagcaccaggaaccgtcgtgcccctccctcttcctctcccccactctcgctccccattgaggtcacgccattgatgacgttaatggccgccgccgaccattacttcctctccggcgcgctctctctcttctctctctataaaaactcaatgccacacccatggacacttccctcggccgccgagctcgcccacgcctctcctccctctttgtcgttgtacttcgccgccggccgaccttggctcgccgtcctcgacgttcgtcgccactagaacacctctgtccacgtcctcgccaccgactcgagctcggagcgccactatccacctcccttgatcgcctcatccaccgccgtccggaactccactcgctgtcagcccctgagcgcaagaaacagaggggggaagaagctgattttgtggtagaagatcagaatacgttcgaggacgatccacaggacacgtttgagtaagatggtgcgcactctccaaacgacccgcgtgaacaccaacggtatccctccacccaggcaggctcctttctaccagttgtggtggaagaagtcccggtggagcaccaccttcatgtggggaatggagtgatcttggaggacagctctgaggagattttggcaacacacactccattgtcagagtctcatgcctttgctgctggagcttcatcttcagtaccgccagtgccagcacctcaagccccgactcctataggcgatgatccggatgattctggtgatggtggagacgatgatgatgagacaaatgagagcacctagaggggggtgaataggtgatcttgtaaaaaacaacttaacaaaacaaacttggactagtattagattagtgaaagctaaggccaagtttgagagaggagtatgagcagagaaaacttcttcacttaattgctcttcacaagatgagtattaaacttagagcaattatgaagtgaatagaagtagagagaatcgcacaacaataaagacaagtgacacaacgattttatgacgtggttcgatcaagtagaatacttgtgtcacacccggttttagaaggcaaatcgaatgcgaaccatgtacgtaccaggatcagaaactcacgtacacagcgattacatagttggacatcatcacacattgctcaaagtaaatagcgg

SEQ ID NO: 72527 - DNA, 3665 bp, Zea Mays
cggcagtctgggcacaacacgccgccgccgtggcacggctcgcccagcgccgagccggctgcccgcctgaccgcctccccacctcttccccttcctcgcaagtggagcaccaggaaccgtcgtgcccctccctcttcctctcccccactctcgctccccattgaggtcacgccattgatgacgttaatggccgccgccgaccattacttcctctccggcgcgctctctctcttctctctctataaaaactcaatgccacacccatggacacttccctcggccgccgagctcgcccacgcctctcctccctctttgtcgttgtacttcgccgccggccgaccttggctcgccgtcctcgacgttcgtcgccactagaacacctctgtccacgtcctcgccaccgactcgagctcggagcgccactatccacctcccttgatcgcctcatccaccgccgtccggaactccactcgctgtcagcccctgagcgcaagaaacagaggggggaaggtagaagaagtggatttttgctagctagcccctggtgtttgtttaatttgtgcagaattattttatcagctcaaaagtgttatattaggtccttgcaatcttccgttctacccctagaagtctatggttaatcccgtatgtgacccctgcagcaactattctattttaaaaaatttaattgaacccatatgtaatgatgttgatcatacatgttttatatgtatgtgttagcatgttagaatacttttttgtgacaagattcatatatccacaaatcgatttaaattatgttgttgttgttgtttaatcgtagtttctgctaatataagaaataggaaggaatggtagaccatatatttgtagcataagcgctagatgattatttatgagtcttccattgcttatattgtgatttgtatttgtaaacaagacaaattttcatatgcgcaatatatgcacattggtttatgcactaagaaataatagagtttttattaatattgagatgatataattatgatcatgcccactatagtctaaaaggtagtttaatataattcttttaatgaaccatacattatgtgtcttctagaataacttcgtggcgtctaatatagtaccttttagaaagaaagaataaaacttatatgtgacttgtgtcttccggtagaaataaattaattagtaattaaaccaaatccatagaggttgatttaagctacatctatgttatgaacttatatagtatttgtttccacagttaacttgccatataatcgtttctagggaaatagtgaagtaaaatcaataatattttatgccatatgcgaatagagtaactaccacaatattttggtttatattattataagttacgaaccaagctatatgattggatgttctctttctttttttataatgttgaattgtataatgtatgttttattgtttgattggtgtatgtttatttattggtgtataatttcttttgtacgtacgatatgtgaatctataatagaagctgattttgtggtagaagatcagaatacgttcgaggacgatccacaggacacgtttgagtaaggcaagtggattctccctttgcatttctgttcgtacccaaataatacatataataatgtttacttttgaatatttgcataatttgatggattttgcctaaataggactacttagaaatactaaccatattcgttgtttaacctaggatttaagccatgcttattagttatgttgttgctcaattttatcactatgatgttactctttgaagatattatttttccagaaatgaaatatatattgttgttttaatctgatggttaaataagatcgaattttattaaacggaacatggagtgaccacctaagataaaagtgtaaccacgagtgctattatggctctggctttggtaatttgcttaatttgcttagtacttagcaacctttcctgaaatatgggcaagaggaggagcggttgatagtggcagctcatgttaacatggggacgtagtcttggctaagctgcctcgcctagagggcctccacaccgacttagaaaccttagctggttgtttcgtactatgtgtattttgtgaaaacctcataatggacccctagccattcacctcagcagtgtttacgggtccgtacaacccaggctagatgggatacatggcttgtgggtaaagttgtaccacctctgcagagtgtcaaactgatatgtcaaccgtgctcacggagtcacagttaagagcaacctggacccttacatgataactagacttaaagatggagaatcgatcgtgatccgatgatttatacatggtttgcttaagtggtttcacttaggtgcttttgatataatcatatgcttatgattaattgggaattttgggatacacttacaattagtaagttaggcgttgttaataaaatattgaccaactaaaatgcttaccgcttaaccatagcctaccttgttaaccttgcataactcctcccacttgctgagcccccaccataagtgagctcaccccttgctaaattttttatcagaaggtgatgagaaagactttgacgaagatattgacgattactgagtctagcgacgctccggtcatctttctgtgggagattacccatgttatttctgctgtactttgatgatgatactatttaagactttttttgtctcgatgatgtaataaagttattatactccctttacacatttattgcattgtcttttgatatattacacttgtgacatcaacatatgtgtggaaagtggttcctgacacacatatgctatgcattcggttttgccccaaaaccgggtgtgaagaagtggtatcaaagttatgctgactctaggtcgttagactagttagaaatggaaagcccagtctattcaaaatatgcttattttgcctttacaaatttattttattaattttgcctttttaaaattcaactaaggtgacattttcttcttgtagatggtgcgcactctccaaacgacccgcgtgaacaccaacggtatccctccacccaggcaggctcctttctaccagttgtggtggaagaagtcccggtggagcaccaccttcatgtggggaatggagtgatcttggaggacagctctgaggagattttggcaacacacactccattgtcagagtctcatgcctttgctgctggagcttcatcttcagtaccgccagtgccagcacctcaagccccgactcctataggcgatgatccggatgattctggtgatggtggagacgatgatgatgagacaaatgagagcacctagaggggggtgaataggtgatcttgtaaaaaacaacttaacaaaacaaacttggactagtattagattagtgaaagctaaggccaagtttgagagaggagtatgagcagagaaaacttcttcacttaattgctcttcacaagatgagtattaaacttagagcaattatgaagtgaatagaagtagagagaatcgcacaacaataaagacaagtgacacaacgattttatgacgtggttcgatcaagtagaatacttgtgtcacacccggttttagaaggcaaatcgaatgcgaaccatgtacgtaccaggatcag

SEQ ID NO: 72528 - DNA, 2291 bp, Zea Mays
cggcagtctgggcacaacacgccgccgccgtggcacggctcgcccagcgccgagccggctgcccgcctgaccgcctccccacctcttccccttcctcgcaagtggagcaccaggaaccgtcgtgcccctccctcttcctctcccccactctcgctccccattgaggtcacgccattgatgacgttaatggccgccgccgaccattacttcctctccggcgcgctctctctcttctctctctataaaaactcaatgccacacccatggacacttccctcggccgccgagctcgcccacgcctctcctccctctttgtcgttgtacttcgccgccggccgaccttggctcgccgtcctcgacgttcgtcgccactagaacacctctgtccacgtcctcgccaccgactcgagctcggagcgccactatccacctcccttgatcgcctcatccaccgccgtccggaactccactcgctgtcagcccctgagcgcaagaaacagaggggggaaggtagaagaagtggatttttgctagctagcccctggtgtttgtttaatttgtgcagaattattttatcagctcaaaagtgttatattaggtccttgcaatcttccgttctacccctagaagtctatggttaatcccgtatgtgacccctgcagcaactattctattttaaaaaatttaattgaacccatatgtaatgatgttgatcatacatgttttatatgtatgtgttagcatgttagaatacttttttgtgacaagattcatatatccacaaatcgatttaaattatgttgttgttgttgtttaatcgtagtttctgctaatataagaaataggaaggaatggtagaccatatatttgtagcataagcgctagatgattatttatgagtcttccattgcttatattgtgatttgtatttgtaaacaagacaaattttcatatgcgcaatatatgcacattggtttatgcactaagaaataatagagtttttattaatattgagatgatataattatgatcatgcccactatagtctaaaaggtagtttaatataattcttttaatgaaccatacattatgtgtcttctagaataacttcgtggcgtctaatatagtaccttttagaaagaaagaataaaacttatatgtgacttgtgtcttccggtagaaataaattaattagtaattaaaccaaatccatagaggttgatttaagctacatctatgttatgaacttatatagtatttgtttccacagttaacttgccatataatcgtttctagggaaatagtgaagtaaaatcaataatattttatgccatatgcgaatagagtaactaccacaatattttggtttatattattataagttacgaaccaagctatatgattggatgttctctttctttttttataatgttgaattgtataatgtatgttttattgtttgattggtgtatgtttatttattggtgtataatttcttttgtacgtacgatatgtgaatctataatagaagctgattttgtggtagaagatcagaatacgttcgaggacgatccacaggacacgtttgagtaagatggtgcgcactctccaaacgacccgcgtgaacaccaacggtatccctccacccaggcaggctcctttctaccagttgtggtggaagaagtcccggtggagcaccaccttcatgtggggaatggagtgatcttggaggacagctctgaggagattttggcaacacacactccattgtcagagtctcatgcctttgctgctggagcttcatcttcagtaccgccagtgccagcacctcaagccccgactcctataggcgatgatccggatgattctggtgatggtggagacgatgatgatgagacaaatgagagcacctagaggggggtgaataggtgatcttgtaaaaaacaacttaacaaaacaaacttggactagtattagattagtgaaagctaaggccaagtttgagagaggagtatgagcagagaaaacttcttcacttaattgctcttcacaagatgagtattaaacttagagcaattatgaagtgaatagaagtagagagaatcgcacaacaataaagacaagtgacacaacgattttatgacgtggttcgatcaagtagaatacttgtgtcacacccggttttagaaggcaaatcgaatgcgaaccatgtacgtaccaggatcagaaactcacgtacacagcgattacatagttggacatcatcacacattgctcaaagtaaatagcgg

SEQ ID NO: 72529 - DNA, 1154 bp, Zea Mays
gccggctgcccgcctgaccgcctccccacctcttccccttcctcgcaagtggagcaccaggaaccgtcgtgcccctccctcttcctctcccccactctcgctccccattgaggtcacgccattgatgacgttaatggccgccgccgaccattacttcctctccggcgcgctctctctcttctctctctataaaaactcaatgccacacccatggacacttccctcggccgccgagctcgcccacgcctctcctccctctttgtcgttgtacttcgccgccggccgaccttggctcgccgtcctcgacgttcgtcgccactagaacacctctgtccacgtcctcgccaccgactcgagctcggagcgccactatccacctcccttgatcgcctcatccaccgccgtccggaactccactcgctgtcagcccctgagcgcaagaaacagaggggggaagatggtgcgcactctccaaacgacccgcgtgaacaccaacggtatccctccacccaggcaggctcctttctaccagttgtggtggaagaagtcccggtggagcaccaccttcatgtggggaatggagtgatcttggaggacagctctgaggagattttggcaacacacactccattgtcagagtctcatgcctttgctgctggagcttcatcttcagtaccgccagtgccagcacctcaagccccgactcctataggcgatgatccggatgattctggtgatggtggagacgatgatgatgagacaaatgagagcacctagaggggggtgaataggtgatcttgtaaaaaacaacttaacaaaacaaacttggactagtattagattagtgaaagctaaggccaagtttgagagaggagtatgagcagagaaaacttcttcacttaattgctcttcacaagatgagtattaaacttagagcaattatgaagtgaatagaagtagagagaatcgcacaacaataaagacaagtgacacaacgattttatgacgtggttcgatcaagtagaatacttgtgtcacacccggttttagaaggcaaatcgaatgcgaaccatgtacgtaccaggatcagaaactcacgtacacagcgattacatagttggacatcatcacacattgctcaaagtaaatagcgg

SEQ ID NO: 72530 - DNA, 1177 bp, Zea Mays
ccacctcttccccttcctcgcaagtggagcaccaggaaccgtcgtgcccctccctcttcctctcccccactctcgctccccattgaggtcacgccattgatgacgttaatggccgccgccgaccattacttcctctccggcgcgctctctctcttctctctctataaaaactcaatgccacacccatggacacttccctcggccgccgagctcgcccacgcctctcctccctctttgtcgttgtacttcgccgccggccgaccttggctcgccgtcctcgacgttcgtcgccactagaacacctctgtccacgtcctcgccaccgactcgagctcggagcgccactatccacctcccttgatcgcctcatccaccgccgtccggaactccactcgctgtcagcccctgagcgcaagaaacagaggggggaagaagatcagaatacgttcgaggacgatccacaggacacgtttgagtaagatggtgcgcactctccaaacgacccgcgtgaacaccaacggtatccctccacccaggcaggctcctttctaccagttgtggtggaagaagtcccggtggagcaccaccttcatgtggggaatggagtgatcttggaggacagctctgaggagattttggcaacacacactccattgtcagagtctcatgcctttgctgctggagcttcatcttcagtaccgccagtgccagcacctcaagccccgactcctataggcgatgatccggatgattctggtgatggtggagacgatgatgatgagacaaatgagagcacctagaggggggtgaataggtgatcttgtaaaaaacaacttaacaaaacaaacttggactagtattagattagtgaaagctaaggccaagtttgagagaggagtatgagcagagaaaacttcttcacttaattgctcttcacaagatgagtattaaacttagagcaattatgaagtgaatagaagtagagagaatcgcacaacaataaagacaagtgacacaacgattttatgacgtggttcgatcaagtagaatacttgtgtcacacccggttttagaaggcaaatcgaatgcgaaccatgtacgtaccaggatcagaaactcacgtacacagcgattacatagttggacatcatcacacattgctcaaagtaaatagcgg

SEQ ID NO: 72531 - DNA, 806 bp, Zea Mays
agatagatcgcctgtgcaccctaagtctatccgtcagaacctcaagatgcccccggggaagaaggggccgcgagtcccacggtgtcacgcggatacagaacctactcctacagactatgagaaacagagggcaattacaatcatgaagaataatcaaatgatgcaacggttagggattcgtcaattacaatcaatgatggctagtattccaagtggaaggatgaacgataatgctcctcacgaatctggatcgttgtatgatggtgatgatattgaggactctgaggatgagatggtcagtaaggaatccctagttgataagtctgtagccagccacatccccaacaatggtgctgaaatctcttcgaaaaatacaagagcctctaaaagggttgttgcacctggagtgcaagaacaaccaattagagtcactaggcgaaggagtgctaccataaaccaagagtccaaccaaaatataatggctggtatactgtctgattcttgtgatgccacaaaccaagattgcacccaacgcatatctactgttgtacaacctagttcaccaatagagaccgagagcgaagatcccactggagaccaagaactagtaccaaggcaaagaagtatgggcaggcaacttgagtcattaagcagaggattaggcattaagattccaatccagattcgtgaagggaaaagaagaccagaggcacctatccaagctgccaaatttgcatcagagggtgggatcgtacttagacaacacatgccaatattttcacattggaaggagtacaagaagaaag

SEQ ID NO: 72532 - DNA, 768 bp, Zea Mays
gtcagaacctcaagatgcccccggggaagaaggggccgcgagtcccacggtgtcacgcggaacctactcctacagactatgagaaacagagggcaattacaatcatgaagaataatcaaatgatgcaacggttagggattcgtcaattacaatcaatgatggctagtattccaagtggaaggatgaacgataatgctcctcacgaatctggatcgttgtatgatggtgatgatattgaggactctgaggatgagatggtcagtaaggaatccctagttgataagtctgtagccagccacatccccaacaatggtgctgaaatctcttcgaaaaatacaagagcctctaaaagggttgttgcacctggagtgcaagaacaaccaattagagtcactaggcgaaggagtgctaccataaaccaagagtccaaccaaaatataatggctggtatactgtctgattcttgtgatgccacaaaccaagattgcacccaacgcatatctactgttgtacaacctagttcaccaatagagaccgagagcgaagatcccactggagaccaagaactagtaccaaggcaaagaagtatgggcaggcaacttgagtcattaagcagaggattaggcattaagattccaatccagattcgtgaagggaaaagaagaccagaggcacctatccaagctgccaaatttgcatcagagggtgggatcgtacttagacaacacatgccaatattttcacattggaaggagtacaagaagaaag

SEQ ID NO: 72533 - DNA, 614 bp, Zea Mays
ggaaacttctagtagaaatgtggtctacctcaaagcacaaggacacatgtatgaagaacaaaattagtcgtgaacaagtaaagtttccacaaggcacaggctctcaatcctacgttgcaaaggcatactcattgaagcaagaaaaatttaaagataccgaacctagtgcaattgatcttttcaaggagatgcattgcagcaagaagaaagggtttagtgaaactgtccagaaagctattgttgacatggaatcaatggcagcaacaccagttgaagatggacatcattcaaagtcttcaacagaagtagtctcccaagtgctgcctaaatcaagtttattccttcagaatgtaggcttggccacctctaacagaagctcttcaggaaatgtttcagcaaaggtgcagcaacttgagtctcaattggagactgagcggcaagaaaaagacggactacgagatgaagtccaaagcttgaaggctaagacacaggcatctgacgagaccattgctaagcaatctgatgagattgcagatttgaagaagtccatagcagaaaacaatagcctccttcgccagattttaagcatcaatcgtagccaagtgtctccttaa

SEQ ID NO: 72534 - DNA, 2344 bp, Zea Mays
gcacccgctctcgtactcgtaggcaaggcaacttcgcaaaacggcaaaaaggcagccacgccttgttcatttttatttttttaatctcctcccgtcggcgaaattttacacgccagcaaaaccgccctgaggatgaaatagaaaaaaccccaaacaagccctaacgcgtcccccggaaccagaacaagtccagtctgtccagaaatacattagaaaaaagagccaaagaggagaacaccggccggcgaggtggacgaagcggcccgccgaggaaatggcgtcgatgcagagctggcgcaaggcctacggcgccatcaaggacaccaccaccgttagcatcgccaatctcaactccgacttcaaggatctggatgtggcgatcgtgaaggcgactaaccacgtggagtgcccgcctaaggagcgacacctgcgcagggttgttgcagcgacgtccatcaccaggcctcgggcagatgtcgcctactgcatccacgcgcttgcccgccgtcttgccaagacccgcaactggatcgttgctctaaaagcacttgtagtgatccatagacttcttcgcgagggtgatcctacatttcgagaagagcttctcaactttacacagaggggacggatcctgcaactttcaaactttaaggatgactccagtccaattgcttgggattgttctgcctgggtgcgcacatatggtttgtatttggaggaaaggttggaatgcttcagagttctgaaatatgatgtcgaagctgagcgcttgtccaaacaaggtcaaggtcctgaaaagggtcacagtagaacgagagagttggattcacaggatctgttagagcagctgccagcattgcagcagttactgtaccgacttgttggatgtcggcctgaaggagctgcaaataataactacttggtgcaatatgctcttgctttggtgctaaaagaaagctttaaaatttattgtgcaataaatgatggaatcataaacctcgttgataagttttttgagatgccaagacatgatgcacttaaagctcttgaaatctacagaagggctggccaacaggctgggaatctatctgatttctacgagaattgccggggattagaacttgctaggaattttcagtttcccactctgagggagccaccacaaacatttcttgctactatggaggactatgtgaaggaggctccacgcatggtcccagttcgagaacccctggaacttcctgagaggctgcttcttacatacaaacctgaagaatcagaggaaattcttgagcctgctcctgttgaagaggaaaaagtaccagttgaagaacctgttcttgtaccacctgttactgaagttgtttcacctcctcccaaggctgagggcttagatgatacaaatcctgctgtatcagctatagaggaaagcaatgctcttgccttggctattgttccaacagatggcgcttcaacaactggtaacactgcatttcaagataaggggtttgatcctacaggatgggaacttgcccttgttactgcaccaagcaatacaacttcatctacttctgttggtcaattgggtggtggactcgacaagctcattttggagagcctttatgatgatggggcctacaggcagaggcaacaacaacagctgtatggttcagcagctcctaatccattcatggcaaatgatcctttcgcgatgtcgaaccaagttgctcctccaccatcagttcaaatggctgccatgtctcagcagcatcagcaaatcccaacgatgatgcaaccaaatccctttggaccacctatgcatccacaggtgagcatggcccctgcaacaaacaatccctttctggatgctggcttcggggcattcccagcggcgaacaacggccatcagcaacacaacccatttggcagtgcccaacttctgtaggtcacttagtcacaagagcaaatttgtgccccagcagatgcgatttttgtgtgattatatcatgcattgtgctggacctttcttgcatgtgacgcgtgtattatgttatggcttcaccacacggagagctgtgcctatgtcgtgacccaactcttgttgtaaagaaattagtcacctgtgtaacatccaatatatgtcaataaacagtaggcagtgttattacatctataaacaaaagaacagtggtatgtaggaaattcttaatattgtttattccattgctttttatcttcttggaaagctgttccgttgttgtttgattgccactcttttgcatgcattgtgattgatcatcatgtgctcattcgaatattctaagccaataatggagcgttgctg

SEQ ID NO: 72535 - DNA, 2357 bp, Zea Mays
gcacccgctctcgtactcgtaggcaaggcaacttcgcaaaacggcaaaaaggcagccacgccttgttcatttttatttttttaatctcctcccgtcggcgaaattttacacgccagcaaaaccgccctgaggatgaaatagaaaaaaccccaaacaagccctaacgcgtcccccggaaccagaacaagtccagtctgtccagaaatacattagaaaaaagagccaaagaggagaacaccggccggcgaggtggacgaagcggcccgccgaggaaatggcgtcgatgcagagctggcgcaaggcctacggcgccatcaaggacaccaccaccgttagcatcgccaatctcaactccgacttcaaggatctggatgtggcgatcgtgaaggcgactaaccacgtggagtgcccgcctaaggagcgacacctgcgcagggttgttgcagcgacgtccatcaccaggcctcgggcagatgtcgcctactgcatccacgcgcttgcccgccgtcttgccaagacccgcaactggatcgttgctctaaaagcacttgtagtgatccatagacttcttcgcgagggtgatcctacatttcgagaagagcttctcaactttacacagaggggacggatcctgcaactttcaaactttaaggatgactccagtccaattgcttgggattgttctgcctgggtgcgcacatatggtttgtatttggaggaaaggttggaatgcttcagagttctgaaatatgatgtcgaagctgagcgcttgtccaaacaaggtcaaggtcctgaaaagggtcacagtagaacgagagagttggattcacaggatctgttagagcagctgccagcattgcagcagttactgtaccgacttgttggatgtcggcctgaaggagctgcaaataataactacttggtgcaatatgctcttgctttggtgctaaaagaaagctttaaaatttattgtgcaataaatgatggaatcataaacctcgttgataagttttttgagatgccaagacatgatgcacttaaagctcttgaaatctacagaagggctggccaacaggctgggaatctatctgatttctacgagaattgccggggattagaacttgctaggaattttcagtttcccactctgagggagccaccacaaacatttcttgctactatggaggactatgtgaaggaggctccacgcatggtcccagttcgagaacccctggaacttcctgagaggctgcttcttacatacaaacctgaagaatcagaggaaattcttgagcctgctcctgttgaagaggaaaaagtaccagttgaagaacctgttcttgtaccacctgttactgaagttgtttcacctcctcccaaggctgaggtgcccgatactgggcttagatgatacaaatcctgctgtatcagctatagaggaaagcaatgctcttgccttggctattgttccaacagatggcgcttcaacaactggtaacactgcatttcaagataaggggtttgatcctacaggatgggaacttgcccttgttactgcaccaagcaatacaacttcatctacttctgttggtcaattgggtggtggactcgacaagctcattttggagagcctttatgatgatggggcctacaggcagaggcaacaacaacagctgtatggttcagcagctcctaatccattcatggcaaatgatcctttcgcgatgtcgaaccaagttgctcctccaccatcagttcaaatggctgccatgtctcagcagcatcagcaaatcccaacgatgatgcaaccaaatccctttggaccacctatgcatccacaggtgagcatggcccctgcaacaaacaatccctttctggatgctggcttcggggcattcccagcggcgaacaacggccatcagcaacacaacccatttggcagtgcccaacttctgtaggtcacttagtcacaagagcaaatttgtgccccagcagatgcgatttttgtgtgattatatcatgcattgtgctggacctttcttgcatgtgacgcgtgtattatgttatggcttcaccacacggagagctgtgcctatgtcgtgacccaactcttgttgtaaagaaattagtcacctgtgtaacatccaatatatgtcaataaacagtaggcagtgttattacatctataaacaaaagaacagtggtatgtaggaaattcttaatattgtttattccattgctttttatcttcttggaaagctgttccgttgttgtttgattgccactcttttgcatgcattgtgattgatcatcatgtgctcattcgaatattctaagccaataatggagcgttgctg

SEQ ID NO: 72536 - DNA, 2369 bp, Zea Mays
acttcgcaaaacggcaaaaaggcagccacgccttgttcatttttatttttttaatctcctcccgtcggcgaaattttacacgccagcaaaaccgccctgaggatgaaatagaaaaaaccccaaacaagccctaacgcgtcccccggaaccagaacaagtccagtctgtccagaaatacattagaaaaaagagccaaagaggagaacaccggccggcgaggtggacgaagcggcccgccgaggaaatggcgtcgatgcagagctggcgcaaggcctacggcgccatcaaggacaccaccaccgttagcatcgccaatctcaactccgacttcaaggatctggatgtggcgatcgtgaaggcgactaaccacgtggagtgcccgcctaaggagcgacacctgcgcagggttgttgcagcgacgtccatcaccaggcctcgggcagatgtcgcctactgcatccacgcgcttgcccgccgtcttgccaagacccgcaactggatcgttgctctaaaagcacttgtagtgatccatagacttcttcgcgagggtgatcctacatttcgagaagagcttctcaactttacacagaggggacggatcctgcaactttcaaactttaaggatgactccagtccaattgggttatgtgcagcttgggattgttctgcctgggtgcgcacatatggtttgtatttggaggaaaggttggaatgcttcagagttctgaaatatgatgtcgaagctgagcgcttgtccaaacaaggtcaaggtcctgaaaagggtcacagtagaacgagagagttggattcacaggatctgttagagcagctgccagcattgcagcagttactgtaccgacttgttggatgtcggcctgaaggagctgcaaataataactacttggtgcaatatgctcttgctttggtgctaaaagaaagctttaaaatttattgtgcaataaatgatggaatcataaacctcgttgataagttttttgagatgccaagacatgatgcacttaaagctcttgaaatctacagaagggctggccaacaggttatttgacacatttcaggctgggaatctatctgatttctacgagaattgccggggattagaacttgctaggaattttcagtttcccactctgagggagccaccacaaacatttcttgctactatggaggactatgtgaaggaggctccacgcatggtcccagttcgagaacccctggaacttcctgagaggctgcttcttacatacaaacctgaagaatcagaggaaattcttgagcctgctcctgttgaagaggaaaaagtaccagttgaagaacctgttcttgtaccacctgttactgaagttgtttcacctcctcccaaggctgaggtgcccgatactggtgacttactgggcttagatgatacaaatcctgctgtatcagctatagaggaaagcaatgctcttgccttggctattgttccaacagatggcgcttcaacaactggtaacactgcatttcaagataaggggtttgatcctacaggatgggaacttgcccttgttactgcaccaagcaatacaacttcatctacttctgttggtcaattgggtggtggactcgacaagctcattttggagagcctttatgatgatggggcctacaggcagaggcaacaacaacagctgtatggttcagcagctcctaatccattcatggcaaatgatcctttcgcgatgtcgaaccaagttgctcctccaccatcagttcaaatggctgccatgtctcagcagcatcagcaaatcccaacgatgatgcaaccaaatccctttggaccacctatgcatccacaggtgagcatggcccctgcaacaaacaatccctttctggatgctggcttcggggcattcccagcggcgaacaacggccatcagcaacacaacccatttggcagtgcccaacttctgtaggtcacttagtcacaagagcaaatttgtgccccagcagatgcgatttttgtgtgattatatcatgcattgtgctggacctttcttgcatgtgacgcgtgtattatgttatggcttcaccacacggagagctgtgcctatgtcgtgacccaactcttgttgtaaagaaattagtcacctgtgtaacatccaatatatgtcaataaacagtaggcagtgttattacatctataaacaaaagaacagtggtatgtaggaaattcttaatattgtttattccattgctttttatcttcttggaaagctgttccgttgttgtttgattgccactcttttgcatgcattgtgattgatcatcatgtgctcattcgaatattctaagccaataatggagcgttgctg

SEQ ID NO: 72537 - DNA, 1923 bp, Zea Mays
acgcatctaattattaaaaaataaaaaaaaactgagacccccacttgggcactcgacgaaacggcgactcctgcgccgggggatccccataccatacgccgcgccgccgccacgaacagcgaccgccgcgagggcgacacgaccggcaaccggccgaggggagatacgataggcgagtgcggacggcctatcgccgtgcgacagcggcaccccggtgtggtcgcgtgcgccgccggcgccgggccaaggcgtcaagcgctgcccagtcccgattccgccctgcactgcctctcgccctgtcctgtctgactgtccgagactctgactccgccctggtgagcgttcttcactcctccgattcttcacctcgcactggtccgatggaatccgacgccgaggaggaagcggcggcgaccccagcagcggcggcgaccccaggcgctgggcgtctgaaggggaacccggaactgactgtggacgcggacatgcgagagatggcgaagacggccgcgtggagcgtcagttcctgcaaggccggcaacggcgtcgcggccctgcgcgacgacaacctcgacacctactggcagtctgatggggcgcagccgcacctggtgaacatccagttccagaagaaggtgcagctgcagctcgttgtgctctacgtggatttcaagctcgacgagagttacacgccgagcaagatctccatccgggccggggatggcttccacaacctaaaggagattagaacggtggagcttgcaaagccagttggatgggtccacatatcattatccgggattgatccacggtatgcattgtaatatgaagatgaataaccgttcctaaaattatgtgtatactccctttatacatgtaggaggacaaaacaaatgtgcagagcttagctaacagccttggtttgttgttttggtttgaatctatgtgttgaatttgaaaagacttggatatcctgtcgggtttgtcgttccataccgaacatttgagccagataatactacatccataatattgttaaggcccattaggcccaggcctgctgcctatatatataacctatagtccttagggactgattatcaatcgtcaatcccaaggttagtaacaaatatcaccaggaaagagttaaaatattttatgtagtgaatgcttgaagaattttatcatcataataatttaggaagtgaaactattttagaagttagtggaagggacactctatttaaagcttgtactacttgattttacttctgtaatgtaggcagatatattactgtctttttttgggtatgtatgcagagaaacattcattcacacatttatgctccaaattgctgttttatccaatcatctgaatgggagggatactcatgtccgacagatcaagatctacgggccaagaccgaatcctgttccccaccagccgtttcattttacttccagggagttcatcacatactctactattagatgacagtggatgagcaatcaagataggatcggcagctcatggctctggatgatcgcgccatattagtatatttgcctgcttgtgtgctgtctatcgggtcttggacgtgtatgtgtaatgaagttgttaagttagctcagcagcatccacatctcatattttaaaccccactacataaagagtgcagtgcaaaatagtgatttgcagggcacatgtacctgctggccatagccttaggtagcaataacatacttttgaatttgtttcgcggcctctgttggcttgcagtgtttgcttggttcattggttggtcccaatcattttgtgcccttgatgttcagtgccttaggttagcctatacagtttatggacggtcgtactgttaaacctttgaaactttgtagtttcatttaaaaaaaaacatttttatg

SEQ ID NO: 72538 - DNA, 1309 bp, Zea Mays
acgcatctaattattaaaaaataaaaaaaaactgagacccccacttgggcactcgacgaaacggcgactcctgcgccgggggatccccataccatacgccgcgccgccgccacgaacagcgaccgccgcgagggcgacacgaccggcaaccggccgaggggagatacgataggcgagtgcggacggcctatcgccgtgcgacagcggcaccccggtgtggtcgcgtgcgccgccggcgccgggccaaggcgtcaagcgctgcccagtcccgattccgccctgcactgcctctcgccctgtcctgtctgactgtccgagactctgactccgccctggtgagcgttcttcactcctccgattcttcacctcgcactggtccgatggaatccgacgccgaggaggaagcggcggcgaccccagcagcggcggcgaccccaggcgctgggcgtctgaaggggaacccggaactgactgtggacgcggacatgcgagagatggcgaagacggccgcgtggagcgtcagttcctgcaaggccggcaacggcgtcgcggccctgcgcgacgacaacctcgacacctactggcagtctgatggggcgcagccgcacctggtgaacatccagttccagaagaaggtgcagctgcagctcgttgtgctctacgtggatttcaagctcgacgagagttacacgccgagcaagatctccatccgggccggggatggcttccacaacctaaaggagattagaacggtggagcttgcaaagccagttggatgggtccacatatcattatccgggattgatccacggaatcctgttccccaccagccgtttcattttacttccagggagttcatcacatactctactattagatgacagtggatgagcaatcaagataggatcggcagctcatggctctggatgatcgcgccatattagtatatttgcctgcttgtgtgctgtctatcgggtcttggacgtgtatgtgtaatgaagttgttaagttagctcagcagcatccacatctcatattttaaaccccactacataaagagtgcagtgcaaaatagtgatttgcagggcacatgtacctgctggccatagccttaggtagcaataacatacttttgaatttgtttcgcggcctctgttggcttgcagtgtttgcttggttcattggttggtcccaatcattttgtgcccttgatgttcagtgccttaggttagcctatacagtttatggacggtcgtactgttaaacctttgaaactttgtagtttcatttaaaaaaaaacatttttatg

SEQ ID NO: 72539 - DNA, 1793 bp, Zea Mays
acgcatctaattattaaaaaataaaaaaaaactgagacccccacttgggcactcgacgaaacggcgactcctgcgccgggggatccccataccatacgccgcgccgccgccacgaacagcgaccgccgcgagggcgacacgaccggcaaccggccgaggggagatacgataggcgagtgcggacggcctatcgccgtgcgacagcggcaccccggtgtggtcgcgtgcgccgccggcgccgggccaaggcgtcaagcgctgcccagtcccgattccgccctgcactgcctctcgccctgtcctgtctgactgtccgagactctgactccgccctggtgagcgttcttcactcctccgattcttcacctcgcactggtccgatggaatccgacgccgaggaggaagcggcggcgaccccagcagcggcggcgaccccaggcgctgggcgtctgaaggggaacccggaactgactgtggacgcggacatgcgagagatggcgaagacggccgcgtggagcgtcagttcctgcaaggccggcaacggcgtcgcggccctgcgcgacgacaacctcgacacctactggcagtctgatggggcgcagccgcacctggtgaacatccagttccagaagaaggtgcagctgcagctcgttgtgctctacgtggatttcaagctcgacgagagttacacgccgagcaagatctccatccgggccggggatggcttccacaacctaaaggtacgctttttctccatgagatatcatttgaaggatgttcagaacctagtcggctgtaatagatttaaacaagattatacatgttgattcgtccgagttgagtatgacacagagtccgagttccgaaacctgcgaaataatcattctgagggtaaacttgaactgattttatacactgtaactagatcgtttttctggtattttgtgccttcctagaagttagatacagttaatatgacctgacattacctggaggtttgcttctgcattgcaagtactgctgtatgaactagtcgtttgaaaattgaaatgttgagcttactaactgccagttttggcatcatttgaatatttacagtaacgtatctcatgattccaggagattagaacggtggagcttgcaaagccagttggatgggtccacatatcattatccgggattgatccacgagaaacattcattcacacatttatgctccaaattgctgttttatccaatcatctgaatgggagggatactcatgtccgacagatcaagatctacgggccaagaccgaatcctgttccccaccagccgtttcattttacttccagggagttcatcacatactctactattagatgacagtggatgagcaatcaagataggatcggcagctcatggctctggatgatcgcgccatattagtatatttgcctgcttgtgtgctgtctatcgggtcttggacgtgtatgtgtaatgaagttgttaagttagctcagcagcatccacatctcatattttaaaccccactacataaagagtgcagtgcaaaatagtgatttgcagggcacatgtacctgctggccatagccttaggtagcaataacatacttttgaatttgtttcgcggcctctgttggcttgcagtgtttgcttggttcattggttggtcccaatcattttgtgcccttgatgttcagtgccttaggttagcctatacagtttatggacggtcgtactgttaaacctttgaaactttgtagtttcatttaaaaaaaaacatttttatg

SEQ ID NO: 72540 - DNA, 2204 bp, Zea Mays
gcgcccacggacggtccccccaccacgtccaccccgctccgctcgccaccaccgcgttcgccgctgccgcacatcaacgcgtcgatgccacccgggcacccggccgagatagcctccttcctcccccgaaccgccacgtccgcttccaaagccgtcgccgtctccgcctcctccctggtgcccgcgcccgcaagatcccgccgttgtcgtctccgtctcctccccctgcccacaactcgcaggatcccaccgtcaccgtctttctgggattcaattctgctctcaatttcttaatatgttcgggcatgttttgtttcacctgatgcctgtgcctagttgagcgagtgcatggacctagacatcacagtggaattctggtcccttcaggcgctgcgcagtttcttctcctcctaccagacatctagcactggacctaaactagacgagcacttcgtcatgagcaacaaccacgccgcgcgcgcacaatattttttccagcaaatggaagtaaattttttgtgttgattcagtcacccatttgttgtgttttctccaaatactctaagttggactgattgatttcagatctgtttgtttaaagttcatctattccagctttataacctagtttgtataaactcatctggtcaacaaaaagaccaagttataatccagtcgcaagcacctacgcccgcccacccgcaacgctcaatattcctatgcctgcaggctgcaaatgaagaacgattacgtgaagagtttgtgagggaaagcagaaagcttcctccaaagcagcaatcacaaacatgtgattcaaatgttattactccaaggactgaatttatggctgttttatcagttgctttggagtgttacatccatcttagattgaattatgatcatgaatggaaacaaaacaaagttattttatccgatgccaatgttcctggtgaacgggatctgtctggttttaacccaaatccattgcctgtatggcctggacgtatatctgatcatgctagctttgcagacacatgaagtgggacatctagcagcaaaatgtgaaggaaaggtgaaaatgaaagctggggagttttgatgagaaggctgatgctattgttcccaagaagccatatcaggttatttgtctattgtacaacatgtggtagtgtgtgtgtgtgttgggggggttcgcgccctcactcacgatcaatgacccgactctttccctctcttcccctcctctgccacgagccctaacccacttgaagcacaacatgatccatgtgagttgtgctttggcctgcattagggatcagcaacttcgcacgcgacgaaatgaaccgccacgactgcgttgggatcaacttcgcacgcggcgatattatttcagtgtcgtgttttttacttcacatgaaaatcttattttgtagtatataaaatgttaggttgtagtataaaaaattatacagcaacaaacaatcacatatctagtaatttagttgtcatgtatagtaaattgtaattttcagcagattacagttttaaatcaataatagatactaggaatgtttagtagcagagattattattcaggcagtttgctgtcatagttccatgtagctcaatctcaaattgtagaggtgaaacatacagcagggttgccttgtatctatagaaatgaacttgcagcaattatgtaagcaacgtatcccaatgtacccgcacgcatatcagaatgaaagcccaatgtaccgtggaatggcagcaaagaaaaaaaatccagcaatggaccttgttgaggaacagaaatgtcctacaaattttgtcttcatttctttaaatgttgccagctactctccaatacatattacatggttacctcattacatataacatggttacctcatggtctatataaggaaccttaaacctaaatgcgcacagcttcagttgctctacttgtttttagaggattcacctttagatgagttgaatattatcataatacttgtctatatgtaagtaatatagaaatctgccacaacatatttccttacaacataaaagaaaagagggtcatatttgtgatctaaaagaattttgatagtcataactcaccgtccccttttcgatagacttaggatcttttttataatttttcaccatataatacaaaattgttcaatggaggctaaggtata

SEQ ID NO: 72541 - DNA, 2160 bp, Zea Mays
cacggacggtccccccaccacgtccaccccgctccgctcgccaccaccgcgttcgccgctgccgcacatcaacgcgtcgatgccacccgggcacccggccgagatagcctccttcctcccccgaaccgccacgtccgcttccaaagccgtcgccgtctccgcctcctccctggtgcccgcgcccgcaagatcccgccgttgtcgtctccgtctcctccccctgcccacaactcgcaggatcccaccgtcaccgtctttctgggattcaattctgctctcaatttcttaatatgttcgggcatgttttgtttcacctgatgcctgtgcctagttgagcgagtgcatggacctagacatcacagtggaattctggtcccttcaggcgctgcgcagtttcttctcctcctaccagacatctagcactggacctaaactagacgagcacttcgtcatgagcaacaaccacgccgcgcgcgcacaatattttttccagcaaatggaagtaaattttttgtgttgattcagtcacccatttgttgtgttttctccaaatactctaagttggactgattgatttcagatctgtttgtttaaagttcatctattccagctttataacctagtttgtataaactcatctggtcaacaaaaagaccaagttataatccagtcgcaagcacctacgcccgcccacccgcaacgctcaatattcctatgcctgcaggctgcaaatgaagaacgattacgtgaagagtttgtgagggaaagcagaaagcttcctccaaagcagcaatcacaaacatgtgattcaaatgttattactccaaggactgaatttatggctgttttatcagttgctttggagtgttacatccatcttagattgaattatgatcatgaatggaaacaaaacaaagttattttatccgatgccaatgttcctggtgaacgggatctgtctggttttaacccaaatccattgcctgtatggcctggtgggacatctagcagcaaaatgtgaaggaaaggtgaaaatgaaagctggggagttttgatgagaaggctgatgctattgttcccaagaagccatatcaggttatttgtctattgtacaacatgtggtagtgtgtgtgtgtgttgggggggttcgcgccctcactcacgatcaatgacccgactctttccctctcttcccctcctctgccacgagccctaacccacttgaagcacaacatgatccatgtgagttgtgctttggcctgcattagggatcagcaacttcgcacgcgacgaaatgaaccgccacgactgcgttgggatcaacttcgcacgcggcgatattatttcagtgtcgtgttttttacttcacatgaaaatcttattttgtagtatataaaatgttaggttgtagtataaaaaattatacagcaacaaacaatcacatatctagtaatttagttgtcatgtatagtaaattgtaattttcagcagattacagttttaaatcaataatagatactaggaatgtttagtagcagagattattattcaggcagtttgctgtcatagttccatgtagctcaatctcaaattgtagaggtgaaacatacagcagggttgccttgtatctatagaaatgaacttgcagcaattatgtaagcaacgtatcccaatgtacccgcacgcatatcagaatgaaagcccaatgtaccgtggaatggcagcaaagaaaaaaaatccagcaatggaccttgttgaggaacagaaatgtcctacaaattttgtcttcatttctttaaatgttgccagctactctccaatacatattacatggttacctcattacatataacatggttacctcatggtctatataaggaaccttaaacctaaatgcgcacagcttcagttgctctacttgtttttagaggattcacctttagatgagttgaatattatcataatacttgtctatatgtaagtaatatagaaatctgccacaacatatttccttacaacataaaagaaaagagggtcatatttgtgatctaaaagaattttgatagtcataactcaccgtccccttttcgatagacttaggatcttttttataatttttcaccatataatacaaaattgttcaatggaggctaaggtata

SEQ ID NO: 72542 - DNA, 1719 bp, Zea Mays
cacggacggtccccccaccacgtccaccccgctccgctcgccaccaccgcgttcgccgctgccgcacatcaacgcgtcgatgccacccgggcacccggccgagatagcctccttcctcccccgaaccgccacgtccgcttccaaagccgtcgccgtctccgcctcctccctggctgcaaatgaagaacgattacgtgaagagtttgtgagggaaagcagaaagcttcctccaaagcagcaatcacaaacatgtgattcaaatgttattactccaaggactgaatttatggctgttttatcagttgctttggagtgttacatccatcttagattgaattatgatcatgaatggaaacaaaacaaagttattttatccgatgccaatgttcctggtgaacgggatctgtctggttttaacccaaatccattgcctgtatggcctggacgtatatctgatcatgctagctttgcagacacatgaagtacgcttctcaatactgagagaggtattttatacacctggacaacaggataaatgtttcttatgtatttaggtgggacatctagcagcaaaatgtgaaggaaaggtgaaaatgaaagctggggagttttgatgagaaggctgatgctattgttcccaagaagccatatcaggttatttgtctattgtacaacatgtggtagtgtgtgtgtgtgttgggggggttcgcgccctcactcacgatcaatgacccgactctttccctctcttcccctcctctgccacgagccctaacccacttgaagcacaacatgatccatgtgagttgtgctttggcctgcattagggatcagcaacttcgcacgcgacgaaatgaaccgccacgactgcgttgggatcaacttcgcacgcggcgatattatttcagtgtcgtgttttttacttcacatgaaaatcttattttgtagtatataaaatgttaggttgtagtataaaaaattatacagcaacaaacaatcacatatctagtaatttagttgtcatgtatagtaaattgtaattttcagcagattacagttttaaatcaataatagatactaggaatgtttagtagcagagattattattcaggcagtttgctgtcatagttccatgtagctcaatctcaaattgtagaggtgaaacatacagcagggttgccttgtatctatagaaatgaacttgcagcaattatgtaagcaacgtatcccaatgtacccgcacgcatatcagaatgaaagcccaatgtaccgtggaatggcagcaaagaaaaaaaatccagcaatggaccttgttgaggaacagaaatgtcctacaaattttgtcttcatttctttaaatgttgccagctactctccaatacatattacatggttacctcattacatataacatggttacctcatggtctatataaggaaccttaaacctaaatgcgcacagcttcagttgctctacttgtttttagaggattcacctttagatgagttgaatattatcataatacttgtctatatgtaagtaatatagaaatctgccacaacatatttccttacaacataaaagaaaagagggtcatatttgtgatctaaaagaattttgatagtcataactcaccgtccccttttcgatagacttaggatcttttttataatttttcaccatataatacaaaattgttcaatggaggctaaggtata

SEQ ID NO: 72543 - DNA, 2241 bp, Zea Mays
cacggacggtccccccaccacgtccaccccgctccgctcgccaccaccgcgttcgccgctgccgcacatcaacgcgtcgatgccacccgggcacccggccgagatagcctccttcctcccccgaaccgccacgtccgcttccaaagccgtcgccgtctccgcctcctccctggtgcccgcgcccgcaagatcccgccgttgtcgtctccgtctcctccccctgcccacaactcgcaggatcccaccgtcaccgtctttctgggattcaattctgctctcaatttcttaatatgttcgggcatgttttgtttcacctgatgcctgtgcctagttgagcgagtgcatggacctagacatcacagtggaattctggtcccttcaggcgctgcgcagtttcttctcctcctaccagacatctagcactggacctaaactagacgagcacttcgtcatgagcaacaaccacgccgcgcgcgcacaatattttttccagcaaatggaagtaaattttttgtgttgattcagtcacccatttgttgtgttttctccaaatactctaagttggactgattgatttcagatctgtttgtttaaagttcatctattccagctttataacctagtttgtataaactcatctggtcaacaaaaagaccaagttataatccagtcgcaagcacctacgcccgcccacccgcaacgctcaatattcctatgcctgcaggctgcaaatgaagaacgattacgtgaagagtttgtgagggaaagcagaaagcttcctccaaagcagcaatcacaaacatgtgattcaaatgttattactccaaggactgaatttatggctgttttatcagttgctttggagtgttacatccatcttagattgaattatgatcatgaatggaaacaaaacaaagttattttatccgatgccaatgttcctggtgaacgggatctgtctggttttaacccaaatccattgcctgtatggcctgacacatgaagtacgcttctcaatactgagagaggtattttatacacctggacaacaggataaatgtttcttatgtatttaggtgggacatctagcagcaaaatgtgaaggaaaggtgaaaatgaaagctggggagttttgatgagaaggctgatgctattgttcccaagaagccatatcaggttatttgtctattgtacaacatgtggtagtgtgtgtgtgtgttgggggggttcgcgccctcactcacgatcaatgacccgactctttccctctcttcccctcctctgccacgagccctaacccacttgaagcacaacatgatccatgtgagttgtgctttggcctgcattagggatcagcaacttcgcacgcgacgaaatgaaccgccacgactgcgttgggatcaacttcgcacgcggcgatattatttcagtgtcgtgttttttacttcacatgaaaatcttattttgtagtatataaaatgttaggttgtagtataaaaaattatacagcaacaaacaatcacatatctagtaatttagttgtcatgtatagtaaattgtaattttcagcagattacagttttaaatcaataatagatactaggaatgtttagtagcagagattattattcaggcagtttgctgtcatagttccatgtagctcaatctcaaattgtagaggtgaaacatacagcagggttgccttgtatctatagaaatgaacttgcagcaattatgtaagcaacgtatcccaatgtacccgcacgcatatcagaatgaaagcccaatgtaccgtggaatggcagcaaagaaaaaaaatccagcaatggaccttgttgaggaacagaaatgtcctacaaattttgtcttcatttctttaaatgttgccagctactctccaatacatattacatggttacctcattacatataacatggttacctcatggtctatataaggaaccttaaacctaaatgcgcacagcttcagttgctctacttgtttttagaggattcacctttagatgagttgaatattatcataatacttgtctatatgtaagtaatatagaaatctgccacaacatatttccttacaacataaaagaaaagagggtcatatttgtgatctaaaagaattttgatagtcataactcaccgtccccttttcgatagacttaggatcttttttataatttttcaccatataatacaaaattgttcaatggaggctaaggtata

SEQ ID NO: 72544 - DNA, 1141 bp, Zea Mays
atggcggtgccggctcccctcgcctcgggcgccgccgtcctcctcctcctcgtctccctcgcgcccgtagtcgccgacgaggccgcgcgctacaaccccggcgcgtgccggggcgtcctcctcccgctgcggcgacaccgtcgacgcggcacggcgtacgccaagtcctactgcgggtaccccggcatgggggtggcctgcgagggcggccgcgcaacactgaggctcggggccgacaactacaccgtgctggccatcgactacagcaaccacaccgtgacggtggccggcgcggcgagcggggacgaccactgcccgagggtggcgcgcaacgtcaccgtgccgccggggacgtggctcagcctgtcggacaccgccaacgaggacctcgtcttctggttcgactgcgtcttcacagcggagacccctccgccgcgggcggacgtcccgcccccgatcagttgcagcggcttccggagtccgagcggggcgacgtctttcgtggtggtggcgcggccgggcgtggacgagtgggagtggccgcgggcgtgcaagaagccggtcgtcgtgccggtgctcaaggaccagctcctgaaccctgatgcggactacctctcgcgtctcaacggcgacgggtacgggcagctgctgaagctgggtttccagctgacgtgggaccccagcgccgggccctgctacttctgcgagaactccggcgggcagtgcagctacaaccaggtcggagagttcatcggctgcctgtgctccgacggccgcgtgcgcagcacagactgcggatcgaagaagaacaaaaaagcgattgcaatagggacctccatagctgccggcgttctgtccttgcttcttgtggtcatggcgtgcttgtacatccgcaagagaaggcagtacaaggtgacctcgtcctcgaggctcctcaagcccactgcctccggcgggacgccgcgttccagaggtagcactgacatggagtccggcagcgtccgcagcctgcagacgcaccacttcacatacgaggagctggaggaggcaactgacagcttcagcggcacaatggagatcggcgatggcggcttcggcaccgtgtacaaagtttgttgtcatgcaattttacgttggatta

SEQ ID NO: 72545 - DNA, 2833 bp, Zea Mays
gtcgaggcagctcgatctgccgtccgttccactatacgggcgggcaacaggggggaccccttcccgcgtccgcccgcccgctgagatattttccgtcaccgatcggccgtacgctccccatccgacgactccgctgccgccggcgcaaccgacggcggccttttgaagacgtggcccagcggcgtgcgtgttccttgcctagattggcgtgatccagctctgctccaaccgtagaagtgcgcgcacttgctgctagctaagaagcatctgcagtgatcgttccaggctcgtgaggaaactcatttgctcgaatcatgtccgactttgtcgggagcagatataccaagcaagaagatttccatgttttgttgagcaagaaagatcctggagaaccacctgaacataagcacgtcctgtggatggcacactggaccaaagcaagcagcaacaatggcagcagcaatcctttggagggtaccaccaagggcactactacgaaagatagcgagaccttgccttatgaattcacggaatctacggttgctaaaaggctcatggtaggagtaagccatggaagcgcctccatgcagcatgaccgacaattcaattctagtgtgtggggtatggcacgccatatttccaacgaattgggaccgaagaatagtgaacatgttgatgggtcttttgaaaaatttgtgaagaaggatgctgtgaacttgagagcaagggcagttgtgtcagaaacatactctgttcacaagctttcagagttaccgttggattttcagcaccttgggaactccgacgatccaagtccagattggagccactttccaatgttcgaaattaatcgaaagattgacagtattctcaaccgcaaacgaaggtctgcacctctgaatctaaatgcgtctgcatcccatgtattggccctatcgtcacaagaatacatgatgcactcacatcaaatagctgacgagaacttggatatgtgcagacctgcagaaggctttgcatctcacttagaagatcctgctggcctcaattcagatccttcagggccaaagttaaaaggacagttattggataccgtgtcatgttcttgcagcaaggacgacaccaattcagcagattgtctaatagacgagcagcatacaagccactattttgcaaactcaaagcatgaactgccctctgtatctaacgaaaagaagttcaagtttgcaggaaacaaccacaatcgaattcttgcaagtgcgtcccataaacatgaaagtgttgcagaggcaatgttctgtgcaccagtacttggtagtgagcttcagaatgaacctataactatttccaacatcggcaagaaggatggtgaaaacttccatgagatgtataattgtaatagcaaggctgttccttgttctttgttagctcatgagcaccatcgtcatctgaaaacacagagaacggaatctgcaggaaatttgaaagtctgcacgttacctgatcaacaaactgcaaatgaattggcagacaagagtaatggtgacctgctgacatatggaccaaagccaaagaagggctcttgcaaccgaagaagcctctatttattcgaaaagttaacgattccttccaaatcacaaagtgcatatcctaaaaattctgcgtcttcaggaaaatctagcggctttggagtttgtatgtacggcaccaatattggaagccagttattcggagcacagaatcaatcttcatctaagactgaaacattgcacagcgatgctcttattgggtccaaatcctcagcaggcattgcttcattatcggcacaaaaggacaacggttgcccagccccagccccagccccagccccagacgaagcgaaaagcgagcagctagcagctccgtcgtccaacaccaagcagggaggagaatcagcatacagtaaagaagatggatctcataatctcaacgaaggccacgatgtttcgtccaaagcagctatcggtagcaagcaaccatgcatgcctggagcaggaatcacgaacctggatctcatactctcccagatgagcaggatgagaaaccagattcccagtggcggtgtaactcagccaccaataggcgccgagccaagtgatagatggctcaagcgcctgcagctcggcgtaccagaccctgacgtccttggttccaagaccaagaggccaaaagtcggagacagtcctccgccacccaggcaaataaaccggtcctttgacgtggcactcccttgcaacccaggaaaacaggaggagcagagcttgaatggaggggggaaagtgcagggaagagcccccccgattccagagaagagcgtcaatcgctggatagggagatggtgccagggcggcactcctgttttccgtgaaggcccaggccagggaaggcaggcaacgaaacctgctggccggttgtccgaggagcttgaaggacagttctttccaagcactgcggcgatggcgatgatggggcgcgcgatgcacaagctccggccgtgcgagcagcagcagaaggggccattcgtggtgtggaagatagattgacctttttgggtgtgatatacttgtttctttaaaaaaaataaaatgtaaggcaactatgcattttgcctggctgtggctcatggtttattgctttctggtagtggaagtagctaggtgtagtgcctactgattgtgtaatgctttgctgtaccaaaagtgtaatactatactgtttactgtgtcgttcgttatggtgatgtacaccatggagtaatcgaatgggacagacgaatgaactggaactggaaggtgag

SEQ ID NO: 72546 - DNA, 2921 bp, Zea Mays
ctgatctctcccatccccttctcctgggctggctggccagtgacggaccagccctctcccacctcgcacgcccctgtggctcctgaccttcccaccaccggagttaatgccgcctggcctggccgtctcgctggcgcggcgtgggacgtggtagcagtaccgcgcgtcgcggttgggccaatgggacgggcgtaagtgcgtaagcgaggacgcgaggtgaggtgtggagattgaggggtgggagctgttgtggcgcgtgtctccctgtcgcccgcagcttctttttattcctcccgtccggttccgttccggggaattgattctggggagccggcgcggccgcggctgctttgatcccttgccgcctgcctggcctgggctctcgtaccgcaaccgcaatttggcggcgtgcgtgttccttgcctagattggcgtgatccagctctgctccaaccgtagaagtgcgcgcacttgctgctagctaagaagcatctgcagtgatcgttccaggctcgtgaggaaactcatttgctcgaatcatgtccgactttgtcgggagcagatataccaagcaagaagatttccatgttttgttgagcaagaaagatcctggagaaccacctgaacataagcacgtcctgtggatggcacactggaccaaagcaagcagcaacaatggcagcagcaatcctttggagggtaccaccaagggcactactacgaaagatagcgagaccttgccttatgaattcacggaatctacggttgctaaaaggctcatggtaggagtaagccatggaagcgcctccatgcagcatgaccgacaattcaattctagtgtgtggggtatggcacgccatatttccaacgaattgggaccgaagaatagtgaacatgttgatgggtcttttgaaaaatttgtgaagaaggatgctgtgaacttgagagcaagggcagttgtgtcagaaacatactctgttcacaagctttcagagttaccgttggattttcagcaccttgggaactccgacgatccaagtccagattggagccactttccaatgttcgaaattaatcgaaagattgacagtattctcaaccgcaaacgaagacctgcagaaggctttgcatctcacttagaagatcctgctggcctcaattcagatccttcagggccaaagttaaaaggacagttattggataccgtgtcatgttcttgcagcaaggacgacaccaattcagcagattgtctaatagacgagcagcatacaagccactattttgcaaactcaaagcatgaactgccctctgtatctaacgaaaagaagttcaagtttgcaggaaacaaccacaatcgaattcttgcaagtgcgtcccataaacatgaaagtgttgcagaggcaatgttctgtgcaccagtacttggtagtgagcttcagaatgaacctataactatttccaacatcggcaagaaggatggtgaaaacttccatgagatgtataattgtaatagcaaggctgttccttgttctttgttagctcatgagcaccatcgtcatctgaaaacacagagaacggaatctgcaggaaatttgaaagtctgcacgttacctgatcaacaaactgcaaatgaattggcagacaagagtaatggtgacctgctgacatatggaccaaagccaaagaagggctcttgcaaccgaagaagcctctatttattcgaaaagttaacgattccttccaaatcacaaagtgcatatcctaaaaattctgcgtcttcaggaaaatctagcggctttggagtttgtatgtacggcaccaatattggaagccagttattcggagcacagaatcaatcttcatctaagactgaaacattgcacagcgatgctcttattgggtccaaatcctcagcaggacaacggttgcccagccccagccccagccccagccccagacgaagcgaaaagcgagcagctagcagctccgtcgtccaacaccaagcagggaggagaatcagcatacagtaaagaagatggatctcataatctcaacgaaggccacgatgtttcgtccaaagcagctatcggtagcaagcaaccatgcatgcctggagcaggaatcacgaacctggatctcatactctcccagatgagcaggatgagaaaccagattcccagtggcggtgtaactcagccaccaataggcgccgagccaagtgatagatggctcaagcgcctgcagctcggcgtaccagaccctgacgtccttggttccaagaccaagaggccaaaagtcggagacagtcctccgccacccaggcaaataaaccggtcctttgacgtggcactcccttgcaacccaggaaaacaggaggagcagagcttgaatggaggggggaaagtgcagggaagagcccccccgattccagagaagagcgtcaatcgctggatagggagatggtgccagggcggcactcctgttttccgtgaaggcccaggccagggaaggcaggcaacgaaacctgctggccggttgtccgaggagcttgaaggacagttctttccaagcactgcggcgatggcgatgatggggcgcgcgatgcacaagctccggccgtgcgagcagcagcagaaggggccattcgtggtgtggaagatagattgacctttttgggtgtgatatacttgtttctttaaaaaaaataaaatgtaaggcaactatgcattttgcctggctgtggctcatggtttattgctttctggtagtggaagtagctaggtgtagtgcctactgattgtgtaatgctttgctgtaccaaaagtgtaatactatactgtttactgtgtcgttcgttatggtgatgtacaccatggagtaatcgaatgggacagacgaatgaactggaactggaaggtgag

SEQ ID NO: 72547 - DNA, 3705 bp, Zea Mays
ctcccatccccttctcctgggctggctggccagtgacggaccagccctctcccacctcgcacgcccctgtggctcctgaccttcccaccaccggagttaatgccgcctggcctggccgtctcgctggcgcggcgtgggacgtggtagcagtaccgcgcgtcgcggttgggccaatgggacgggcgtaagtgcgtaagcgaggacgcgaggtgaggtgtggagattgaggggtgggagctgttgtggcgcgtgtctccctgtcgcccgcagcttctttttattcctcccgtccggttccgttccggggaattgattctggggagccggcgcggccgcggctgctttgatcccttgccgcctgcctggcctgggctctcgtaccgcaaccgcaatttggcggcgtgcgtgttccttgcctagattggcgtgatccagctctgctccaaccgtagaagtgcgcgcacttgctgctagctaagaagcatctgcagtgatcgttccaggctcgtgaggaaactcatttgctcgaatcatgtccgactttgtcgggagcagatataccaagcaagaagatttccatgttttgttgagcaagaaagatcctggagaaccacctgaacataagcacgtcctgtggatggcacactggaccaaagcaagcagcaacaatggcagcagcaatcctttggagggtaccaccaagggcactactacgaaagatagcgagaccttgccttatgaattcacggaatctacggttgctaaaaggctcatggtaggagtaagccatggaagcgcctccatgcagcatgaccgacaattcaattctagtgtgtggggtatggcacgccatatttccaacgaattgggaccgaagaatagtgaacatgttgatgggtcttttgaaaaatttgtgaagaaggatgctgtgaacttgagagcaagggcagttgtgtcagaaacatactctgttcacaagctttcagagttaccgttggattttcagcaccttgggaactccgacgatccaagtccagattggagccactttccaatgttcgaaattaatcgaaagattgacagtattctcaaccgcaaacgaaggtctgcacctctgaatctaaatgcgtctgcatcccatgtattggccctatcgtcacaagaatacatgatgcactcacatcaaatagctgacgagaacttggatatgtgcagacctgcagaaggctttgcatctcacttagaagatcctgctggcctcaattcagatccttcagggccaaagttaaaaggacagttattggataccgtgtcatgttcttgcagcaaggacgacaccaattcagcagattgtctaatagacgagcagcatacaagccactattttgcaaactcaaagcatgaactgccctctgtatctaacgaaaagaagttcaagtttgcaggaaacaaccacaatcgaattcttgcaagtgcgtcccataaacatgaaagtgttgcagaggcaatgttctgtgcaccagtacttggtagtgagcttcagaatgaacctataactatttccaacatcggcaagaaggatggtgaaaacttccatgagatgtataattgtaatagcaaggctgttccttgttctttgttagctcatgagcaccatcgtcatctgaaaacacagagaacggaatctgcaggaaatttgaaagtctgcacgttacctgatcaacaaactgcaaatgaattggcagacaagagtaatggtgacctgctgacatatggaccaaagccaaagaagggctcttgcaaccgaagaagcctctatttattcgaaaagttaacgattccttccaaatcacaaagtgcatatcctaaaaattctgcgtcttcaggaaaatctagcggctttggagtttgtatgtacggcaccaatattggaagccagttattcggagcacagaatcaatcttcatctaagactgaaacattgcacagcgatgctcttattgggtccaaatcctcagcaggtgagaggtctagcatttttataatacagtgtcagctaagagtgtggtttaagtatggttgtttatgcgcaacatatatgctaacagagcagcgtcactggaatgtttcatctaatacatatcgggttttttttttcttttgctgatggtagcagtatcattctctgactcacacaatgttttctctttttttttttctggattgttgtaggcattgcttcattatcggcacaaaaggtatcagtgttccataatccatagcgatccgatctcctgtcttgcgcataaagagtgttcctggactacttatattgctcgatactaaaaactaaaaaagcagattttttttcaaaaaaaaactaaaaaagcagaatatggcttggaaccttttttgtattgtttggatggttttcaaagaaaaaaaaggtctataagttttgttgtcagaaatgcatctgatgtatcgtcaactttgtttttagtgttagtagatctttcttgtttatactctttcttggaatcttatcatatttatgttggtttgaatacacgtccacctacctgtttcttgtcattccacatgataattattccaagccgtgctcattagtcatggacccgtaccaaccagttgacagacctatgtactgattcttccattaccaataaatgtactacaggacaacggttgcccagccccagccccagccccagccccagacgaagcgaaaagcgagcagctagcagctccgtcgtccaacaccaagcagggaggagaatcagcatacagtaaagaagatggatctcataatctcaacgaaggccacgatgtttcgtccaaagcagctatcggtagcaagcaaccatgcatgcctggagcaggaatcacgaacctggatctcatactctcccagatgagcaggatgagaaaccagattcccagtggcggtgtaactcagccaccaataggcgccgagccaagtgatagatggctcaagcgcctgcagctcggcgtaccagaccctgacgtccttggttccaagaccaagaggccaaaagtcggagacagtcctccgccacccaggcaaataaaccggtcctttgacgtggcactcccttgcaacccaggaaaacaggaggagcagagcttgaatggaggggggaaagtgcagggaagagcccccccgattccagagaagagcgtcaatcgctggatagggagatggtgccagggcggcactcctgttttccgtgaaggcccaggccagggaaggcaggcaacgaaacctgctggccggttgtccgaggagcttgaaggacagttctttccaagcactgcggcgatggcgatgatggggcgcgcgatgcacaagctccggccgtgcgagcagcagcagaaggggccattcgtggtgtggaagatagattgacctttttgggtgtgatatacttgtttctttaaaaaaaataaaatgtaaggcaactatgcattttgcctggctgtggctcatggtttattgctttctggtagtggaagtagctaggtgtagtgcctactgattgtgtaatgctttgctgtaccaaaagtgtaatactatactgtttactgtgtcgttcgttatggtgatgtacaccatggagtaatcgaatgggacagacgaatgaactggaactggaaggtgag

SEQ ID NO: 72548 - DNA, 2936 bp, Zea Mays
catccccttctcctgggctggctggccagtgacggaccagccctctcccacctcgcacgcccctgtggctcctgaccttcccaccaccggagttaatgccgcctggcctggccgtctcgctggcgcggcgtgggacgtggtagcagtaccgcgcgtcgcggttgggccaatgggacgggcgtaagtgcgtaagcgaggacgcgaggtgaggtgtggagattgaggggtgggagctgttgtggcgcgtgtctccctgtcgcccgcagcttctttttattcctcccgtccggttccgttccggggaattgattctggggagccggcgcggccgcggctgctttgatcccttgccgcctgcctggcctgggctctcgtaccgcaaccgcaatttggcggcgtgcgtgttccttgcctagattggcgtgatccagctctgctccaaccgtagaagtgcgcgcacttgctgctagctaagaagcatctgcagtgatcgttccaggctcgtgaggaaactcatttgctcgaatcatgtccgactttgtcgggagcagatataccaagcaagaagatttccatgttttgttgagcaagaaagatcctggagaaccacctgaacataagcacgtcctgtggatggcacactggaccaaagcaagcagcaacaatggcagcagcaatcctttggagggtaccaccaagggcactactacgaaagatagcgagaccttgccttatgaattcacggaatctacggttgctaaaaggctcatggtaggagtaagccatggaagcgcctccatgcagcatgaccgacaattcaattctagtgtgtggggtatggcacgccatatttccaacgaattgggaccgaagaatagtgaacatgttgatgggtcttttgaaaaatttgtgaagaaggatgctgtgaacttgagagcaagggcagttgtgtcagaaacatactctgttcacaagctttcagagttaccgttggattttcagcaccttgggaactccgacgatccaagtccagattggagccactttccaatgttcgaaattaatcgaaagattgacagtattctcaaccgcaaacgaagacctgcagaaggctttgcatctcacttagaagatcctgctggcctcaattcagatccttcagggccaaagttaaaaggacagttattggataccgtgtcatgttcttgcagcaaggacgacaccaattcagcagattgtctaatagacgagcagcatacaagccactattttgcaaactcaaagcatgaactgccctctgtatctaacgaaaagaagttcaagtttgcaggaaacaaccacaatcgaattcttgcaagtgcgtcccataaacatgaaagtgttgcagaggcaatgttctgtgcaccagtacttggtagtgagcttcagaatgaacctataactatttccaacatcggcaagaaggatggtgaaaacttccatgagatgtataattgtaatagcaaggctgttccttgttctttgttagctcatgagcaccatcgtcatctgaaaacacagagaacggaatctgcaggaaatttgaaagtctgcacgttacctgatcaacaaactgcaaatgaattggcagacaagagtaatggtgacctgctgacatatggaccaaagccaaagaagggctcttgcaaccgaagaagcctctatttattcgaaaagttaacgattccttccaaatcacaaagtgcatatcctaaaaattctgcgtcttcaggaaaatctagcggctttggagtttgtatgtacggcaccaatattggaagccagttattcggagcacagaatcaatcttcatctaagactgaaacattgcacagcgatgctcttattgggtccaaatcctcagcaggcattgcttcattatcggcacaaaaggacaacggttgcccagccccagccccagccccagccccagacgaagcgaaaagcgagcagctagcagctccgtcgtccaacaccaagcagggaggagaatcagcatacagtaaagaagatggatctcataatctcaacgaaggccacgatgtttcgtccaaagcagctatcggtagcaagcaaccatgcatgcctggagcaggaatcacgaacctggatctcatactctcccagatgagcaggatgagaaaccagattcccagtggcggtgtaactcagccaccaataggcgccgagccaagtgatagatggctcaagcgcctgcagctcggcgtaccagaccctgacgtccttggttccaagaccaagaggccaaaagtcggagacagtcctccgccacccaggcaaataaaccggtcctttgacgtggcactcccttgcaacccaggaaaacaggaggagcagagcttgaatggaggggggaaagtgcagggaagagcccccccgattccagagaagagcgtcaatcgctggatagggagatggtgccagggcggcactcctgttttccgtgaaggcccaggccagggaaggcaggcaacgaaacctgctggccggttgtccgaggagcttgaaggacagttctttccaagcactgcggcgatggcgatgatggggcgcgcgatgcacaagctccggccgtgcgagcagcagcagaaggggccattcgtggtgtggaagatagattgacctttttgggtgtgatatacttgtttctttaaaaaaaataaaatgtaaggcaactatgcattttgcctggctgtggctcatggtttattgctttctggtagtggaagtagctaggtgtagtgcctactgattgtgtaatgctttgctgtaccaaaagtgtaatactatactgtttactgtgtcgttcgttatggtgatgtacaccatggagtaatcgaatgggacagacgaatgaactggaactggaaggtgag

SEQ ID NO: 72549 - DNA, 2617 bp, Zea Mays
caggaagcgcccttgtgtctaaacaactcctgatggaacttctgaaagcatctgcagtgatcgttccaggctcgtgaggaaactcatttgctcgaatcatgtccgactttgtcgggagcagatataccaagcaagaagatttccatgttttgttgagcaagaaagatcctggagaaccacctgaacataagcacgtcctgtggatggcacactggaccaaagcaagcagcaacaatggcagcagcaatcctttggagggtaccaccaagggcactactacgaaagatagcgagaccttgccttatgaattcacggaatctacggttgctaaaaggctcatggtaggagtaagccatggaagcgcctccatgcagcatgaccgacaattcaattctagtgtgtggggtatggcacgccatatttccaacgaattgggaccgaagaatagtgaacatgttgatgggtcttttgaaaaatttgtgaagaaggatgctgtgaacttgagagcaagggcagttgtgtcagaaacatactctgttcacaagctttcagagttaccgttggattttcagcaccttgggaactccgacgatccaagtccagattggagccactttccaatgttcgaaattaatcgaaagattgacagtattctcaaccgcaaacgaaggtctgcacctctgaatctaaatgcgtctgcatcccatgtattggccctatcgtcacaagaatacatgatgcactcacatcaaatagctgacgagaacttggatatgtgcagacctgcagaaggctttgcatctcacttagaagatcctgctggcctcaattcagatccttcagggccaaagttaaaaggacagttattggataccgtgtcatgttcttgcagcaaggacgacaccaattcagcagattgtctaatagacgagcagcatacaagccactattttgcaaactcaaagcatgaactgccctctgtatctaacgaaaagaagttcaagtttgcaggaaacaaccacaatcgaattcttgcaagtgcgtcccataaacatgaaagtgttgcagaggcaatgttctgtgcaccagtacttggtagtgagcttcagaatgaacctataactatttccaacatcggcaagaaggatggtgaaaacttccatgagatgtataattgtaatagcaaggctgttccttgttctttgttagctcatgagcaccatcgtcatctgaaaacacagagaacggaatctgcaggaaatttgaaagtctgcacgttacctgatcaacaaactgcaaatgaattggcagacaagagtaatggtgacctgctgacatatggaccaaagccaaagaagggctcttgcaaccgaagaagcctctatttattcgaaaagttaacgattccttccaaatcacaaagtgcatatcctaaaaattctgcgtcttcaggaaaatctagcggctttggagtttgtatgtacggcaccaatattggaagccagttattcggagcacagaatcaatcttcatctaagactgaaacattgcacagcgatgctcttattgggtccaaatcctcagcaggcattgcttcattatcggcacaaaaggacaacggttgcccagccccagccccagccccagccccagacgaagcgaaaagcgagcagctagcagctccgtcgtccaacaccaagcagggaggagaatcagcatacagtaaagaagatggatctcataatctcaacgaaggccacgatgtttcgtccaaagcagctatcggtagcaagcaaccatgcatgcctggagcaggaatcacgaacctggatctcatactctcccagatgagcaggatgagaaaccagattcccagtggcggtgtaactcagccaccaataggcgccgagccaagtgatagatggctcaagcgcctgcagctcggcgtaccagaccctgacgtccttggttccaagaccaagaggccaaaagtcggagacagtcctccgccacccaggcaaataaaccggtcctttgacgtggcactcccttgcaacccaggaaaacaggaggagcagagcttgaatggaggggggaaagtgcagggaagagcccccccgattccagagaagagcgtcaatcgctggatagggagatggtgccagggcggcactcctgttttccgtgaaggcccaggccagggaaggcaggcaacgaaacctgctggccggttgtccgaggagcttgaaggacagttctttccaagcactgcggcgatggcgatgatggggcgcgcgatgcacaagctccggccgtgcgagcagcagcagaaggggccattcgtggtgtggaagatagattgacctttttgggtgtgatatacttgtttctttaaaaaaaataaaatgtaaggcaactatgcattttgcctggctgtggctcatggtttattgctttctggtagtggaagtagctaggtgtagtgcctactgattgtgtaatgctttgctgtaccaaaagtgtaatactatactgtttactgtgtcgttcgttatggtgatgtacaccatggagtaatcgaatgggacagacgaatgaactggaactggaaggtgag

SEQ ID NO: 72550 - DNA, 919 bp, Zea Mays
  misc_feature (918)..(919): n is a, c, g, or t
cgcttccctcgttatttacgttgcggctaccaaagtagcccttaataaaccccaccgccccgccacctcgcccaccatccagaaactcgaatcgtagacacgaacgactacttgagagaggagaggcggcgggagagagaagagtcgacgacgacggtaaccggccgccatggagattggtatggcaagtggactggaaactctatgcggtcaagcctatggagcaaaacagtatgataaactggggatgcacacctacagagctatagtcacactcattgctgtgagcattccaatctcacttctgtggggcattcatagggcaaactcctgatcctcataggtcaggaccccttgatctcaagggaagctgggagatacatagtctggttgattccaggtctctatgcatatgccatcagccagcctctcacaaaatttctacagtctcagagcctgataattcctatgctttggtcctccattgcaactctgctcttgcacattcctctttgttggttactagtgttcaagaccagtatggggtacattggagcttctttggcaataagcttgtcgtattggttaaacgtgatgatgcttgccgcttacatcagatactcggattcttgtaaggagacccgctcacctccaaccgttgaggccttcaaaggagtcagtgtgtttctacgcctggctctgccgtctgcactgatgttgtgtttcgaatggtggtcttttgagatccttattcttgtctcaggaattttaccaaatccagagctgcaaacttcagttctttcaatctgtttgacgactatcacattaatgtatactataccttatgggcttggagcggctgcaagcactagggtagcaaatgagttgggtggtggtaaccctgaaggagctcgatcnn

SEQ ID NO: 72551 - DNA, 1104 bp, Zea Mays
  misc_feature (1103)..(1104): n is a, c, g, or t
ataaaccccaccgccccgccacctcgcccaccatccagaaactcgaatcgtagacacgaacgactacttgagagaggagaggcggcgggagagagaagagtcgacgacgacggtaaccggccgccatggaggtgagggtgccgcttcttccgcagcacatattgcggaacggcgacggacgggagaagaagtgcggcgtgaggcggtggagggagctgctagcgcgggaggccgggaaggtcggctgcgtggccctgccgatggcggccgtgagcgtgtcgcagtacgcggtgcaggtggcgtccaacatgatggtcggccccctccccggcgtcctcccgctctccgcctccgccatcgccacctccctcaccaccgtatccggtttcagcctcctcattggtatggcaagtggactggaaactctatgcggtcaagcctatggagcaaaacagtatgataaactggggatgcacacctacagagctatagtcacactcattgctggcaaactcctgatcctcataggtcaggaccccttgatctcaagggaagctgggagatacatagtctggttgattccaggtctctatgcatatgccatcagccagcctctcacaaaatttctacagtctcagagcctgataattcctatgctttggtcctccattgcaactctgctcttgcacattcctctttgttggttactagtgttcaagaccagtatggggtacattggagcttctttggcaataagcttgtcgtattggttaaacgtgatgatgcttgccgcttacatcagatactcggattcttgtaaggagacccgctcacctccaaccgttgaggccttcaaaggagtcagtgtgtttctacgcctggctctgccgtctgcactgatgttgtgtttcgaatggtggtcttttgagatccttattcttgtctcaggaattttaccaaatccagagctgcaaacttcagttctttcaatctgtttgacgactatcacattaatgtatactataccttatgggcttggagcggctgcaagcactagggtagcaaatgagttgggtggtggtaaccctgaaggagctcgatcnn

SEQ ID NO: 72552 - DNA, 2306 bp, Zea Mays
gcagcagagcccagtccgcccgggacgtgtcgcgcttacgtggacacgctgccagacgggcacaaaccacgaaacggaacccattgatcgagccgaagccgattgacggcaggcagcccatcgtctcccctctccggctctccccacctcctcttttaaagacgacgccaccgccaccgccacccggccctccctcgtccccagcctcgccgtccggcgctgccctgtcccatctcaccgcagctcgctcccacctcgagccgcgagcgcgcccgtagcagtctcaacgcgggcactcgcttgcgtaccccaggccgatcgacgagtccgcccggcccgcgtctcacgcgtgagcctgttgcgcgcggtggcttgttgttcgatcatattcgtgtacgggcaccccgcacggccggagaatcacttgccagccccagccccgttttccggggctcctcatccctcgcctcgccggtgttgcttcccggaggtttccgctgccgctgcgtgccggtgccgcgggcaggcgcaggaggctctcggctgtttccttagcgtgccatcgtccatggaggcgaagcagcgcccgcggcacggcgaggagaggaggccgccggcgacggacaacggcggcggcggcggcgaggagtacgacccatggacggcgtggctctacaagccgcacaccatctcggtgctcctcgtcggcgcctgccttctcatctgggcaagtggagcactcgatcctgaaggcgctgctgctcacagtagcttgacatcaatcaagaggggtgtctgggctatgattgcagccttccttgcctactgcacgcttcaggcaccttcaacgatacttattaggccccatcctgctgtctggcgcctggtacatggactggctgtcgtttacctcgttgctcttaccttcctccttttccagaatcgtgacgatgctcgccagttcatgaaacaccttcaccctgatcttggagttgaattgccagagagatcttatggagctgattgccgtttgtatgttccagaaaaccctaaaaacaagttcataaatatttatgagacattgtttgatgaatttgttgttgcccatatccttgggtggtttggcaaagctgtgatgatacgaaatcaacttctactttgggtattgtcgatcggctttgagctaatggagctaactttcagacatatgttgccaaactttaatgagtgctggtgggatagcattattttggatatcttgatctgcaattggtttggtatttgggcaggaatgcacacagtccgttactttgatggcaaaacatatgaatgggtcggactgagccgccaacgaagcatcatgggtgaaaagatcgctgagccagttcacccctgctcaatgggacaaggatcagtggcatcctttcatggggccactgcggttcatccaagttctgttcctctgtgttgtcttcatgaccgtggagcttaacacattcttccttaagttttgcctgtggatccctccaaggaatcccttagtcgtgtacagattgatcctctggtggctgattgccatcccaaccatccgcgagtacaactcctacttacaagacagcaaaccggcgaagaaggttggagccttctgttggctctctctggctatatgcatagtggagctgcttatctgcatgaagtttgggcatgggctatttcatgacccaatgcctacctggctgatcatcttttggagcttggttgggattgcacttgtggttttcttgctttcatggtcatggaggagtcacagaagattcaggagaaaacggctgtgatagatttcaataactcaccttagattctttcaattcgcttcttttcttttccctttctctttctttttcatttttatatacgatatggtatgatatgatatgtgatgtaacctacgttttagaggagccccatttttctgctgctcctggcaggggactcggtttgtcaggataggtcattgttgtcaacatgagattgatgaataatcaaggtagctgcagcatcagcaccaagtgtaattaaacagtaaagcaagatcactgtgcgtgaattgggcttaccaaacttcttctgggccagtaatgcacagttgtgtaataccacctatcgctatcttggatggtgcatcatttattcagtttgtctcaccggtccagtcgaaggtctatgacatttttctcgaacatgtaaaatatttatgcatcattgtaattgaggtagaagattttaatcataaaacgtcgcccttg

SEQ ID NO: 72553 - DNA, 2320 bp, Zea Mays
gcagcagagcccagtccgcccgggacgtgtcgcgcttacgtggacacgctgccagacgggcacaaaccacgaaacggaacccattgatcgagccgaagccgattgacggcaggcagcccatcgtctcccctctccggctctccccacctcctcttttaaagacgacgccaccgccaccgccacccggccctccctcgtccccagcctcgccgtccggcgctgccctgtcccatctcaccgcagctcgctcccacctcgagccgcgagcgcgcccgtagcagtctcaacgcgggcactcgcttgcgtaccccaggccgatcgacgagtccgcccggcccgcgtctcacgcgtgagcctgttgcgcgcggtggcttgttgttcgatcatattcgtgtacgggcaccccgcacggccggagaatcacttgccagccccagccccgttttccggggctcctcatccctcgcctcgccggtacgtacggtgttgcttcccggaggtttccgctgccgctgcgtgccggtgccgcgggcaggcgcaggaggctctcggctgtttccttagcgtgccatcgtccatggaggcgaagcagcgcccgcggcacggcgaggagaggaggccgccggcgacggacaacggcggcggcggcggcgaggagtacgacccatggacggcgtggctctacaagccgcacaccatctcggtgctcctcgtcggcgcctgccttctcatctgggcaagtggagcactcgatcctgaaggcgctgctgctcacagtagcttgacatcaatcaagaggggtgtctgggctatgattgcagccttccttgcctactgcacgcttcaggcaccttcaacgatacttattaggccccatcctgctgtctggcgcctggtacatggactggctgtcgtttacctcgttgctcttaccttcctccttttccagaatcgtgacgatgctcgccagttcatgaaacaccttcaccctgatcttggagttgaattgccagagagatcttatggagctgattgccgtttgtatgttccagaaaaccctaaaaacaagttcataaatatttatgagacattgtttgatgaatttgttgttgcccatatccttgggtggtttggcaaagctgtgatgatacgaaatcaacttctactttgggtattgtcgatcggctttgagctaatggagctaactttcagacatatgttgccaaactttaatgagtgctggtgggatagcattattttggatatcttgatctgcaattggtttggtatttgggcaggaatgcacacagtccgttactttgatggcaaaacatatgaatgggtcggactgagccgccaacgaagcatcatgggtaaggtgaaaagatcgctgagccagttcacccctgctcaatgggacaaggatcagtggcatcctttcatggggccactgcggttcatccaagttctgttcctctgtgttgtcttcatgaccgtggagcttaacacattcttccttaagttttgcctgtggatccctccaaggaatcccttagtcgtgtacagattgatcctctggtggctgattgccatcccaaccatccgcgagtacaactcctacttacaagacagcaaaccggcgaagaaggttggagccttctgttggctctctctggctatatgcatagtggagctgcttatctgcatgaagtttgggcatgggctatttcatgacccaatgcctacctggctgatcatcttttggagcttggttgggattgcacttgtggttttcttgctttcatggtcatggaggagtcacagaagattcaggagaaaacggctgtgatagatttcaataactcaccttagattctttcaattcgcttcttttcttttccctttctctttctttttcatttttatatacgatatggtatgatatgatatgtgatgtaacctacgttttagaggagccccatttttctgctgctcctggcaggggactcggtttgtcaggataggtcattgttgtcaacatgagattgatgaataatcaaggtagctgcagcatcagcaccaagtgtaattaaacagtaaagcaagatcactgtgcgtgaattgggcttaccaaacttcttctgggccagtaatgcacagttgtgtaataccacctatcgctatcttggatggtgcatcatttattcagtttgtctcaccggtccagtcgaaggtctatgacatttttctcgaacatgtaaaatatttatgcatcattgtaattgaggtagaagattttaatcataaaacgtcgcccttg

SEQ ID NO: 72554 - DNA, 2568 bp, Zea Mays
gcagcagagcccagtccgcccgggacgtgtcgcgcttacgtggacacgctgccagacgggcacaaaccacgaaacggaacccattgatcgagccgaagccgattgacggcaggcagcccatcgtctcccctctccggctctccccacctcctcttttaaagacgacgccaccgccaccgccacccggccctccctcgtccccagcctcgccgtccggcgctgccctgtcccatctcaccgcagctcgctcccacctcgagccgcgagcgcgcccgtagcagtctcaacgcgggcactcgcttgcgtaccccaggccgatcgacgagtccgcccggcccgcgtctcacgcgtgagcctgttgcgcgcggtggcttgttgttcgatcatattcgtgtacgggcaccccgcacggccggagaatcacttgccagccccagccccgttttccggggctcctcatccctcgcctcgccggtgttgcttcccggaggtttccgctgccgctgcgtgccggtgccgcgggcaggcgcaggaggctctcggctgtttccttagcgtgccatcgtccatggaggcgaagcagcgcccgcggcacggcgaggagaggaggccgccggcgacggacaacggcggcggcggcggcgaggagtacgacccatggacggcgtggctctacaagccgcacaccatctcggtgctcctcgtcggcgcctgccttctcatctgggcaagtggagcactcgatcctgaaggcgctgctgctcacagtagcttgacatcaatcaagaggggtgtctgggctatgattgcagccttccttgcctactgcacgcttcaggcaccttcaacgcactgtcagtttctactcgttcaaaaaaaaattatcagtggagttgcatcttgtttgtcaattggtggttggtgctgaagccgcagaagttttcaagtagcaattgacaaattgcccatagggacacacggtgccaatggcatcttcactacctgcctgtgcttgctgcaagattctgctccttatattcctgtcttcgcaatgttgcatcaccagtcgttcattctatacccatttccagctcccataaatcgcagatacttattaggccccatcctgctgtctggcgcctggtacatggactggctgtcgtttacctcgttgctcttaccttcctccttttccagaatcgtgacgatgctcgccagttcatgaaacaccttcaccctgatcttggagttgaattgccagagagatcttatggagctgattgccgtttgtatgttccagaaaaccctaaaaacaagttcataaatatttatgagacattgtttgatgaatttgttgttgcccatatccttgggtggtttggcaaagctgtgatgatacgaaatcaacttctactttgggtattgtcgatcggctttgagctaatggagctaactttcagacatatgttgccaaactttaatgagtgctggtgggatagcattattttggatatcttgatctgcaattggtttggtatttgggcaggaatgcacacagtccgttactttgatggcaaaacatatgaatgggtcggactgagccgccaacgaagcatcatgggtaaggtgaaaagatcgctgagccagttcacccctgctcaatgggacaaggatcagtggcatcctttcatggggccactgcggttcatccaagttctgttcctctgtgttgtcttcatgaccgtggagcttaacacattcttccttaagttttgcctgtggatccctccaaggaatcccttagtcgtgtacagattgatcctctggtggctgattgccatcccaaccatccgcgagtacaactcctacttacaagacagcaaaccggcgaagaaggttggagccttctgttggctctctctggctatatgcatagtggagctgcttatctgcatgaagtttgggcatgggctatttcatgacccaatgcctacctggctgatcatcttttggagcttggttgggattgcacttgtggttttcttgctttcatggtcatggaggagtcacagaagattcaggagaaaacggctgtgatagatttcaataactcaccttagattctttcaattcgcttcttttcttttccctttctctttctttttcatttttatatacgatatggtatgatatgatatgtgatgtaacctacgttttagaggagccccatttttctgctgctcctggcaggggactcggtttgtcaggataggtcattgttgtcaacatgagattgatgaataatcaaggtagctgcagcatcagcaccaagtgtaattaaacagtaaagcaagatcactgtgcgtgaattgggcttaccaaacttcttctgggccagtaatgcacagttgtgtaataccacctatcgctatcttggatggtgcatcatttattcagtttgtctcaccggtccagtcgaaggtctatgacatttttctcgaacatgtaaaatatttatgcatcattgtaattgaggtagaagattttaatcataaaacgtcgcccttg

SEQ ID NO: 72555 - DNA, 2638 bp, Zea Mays
gcagcagagcccagtccgcccgggacgtgtcgcgcttacgtggacacgctgccagacgggcacaaaccacgaaacggaacccattgatcgagccgaagccgattgacggcaggcagcccatcgtctcccctctccggctctccccacctcctcttttaaagacgacgccaccgccaccgccacccggccctccctcgtccccagcctcgccgtccggcgctgccctgtcccatctcaccgcagctcgctcccacctcgagccgcgagcgcgcccgtagcagtctcaacgcgggcactcgcttgcgtaccccaggccgatcgacgagtccgcccggcccgcgtctcacgcgtgagcctgttgcgcgcggtggcttgttgttcgatcatattcgtgtacgggcaccccgcacggccggagaatcacttgccagccccagccccgttttccggggctcctcatccctcgcctcgccggtgttgcttcccggaggtttccgctgccgctgcgtgccggtgccgcgggcaggcgcaggaggctctcggctgtttccttagcgtgccatcgtccatggaggcgaagcagcgcccgcggcacggcgaggagaggaggccgccggcgacggacaacggcggcggcggcggcgaggagtacgacccatggacggcgtggctctacaagccgcacaccatctcggtgctcctcgtcggcgcctgccttctcatctgggcaagtggagcactcgatcctgaaggcgctgctgctcacagtagcttgacatcaatcaagaggggtgtctgggctatgattgcagccttccttgcctactgcacgcttcaggcaccttcaacgcactgtcagtttctactcgttcaaaaaaaaattatcagtggagttgcatcttgtttgtcaattggtggttggtgctgaagccgcagaagttttcaagtagcaattgacaaattgcccatagggacacacggtgccaatggcatcttcactacctgcctgtgcttgctgcaagattctgctccttatattcctgtcttcgcaatgttgcatcaccagtcgttcattctatacccatttccagctcccataaatcgcagtagtgctttactgatgatccatagccattttcagctcccataaatctgctgtactgattcagtgctcctggcaattttgtcacaggatacttattaggccccatcctgctgtctggcgcctggtacatggactggctgtcgtttacctcgttgctcttaccttcctccttttccagaatcgtgacgatgctcgccagttcatgaaacaccttcaccctgatcttggagttgaattgccagagagatcttatggagctgattgccgtttgtatgttccagaaaaccctaaaaacaagttcataaatatttatgagacattgtttgatgaatttgttgttgcccatatccttgggtggtttggcaaagctgtgatgatacgaaatcaacttctactttgggtattgtcgatcggctttgagctaatggagacatatgttgccaaactttaatgagtgctggtgggatagcattattttggatatcttgatctgcaattggtttggtatttgggcaggaatgcacacagtccgttactttgatggcaaaacatatgaatgggtcggactgagccgccaacgaagcatcatgggtgaaaagatcgctgagccagttcacccctgctcaatgggacaaggatcagtggcatcctttcatggggccactgcggttcatccaagttctgttcctctgtgttgtcttcatgaccgtggagcttaacacattcttccttaagttttgcctgtggatccctccaaggaatcccttagtcgtgtacagattgatcctctggtggctgattgccatcccaaccatccgcgagtacaactcctacttacaagacagcaaaccggcgaagaaggttggagccttctgttggctctctctggctatatgcatagtggagctgcttatctgcatgaagtttgggcatgggctatttcatgacccaatgcctacctggctgatcatcttttggagcttggttgggattgcacttgtggttttcttgctttcatggtcatggaggagtcacagaagattcaggagaaaacggctgtgatagatttcaataactcaccttagattctttcaattcgcttcttttcttttccctttctctttctttttcatttttatatacgatatggtatgatatgatatgtgatgtaacctacgttttagaggagccccatttttctgctgctcctggcaggggactcggtttgtcaggataggtcattgttgtcaacatgagattgatgaataatcaaggtagctgcagcatcagcaccaagtgtaattaaacagtaaagcaagatcactgtgcgtgaattgggcttaccaaacttcttctgggccagtaatgcacagttgtgtaataccacctatcgctatcttggatggtgcatcatttattcagtttgtctcaccggtccagtcgaaggtctatgacatttttctcgaacatgtaaaatatttatgcatcattgtaattgaggtagaagattttaatcataaaacgtcgcccttg

SEQ ID NO: 72556 - DNA, 999 bp, Zea Mays
agcacaccgcctggacacttgctctcagcgctccagatattccagccgacgcgctggatggaaaaatctggtcgtctggccttatcccgccgctcaccgccggtgaagattccgccgtcgtcatcccaatgccgctcaagccaccacccttgagctcctacaaatccctctactggcgctttctctagctcgctcgagtccctccgtcgcgccctgcgtttgccatcgacgcgcgccgatttctcaagacccctccatggcgttcttccctgtgcaggacgataaataatcgcgtgatgcggaaaagatgacccaagtcgaccccaagcgcgggctaacccgcaggatgatgctgatgaacggaactgaagatggataatctgacgacactaacctagtgttactcaggcaagccccggtgcatttgccaccttccttgatgtttttaaaatctttctcacttgcttgatgcattaggtgataggagttgattgataaaacaattcctgcattaccttccttgaattcgattaccttccttgaccacccgttttacaaaagattttgatgcttagccttgctttagaaaataaaatgttttgtttttacaaaatatgatgtggcaaaggtgggtgggatgttttcgaaaataaagcttggtggtggatctgtcaaaggccttgatggattcaacatcggaaaagatgtacctctgccaggtaccaagttttttgggttgaaatgaataagctgagaccgggcgggtgacttgcacgagaagagagtctcggtgtagtgtctccgtctgagtcgattaaggaccgtctcgatgtaggcttgatgatcgaggaccctttaactggtcacatgcctcgtcatgggtaagccttgcctcgggcagactaaggccagaataagataacacgaaatgggtgtggagcggtggcgagagtagcgtgtaccctccgtggcaagaggctggacggtggtgtatctgtg

SEQ ID NO: 72557 - DNA, 2006 bp, Zea Mays
cgcctggacacttgctctcagcgctccagatattccagccgacgcgctggatggaaaaatctggtcgtctggccttatcccgccgctcaccgccggtgaagattccgccgtcgtcatcccaatgccgctcaagccaccacccttgagctcctacaaatccctctactggcgctttctctagctcgctcgagtccctccgtcgcgccctgcgtttgccatcgacgcgcgccgatttctcaagacccctccatggcgttcttccctgtgcaggtcgcccagctcccagccctggcacgcacccctctccttcctccctgctccactgtgccgagccctcccatggagtcttgccgagttcgcccagcccatgtgcctgcgcgtctctgcccggcgttcctctcttggtcgccgagctacctctcccgcggttcctggttttccatggcgcccagcctcagctcgcgcccaagctcctgcgcgtccccctgtttttctctctcgtggctctctctgctctgctcccatggcggccgagctctctggtgccgcgtctccctgctcgctcgcgctctgccgagcggctctacctgcgcgcgtccctcagtccctgctcggattcggccctgtgcgcgtgcagctcgagctcggattggtccttgattcactgtgtcgtgaagtctgcgcgccgcgcgcgccgctccccgagctcgcctaaatcagacagggcctccctcagctcacgcccagccgaaattccctgtgcgcgcctctattcatggccgtggtgatgttgtggcgtggcgacagcgtgcgcgtcgcgacagccgtcccggccgcggagcaatccgtgccatagagttcgccaacgttcggttaccagttcgactatcgtcgctattgcgcacgctcgtactcgctatctcctgctcgaccccgtcgtcgagcttcgcctggccagtcgtcgtgtgtgctcgcgcttagttgcgcttgcctgcatccgcgtcgttctttaacttagtgctagactgcgtccgtttggctctagctcgctcactattagcgctcgtgtcggccacacaaaacctcgacgtcgaacgtactgttctacgcaagacaggcccgcgtcatcatcattcttgctgtggattgtcgagtctaacgtctcgacaacaaccgcatccacgactccgccgttccaataattttaccgtaccgcccttcaaatccaagtcctcgcccataggatcgtcgttgaccttgcgacttcagctcgagttaattatggacgataaataatcgcgtgatgcggaaaagatgacccaagtcgaccccaagcgcgggctaacccgcaggatgatgctgatgaacggaactgaagatggataatctgacgacactaacctagtgttactcaggcaagccccggtgcatttgccaccttccttgatgtttttaaaatctttctcacttgcttgatgcattaggtgataggagttgattgataaaacaattcctgcattaccttccttgaattcgattaccttccttgaccacccgttttacaaaagattttgatgcttagccttgctttagaaaataaaatgttttgtttttacaaaatatgatgtggcaaaggtgggtgggatgttttcgaaaataaagcttggtggtggatctgtcaaaggccttgatggattcaacatcggaaaagatgtacctctgccaggtaccaagttttttgggttgaaatgaataagctgagaccgggcgggtgacttgcacgagaagagagtctcggtgtagtgtctccgtctgagtcgattaaggaccgtctcgatgtaggcttgatgatcgaggaccctttaactggtcacatgcctcgtcatgggtaagccttgcctcgggcagactaaggccagaataagataacacgaaatgggtgtggagcggtggcgagagtagcgtgtaccctccgtggcaagaggctggacggtggtgtatctgtg

SEQ ID NO: 72558 - DNA, 1432 bp, Zea Mays
gccttatcccgccgctcaccgccggtgaagattccgccgtcgtcatcccaatgccgctcaagccaccacccttgagctcctacaaatccctctactggcgctttctctagctcgctcgagtccctccgtcgcgccctgcgtttgccatcgacgcgcgccgatttctcaagacccctccatggcgttcttccctgtgcaggtcgcccagctcccagccctggcacgcacccctctccttcctccctgctccactgtgccgagccctcccatggagtcttgccgagttcgcccagcccatgtgcctgcgcgtctctgcccggcgttcctctcttggtcgccgagctacctctcccgcggttcctggttttccatggcgcccagcctcagctcgcgcccaagctcctgcgcgtccccctgtttttctctctcgtggctctctctgctctgctcccatggcggccgagctctctggtgccgcgtctccctgctcgctcgcgctctgccgagcggctctacctgcgcgcgtccctcagtccctgctcggattcggccctgtgcgcgtgcagctcgagctcggattggtccttgattcactgtgtcgtgaagtctgcgcgccgcgcgcgccgctccccgagctcgcctaaatcagacagggcctccctcagctcacgcccagccgaaattccctgtgcgcgcctctattcatggccgtggtgatgttgtggcgtggcgacagcgtgcgcgtcgcgacagccgtcccggccgcggagcaatccgtgccatagagttcgccaacgttcggttaccagttcgactatcgtcgctattgcgcacgctcgtactcgctatctcctgctcgaccccgtcgtcgagcttcgcctggccagtcgtcgtgtgtgctcgcgcttagttgcgcttgcctgcatccgcgtcgttctttaacttagtgctagactgcgtccgtttggctctagctcgctcactattagcgctcgtgtcggccacacaaaacctcgacgtcgaacgtactgttctacgcaagacaggcccgcgtcatcatcattcttgctgtggattgtcgagtctaacgtctcgacaacaaccgcatccacgactccgccgttccaataattttaccgtaccgcccttcaaatccaagtcctcgcccataggatcgtcgttgaccttgcgacttcagctcgagttaattatggtaagttgatatattattcccgtcaactaaataaatggtaggattaaatagaagaattgattgcgatgattctcttgtttattactcgatgttgagaataaattgaattttaggtttatgtgataagtatattggtagatatatatgatacacaggttaaccggtaaattagtttagaaagttaataaaagttcttctatcaaattttataagtattag

SEQ ID NO: 72559 - DNA, 940 bp, Zea Mays
tataaacctaatctcattggtggttgctgaaagagcgcttttcatgtggaacaatgatcacattgtcagcttgatagcacaaaaccgccaagtgatcatgtctcttgttgttccagcgctagagcagaacattcagaatcactggaaccaagcggtcctgaatctggctgtgaatgtcaagaaaatgttttctgagatggatggtgaccatttctcgtcgtgcctggccaggtacaaggaggaagaagaaagacttgtgtcgctagaagcgaagcgtaaacttacctgggagaagcttgagtcagctgcagccttccagccagtgactggccaaacagccgtcctagtaggccaccagccgtcagcaaatatgatcgccaacctgatcttctagcccatgcatgccgaacaagcaaatgtgctcttccccccttttggtgaagcgcagcaagtgtaggtgttccctaattttctcatgcttttttttttgcatttgttggtgcgagtaatcagtgtagtaagctgtaactatttctggatggttatgttcatcaggcaagaatacctgtaatgtgagactgctgagtgctggcactccttacatgtatctttgccaatttgtggatgaacaaattgtcctacagttgaatttcacctcagcttgcctattatgattggctgacgcagaatcatcaagtgctatttttatttccaaaatgtctgaagctttggtttgaattcaatccattctcacagcttaccactgcgattcaattttgaaatggacatgttgttagactgtttgtgtgttctgggcctagagtccacttagggcttgttcgtttccgtcggattgcacccggaatcgttccagctaatcaaagtttatataaattagagaagcaatccgattaggaatcgttccgacccaccaatccgg

SEQ ID NO: 72560 - DNA, 675 bp, Zea Mays
atggcgtcacgagctgcacgaaaaccaaacgcctcgatccgcgtggcctgccacttggcagcagaaacacctcgtggatgcaaaaatagcgtcataatactacatgttccatttgggcctgtaagcgcagcccgggagaatttttggggccagctgttgggccgaggtcgacgacggggtcgacctctccgtggagacagccaaggcggccgtgagccacgccgccacgagccaccacgagcacggcggcgagctcagcgatctggagtcggatctggtggggcggcagaagactggctgctcgtcgtcgccggcggcaacaacgccggctgcagagctgatcgtgccgccagcacagcagatctagcaattccaggtggtacaaaagggtttttcatcaacaagtggtcaccaaaagaagaactgaaacatcaagatggtgtttgcttctacattttaccattgaggatatgatgctaaactgaagtcatgtattatgctatgcattcagaagatgatgctaaactgaataagcacatcaatctgatttttctatgcactgagactatgtttgtattattgttatgcaatgcaatctatgcactaaaacgttcaactctgtttgatctggctgacatattcagaattataatacgctgctgccaatttgcaaaa

SEQ ID NO: 72561 - DNA, 895 bp, Zea Mays
atggcgtcacgagctgcacgaaaaccaaacgcctcgatccgcgtggcctgccacttggcagcagaaacacctcgtggatgcaaaaatagcgtcataatactacatgttccatttgggcctgtaagcgcagcccgggagaatttttggggccagctgttgggccgaggtcgacgacggggtcgacctctccgtggagacagccaaggcggccgtgagccacgccgccacgagccaccacgagcacggcggcgagctcagcgatctggagtcggatctggtggggcggcagaagactggctgctcgtcgtcgccggcggcaacaacgccggctgcagagctgatcgtgccgccagcacagcagatctagcaattccaggtgaagagaagagagccgatttgtgcttgctaatcactggcggagacctacagtgctacttgcatgtgtgcgttgcgtgcagatccagcaattccaggatttttgccacaccatgtgtgcgttgcgtgcttcgaatggattgaaatccaaatccatttcgtcttgccactgcactacacctgcacgcctgcacctgcacgcccggccgagctcttgaccggtggtacaaaagggtttttcatcaacaagtggtcaccaaaagaagaactgaaacatcaagatggtgtttgcttctacattttaccattgaggatatgatgctaaactgaagtcatgtattatgctatgcattcagaagatgatgctaaactgaataagcacatcaatctgatttttctatgcactgagactatgtttgtattattgttatgcaatgcaatctatgcactaaaacgttcaactctgtttgatctggctgacatattcagaattataatacgctgctgccaatttgcaaaa

SEQ ID NO: 72562 - DNA, 1902 bp, Zea Mays
acaaccggatcgtggatggacggagacagtgagacacgtgggacacggtggtcgttggatttgcagcggacggtgccgatcgcgtggctggagggacgagtcgcttatcgcttgcgaagaagcctaaacgatggcctggctgttctgtcctgtcctgtccatgtccatgtcggtgtctttccccgcacaggagccgcgctgcgccacaccacgccattgccatgccagtatgccagttgccaccgaggtaaacagcatagcgacggctcagcatagagacaagtccagcgctcaagagagagagagcaagcctttcggcctcgcgtgatgcagcagcagcagccgtccgtccgcgccgtcaccatccccttcgccgaccttaaggatcggggcaaggacctgggcggcttcatcgaggaaggcttcgggcctcaggggctcggcatcgtctccatcgccggcgtacccggttacccagagctcaggaaaaggctgctgcgcttggcgccaaggatcgtcagccttcctgatgatgtgaagaaacaactggaggacccagatagcaggtcataatttaggaatttacagaatggtcttcaccagggagcttttgtcatgataccactttggttggagtcgtgtagaagagaaattcgagtctgaaagatgggacacagccaaaggctcctacttcgccaacccagtttttgatgtcccaacaactgatgatgagcttgtaactagatacccatcatactgccgaccaaacatatggccaaaggatcatcttcctgagcttgaaatagcattcaaaggtcttggaaaactgatgttggaagttggcttgatgttggctcatcattgtgatcgctatgtaatacagcgaggggtgggacagtacattggtgaaagccttgagaagacacttgctaggtcaaggtgtcccaagggtcgtctgctgtactacttccccaaatcgtttagcaaacaggacgaagtttcgtcatggtgtggatggcatactgactatggatttttgacaggacttacatgtggcttgttcacgagaaaatcagaggaggtcccctgtcctgatattggaactgggctgtatgttcggactcgtgataatcaagtcgtcaaggtcacacttgtggatgatgagttggtctaccaaattggggagactgctgaaatactatcaagagggcatctatgtgcaaccccacactgtgtgaaggctcccagcagcgaagatgcttctgacgttggtcgctcaactttcgttctgtttattcagccaaactgggatgagccgctgaagcttcctagtgaaatacgctatcaccaggagtgcattccaccaaccaggacacttgcgtacggcgagtactccgaaagagtcttggcgagttttagcggcaagagcgtggaacaaaccttgatgccacagtaagaggctccagccagatgaatactccctctgtttctttttatttgtcgctggatagttcaattttatactatccagcgacaattaaaacgaaacggagggagtatatcatatgtatgataccataccattcaagctacagataagtggacagaagcatatgctgttgtgggatggatgaatcgcacgcagcttaaaataatgcaacaataagactttgtttgcatacctaccatcgtagtgacacatgtgaattgagacgaataacaaagtgtttacacgagaccttttttaaaacgggtatttacacgagacctagaggtacgtaatgtgcaccccgtcctgtttgggattataatctatatagattatataatccaatgtaaataagctagtgaggaaacaaacaagcaatttatatgataagattatataatctagcacttgag

SEQ ID NO: 72563 - DNA, 1731 bp, Zea Mays
acaaccggatcgtggatggacggagacagtgagacacgtgggacacggtggtcgttggatttgcagcggacggtgccgatcgcgtggctggagggacgagtcgcttatcgcttgcgaagaagcctaaacgatggcctggctgttctgtcctgtcctgtccatgtccatgtcggtgtctttccccgcacaggagccgcgctgcgccacaccacgccattgccatgccagtatgccagttgccaccgaggtaaacagcatagcgacggctcagcatagagacaagtccagcgctcaagagagagagagcaagcctttcggcctcgcgtgatgcagcagcagcagccgtccgtccgcgccgtcaccatccccttcgccgaccttaaggatcggggcaaggacctgggcggcttcatcgaggaaggcttcgggcctcaggggctcggcatcgtctccatcgccggcgtacccggttacccagagctcaggaaaaggctgctgcgcttggcgccaaggatcgtcagccttcctgatgatgtgaagaaacaactggaggacccagatagcagataccactttggttggagtcgtgtagaagagaaattcgagtctgaaagatgggatacccatcatactgccgaccaaacatatggccaaaggatcatcttcctgagcttgaaatagcattcaaaggtcttggaaaactgatgttggaagttggcttgatgttggctcatcattgtgatcgctatgtaatacagcgaggggtgggacagtacattggtgaaagccttgagaagacacttgctaggtcaaggtgtcccaagggtcgtctgctgtactacttccccaaatcgtttagcaaacaggacgaagtttcgtcatggtgtggatggcatactgactatggatttttgacaggacttacatgtggcttgttcacgagaaaatcagaggaggtcccctgtcctgatattggaactgggctgtatgttcggactcgtgataatcaagtcgtcaaggtcacacttgtggatgatgagttggtctaccaaattggggagactgctgaaatactatcaagagggcatctatgtgcaaccccacactgtgtgaaggctcccagcagcgaagatgcttctgacgttggtcgctcaactttcgttctgtttattcagccaaactgtgcattccaccaaccaggacacttgcgtacggcgagtactccgaaagagtcttggcgagttttagcggcaagagcgtggaacaaaccttgatgccacagtaagaggctccagccagatgaatactccctctgtttctttttatttgtcgctggatagttcaattttatactatccagcgacaattaaaacgaaacggagggagtatatcatatgtatgataccataccattcaagctacagataagtggacagaagcatatgctgttgtgggatggatgaatcgcacgcagcttaaaataatgcaacaataagactttgtttgcatacctaccatcgtagtgacacatgtgaattgagacgaataacaaagtgtttacacgagaccttttttaaaacgggtatttacacgagacctagaggtacgtaatgtgcaccccgtcctgtttgggattataatctatatagattatataatccaatgtaaataagctagtgaggaaacaaacaagcaatttatatgataagattatataatctagcacttgag

SEQ ID NO: 72564 - DNA, 2500 bp, Zea Mays
acaaccggatcgtggatggacggagacagtgagacacgtgggacacggtggtcgttggatttgcagcggacggtgccgatcgcgtggctggagggacgagtcgcttatcgcttgcgaagaagcctaaacgatggcctggctgttctgtcctgtcctgtccatgtccatgtcggtgtctttccccgcacaggagccgcgctgcgccacaccacgccattgccatgccagtatgccagttgccaccgaggtaaacagcatagcgacggctcagcatagagacaagtccagcgctcaagagagagagagcaagcctttcggcctcgcgtgatgcagcagcagcagccgtccgtccgcgccgtcaccatccccttcgccgaccttaaggatcggggcaaggacctgggcggcttcatcgaggaaggcttcgggcctcaggggctcggcatcgtctccatcgccggcgtacccggttacccagagctcaggaaaaggctgctgcgcttggcgccaaggatcgtcagccttcctgatgatgtgaagaaacaactggaggacccagatagcaggtcataatttaggaatttacagaatggtcttcaccagggagcttttgtcatggttgcttagtgtctacttgaatattcctcttctttcttcattttctttcagaacaataagagctcctaagctaggatttgtatataacttgcacttcagttcatacaaagcttatgtatttcttatgcattattggccttgcttcacagataccactttggttggagtcgtgtagaagagaaattcgagtctgaaagatgggacacagccaaaggctcctacttcgccaacccagtttttgatgtcccaacaactgatgatgagcttgtaactagatacccatcatactgccgaccaaacatatggccaaaggatcatcttcctgagcttgaaatagcattcaaaggtcttggaaaactgatgttggaagttggcttgatgttggctcatcattgtgatcgctatgtaatacagcgaggggtgggacagtacattggtgaaagccttgagaagacacttgctaggtcaaggtgtcccaagggtcgtctgctgtactacttccccaaatcgtttagcaaacaggacgaagtttcgtcatggtgtggatggcatactgactatggatttttgacaggacttacatgtggcttgttcacgagaaaatcagaggaggtcccctgtcctgatattggaactgggctgtatgttcggactcgtgataatcaagtcgtcaaggtcacacttgtggatgatgagttggtctaccaaattggggagactgctgaaatactatcaagagggcatctatgtgcaaccccacactgtgtgaaggctcccagcagcgaagatgcttctgacgttggtcgctcaactttcgttctgtttattcagccaaactggtaagtgcagtgcaggtttgtctacccatttgccatctagtagaaatgatcgctcacttgttagggtttcttcctcccatctcagttgtgaaatgtgatgcagagaaacacttttgcatacttcccagttcgctcgttaaactttacccaattattctagtccaattcagactgaagattttttttaaaaaaaaacaaacaaactgaatggcaacagggaagtgctaggtttaatttgtattgtctacttgtgaattcccatatgttatgcgcacgcatgtttccaaactccaaagccaaatcaacatttgaaaatttgggcagggatgagccgctgaagcttcctagtgaaatacgctatcaccaggaggtttgtctacagtacacaccgttttttttttcttttcttttctttttgtgtgctccatcgtggtttgcttctgcatgctccctccactccaaatgagaaatgaccgctcctctttgactcggcagtgcattccaccaaccaggacacttgcgtacggcgagtactccgaaagagtcttggcgagttttagcggcaagagcgtggaacaaaccttgatgccacagtaagaggctccagccagatgaatactccctctgtttctttttatttgtcgctggatagttcaattttatactatccagcgacaattaaaacgaaacggagggagtatatcatatgtatgataccataccattcaagctacagataagtggacagaagcatatgctgttgtgggatggatgaatcgcacgcagcttaaaataatgcaacaataagactttgtttgcatacctaccatcgtagtgacacatgtgaattgagacgaataacaaagtgtttacacgagaccttttttaaaacgggtatttacacgagacctagaggtacgtaatgtgcaccccgtcctgtttgggattataatctatatagattatataatccaatgtaaataagctagtgaggaaacaaacaagcaatttatatgataagattatataatctagcacttgag

SEQ ID NO: 72565 - DNA, 1405 bp, Zea Mays
gttgttttgcactctcgtggaagttcaggggcttgaggccctaatcagggcgatacgccatgattttgatcgtcagccttcctgatgatgtgaagaaacaactggaggacccagatagcagataccactttggttggagtcgtgtagaagagaaattcgagtctgaaagatgggacacagccaaaggctcctacttcgccaacccagtttttgatgtcccaacaactgatgatgagcttgtaactagatacccatcatactgccgaccaaacatatggccaaaggatcatcttcctgagcttgaaatagcattcaaaggtcttggaaaactgatgttggaagttggcttgatgttggctcatcattgtgatcgctatgtaatacagcgaggggtgggacagtacattggtgaaagccttgagaagacacttgctaggtcaaggtgtcccaagggtcgtctgctgtactacttccccaaatcgtttagcaaacaggacgaagtttcgtcatggtgtggatggcatactgactatggatttttgacaggacttacatgtggcttgttcacgagaaaatcagaggaggtcccctgtcctgatattggaactgggctgtatgttcggactcgtgataatcaagtcgtcaaggtcacacttgtggatgatgagttggtctaccaaattggggagactgctgaaatactatcaagagggcatctatgtgcaaccccacactgtgtgaaggctcccagcagcgaagatgcttctgacgttggtcgctcaactttcgttctgtttattcagccaaactgggatgagccgctgaagcttcctagtgaaatacgctatcaccaggagtgcattccaccaaccaggacacttgcgtacggcgagtactccgaaagagtcttggcgagttttagcggcaagagcgtggaacaaaccttgatgccacagtaagaggctccagccagatgaatactccctctgtttctttttatttgtcgctggatagttcaattttatactatccagcgacaattaaaacgaaacggagggagtatatcatatgtatgataccataccattcaagctacagataagtggacagaagcatatgctgttgtgggatggatgaatcgcacgcagcttaaaataatgcaacaataagactttgtttgcatacctaccatcgtagtgacacatgtgaattgagacgaataacaaagtgtttacacgagaccttttttaaaacgggtatttacacgagacctagaggtacgtaatgtgcaccccgtcctgtttgggattataatctatatagattatataatccaatgtaaataagctagtgaggaaacaaacaagcaatttatatgataagattatataatctagcacttgag

SEQ ID NO: 72566 - DNA, 892 bp, Zea Mays
atgcatggtacccctatgggttggtttggctccgacttacatgtggcttgttcacgagaaaatcagaggaggtcccctgtcctgatattggaactgggctgtatgttcggactcgtgataatcaagtcgtcaaggtcacacttgtggatgatgagttggtctaccaaattggggagactgctgaaatactatcaagagggcatctatgtgcaaccccacactgtgtgaaggctcccagcagcgaagatgcttctgacgttggtcgctcaactttcgttctgtttattcagccaaactgggatgagccgctgaagcttcctagtgaaatacgctatcaccaggagtgcattccaccaaccaggacacttgcgtacggcgagtactccgaaagagtcttggcgagttttagcggcaagagcgtggaacaaaccttgatgccacagtaagaggctccagccagatgaatactccctctgtttctttttatttgtcgctggatagttcaattttatactatccagcgacaattaaaacgaaacggagggagtatatcatatgtatgataccataccattcaagctacagataagtggacagaagcatatgctgttgtgggatggatgaatcgcacgcagcttaaaataatgcaacaataagactttgtttgcatacctaccatcgtagtgacacatgtgaattgagacgaataacaaagtgtttacacgagaccttttttaaaacgggtatttacacgagacctagaggtacgtaatgtgcaccccgtcctgtttgggattataatctatatagattatataatccaatgtaaataagctagtgaggaaacaaacaagcaatttatatgataagattatataatctagcacttgag

SEQ ID NO: 72567 - DNA, 1770 bp, Zea Mays
cgttgccggtagagtggaaatgataaagcctcggcccttcaggctggctctgctcctcctcctcctcgccattgctgtgcgttctccgcctcaccagatttcgcaacagaaccttcgttccctgccgtctcttgtcggtctggccggccgaggtgggtgatctgtagagcgaaacgccgagccgggagaggagggaggccgcaccggcgattgtagaagcagaaccggtggaggagtagaggagggcgccgaatcgatgcgcggctccgcggacgccgtcgtggttgctcgggacgtggtggcctcgtcgagcccgtccaaggccgcgtcggcgttggacatgacgagatacccgaggctcagcccagatggcctcccgctgcccaatggcagcggcagcggcgcgagcaagaagcctgcagcgccggtgtcgccggcccccagatcgagcaaggatgacgtggcaccggccgtcgccaccgacagctcccgcatcgcggcgttcctagcctcgacgtcgctcgagcccaagccgcgcgctcgcgcaccgcagccacagccgacggctcctaactcggcgcccaccgcagccgtcgccgcgaacaggagccccgcgcgcgaccacggccacggccactgctccgaccactccgatcccgcctccccgagctccaccggggcccgcgaattgctgctccggtggggacagaacaagcgcatgcgctgccgccgcgactgcgcgtccgcgtcgccgcagcggcggcaggcgggcggcaagataccgcgccgctcatcgtcgccggcggcggacaatctgatgccgccgccgagcgcagcgccctacgcccgcgggtccaacctccgctacgccacgcctcgcccgccgcgctccggcgccagcgacgcgcaccacggccgcggggccctccccaacccgctcagatcggcggaggactgtgccggtgcctgtgccggtgccggggagaagttcttggcggttgctgaggcagcggcgagggcccagaagcagcgggcggtgtcgccgcataaggtgggcctgggcgtcccggacccgaagcagcagcagaaccagtggggcagcagcggcagtggccatcagcagcaggccggcgcggcggcgggggcgtcgtcgaagccggcggcgaagctggaggtgccgcggatctacaccacgctgtcccgaaaggagaaggaggaggacttcatggccatgaaaggcaccaagctgccgcagcgccccaagcggcggccaaagatcatcgagaagaccgtcagtgcgatctgtcccggggtgtggctgacggatgcgaccaggagcaggtacgaggtgcgcgagaagaagtgccccaagaagcaacagaagcaccggggcctcaagggcatggagagcatcgacagcgactccgactgaccaccgaccgacggcagcaggccgaagggcgtgcggtggcagcaacgcggcgagacgaagaagaaggaggaggttcggcgacagcgaagggacaaggcgttcaagcatttaaaaacgagaggagaaaccgcttcacgatgatggtggcagaagaggcaatgagatggctccctaatagcgtgatgagagagacgtggtgcgagcagccaagccaagcacacttcccttgggtgccagaaaagggtgtgttttgttataaaatattttgtatagtgatcagccccctccctttacagttacttcccaagggacatatctcctggggaacattattttgg

SEQ ID NO: 72568 - DNA, 2445 bp, Zea Mays
gtggaaatgataaagcctcggcccttcaggctggctctgctcctcctcctcctcgccattgctgtgcgttctccgcctcaccagatttcgcaacagaaccttcgttccctgccgtctcttgtcggtctggccggccgaggtgggtgatctgtagagcgaaacgccgagccgggagaggagggaggccgcaccggcgattgtagaagcagaaccggtggaggagtagaggagggcgccgaatcgatgcgcggctccgcggacgccgtcgtggttgctcgggacgtggtggcctcgtcgagcccgtccaaggccgcgtcggcgttggacatgacgagtcagtggttgttgccggctcctgcggggctgattcgaacaagtttctccctttcgtgccgtgttcgcggcccttctctgctgttctcttcgcaagctcttcgaggcgccgtttgatctgcgggcaggccagttgttctcgcgtctcgcagcctgtgtctcacccgcccacctgtgctgatctctgaaccgttcgtttaacgtggagtcctgctgcggtttgcgagcgttctggttttctgcggttgcaaattcacgcaggaagacgagattttgcacatcttttcatccatgactccagatacccgaggctcagcccagatggcctcccgctgcccaatggcagcggcagcggcgcgagcaagaagcctgcagcgccggtgtcgccggcccccagatcgagcaaggatgacgtggcaccggccgtcgccaccgacagctcccgcatcgcggcgttcctagcctcgacgtcgctcgagcccaagccgcgcgctcgcgcaccgcagccacagccgacggctcctaactcggcgcccaccgcagccgtcgccgcgaacaggagccccgcgcgcgaccacggccacggccactgctccgaccactccgatcccgcctccccgagctccaccggggcccgcgaattgctgctccggtggggacagaacaagcgcatgcgctgccgccgcgactgcgcgtccgcgtcgccgcagcggcggcaggcgggcggcaagataccgcgccgctcatcgtcgccggcggcggacaatctgatgccgccgccgagcgcagcgccctacgcccgcgggtccaacctccgctacgccacgcctcgcccgccgcgctccggcgccagcgacgcgcaccacggccgcggggccctccccaacccgctcagatcggcggaggactgtgccggtgcctgtgccggtgccggggagaagttcttggcggttgctgaggcagcggcgagggcccagaagcagcgggcggtgtcgccgcataaggtgggcctgggcgtcccggacccgaagcagcagcagaaccagtggggcagcagcggcagtggccatcagcagcaggccggcgcggcggcgggggcgtcgtcgaagccggcggcgaagctggaggtgccgcggatctacaccacgctgtcccgaaaggagaaggaggaggacttcatggccatgaaaggcaccaagctgccgcagcgccccaagcggcggccaaagatcatcgagaagaccgtcagtgcgatctgtcccggggtgtggctgacggatgcgaccaggagcaggtacgaggtgcgcgagaagaagtgccccaagaagcaacagaagcaccggggcctcaagggcatggagagcatcgacagcgactccgactgaccaccgaccgacggcagcaggccgaagggcgtgcggtggcagcaacgcggcgagacgaagaagaaggaggaggttcggcgacagcgaagggtgcgtgtcaacagccacgcgctctcggagactcacattgtcgcgctgggttaagggatgccaaaaagaacaagaggagggtggattcagtaggaaaaagacaattctttttcgtgttaaccatagcggcgccgtgctatatagccggcgttttgtatatctgggtagcgacgagacgatgtcgtagccggcgtctttttctttttcgtttcgttcgcgacactgggtgggttgcccgccgcgtttatttgtggttgggtttgtgcatactactagactgtctcagcaagaggaagcaactagacttttagaccctacttggcatagttcattcattacaacaacaagcactgcctaataaactaaaaggaagagcagcttctgtgcaggacaaggcgttcaagcatttaaaaacgagaggagaaaccgcttcacgatgatggtggcagaagaggcaatgagatggctccctaatagcgtgatgagagagacgtggtgcgagcagccaagccaagcacacttcccttgggtgccagaaaagggtgtgttttgttataaaatattttgtatagtgatcagccccctccctttacagttacttcccaagggacatatctcctggggaacattattttgg

SEQ ID NO: 72569 - DNA, 2229 bp, Zea Mays
gtggaaatgataaagcctcggcccttcaggctggctctgctcctcctcctcctcgccattgctgtgcgttctccgcctcaccagatttcgcaacagaaccttcgttccctgccgtctcttgtcggtctggccggccgaggtgggtgatctgtagagcgaaacgccgagccgggagaggagggaggccgcaccggcgattgtagaagcagaaccggtggaggagtagaggagggcgccgaatcgatgcgcggctccgcggacgccgtcgtggttgctcgggacgtggtggcctcgtcgagcccgtccaaggccgcgtcggcgttggacatgacgaggtacgcgaatccaccaccaatcccgttcgcctgccgctgcagctgcagctgcagcgttgtgttcgtcggtgttctttcctgagaccaaagccgcgaatttgcgctctcgtttccgcagtcagtggttgttgccggctcctgcggggctgattcgaacaagtttctccctttcgtgccgtgttcgcggcccttctctgctgttctcttcgcaagctcttcgaggcgccgtttgatctgcgggcaggccagttgttctcgcgtctcgcagcctgtgtctcacccgcccacctgtgctggttggttcttcgctggtctcggttcggttctccatagattgcaggttttcgttctgaattatccgctcggctttctgggatgattatttctctgcacagatctctgaaccgttcgtttaacgtggagtcctgctgcggtttgcgagcgttctggttttctgcggttgcaaattcacgcaggaagacgagattttgcacatcttttcatccatgactccagatacccgaggctcagcccagatggcctcccgctgcccaatggcagcggcagcggcgcgagcaagaagcctgcagcgccggtgtcgccggcccccagatcgagcaaggatgacgtggcaccggccgtcgccaccgacagctcccgcatcgcggcgttcctagcctcgacgtcgctcgagcccaagccgcgcgctcgcgcaccgcagccacagccgacggctcctaactcggcgcccaccgcagccgtcgccgcgaacaggagccccgcgcgcgaccacggccacggccactgctccgaccactccgatcccgcctccccgagctccaccggggcccgcgaattgctgctccggtggggacagaacaagcgcatgcgctgccgccgcgactgcgcgtccgcgtcgccgcagcggcggcaggcgggcggcaagataccgcgccgctcatcgtcgccggcggcggacaatctgatgccgccgccgagcgcagcgccctacgcccgcgggtccaacctccgctacgccacgcctcgcccgccgcgctccggcgccagcgacgcgcaccacggccgcggggccctccccaacccgctcagcaacagaagcaccggggcctcaagggcatggagagcatcgacagcgactccgactgaccaccgaccgacggcagcaggccgaagggcgtgcggtggcagcaacgcggcgagacgaagaagaaggaggaggttcggcgacagcgaagggtgcgtgtcaacagccacgcgctctcggagactcacattgtcgcgctgggttaagggatgccaaaaagaacaagaggagggtggattcagtaggaaaaagacaattctttttcgtgttaaccatagcggcgccgtgctatatagccggcgttttgtatatctgggtagcgacgagacgatgtcgtagccggcgtctttttctttttcgtttcgttcgcgacactgggtgggttgcccgccgcgtttatttgtggttgggtttgtgcatactactagactgtctcagcaagaggaagcaactagacttttagaccctacttggcatagttcattcattacaacaacaagcactgcctaataaactaaaaggaagagcagcttctgtgcaggacaaggcgttcaagcatttaaaaacgagaggagaaaccgcttcacgatgatggtggcagaagaggcaatgagatggctccctaatagcgtgatgagagagacgtggtgcgagcagccaagccaagcacacttcccttgggtgccagaaaagggtgtgttttgttataaaatattttgtatagtgatcagccccctccctttacagttacttcccaagggacatatctcctggggaacattattttgg

SEQ ID NO: 72570 - DNA, 1768 bp, Zea Mays
gtggaaatgataaagcctcggcccttcaggctggctctgctcctcctcctcctcgccattgctgtgcgttctccgcctcaccagatttcgcaacagaaccttcgttccctgccgtctcttgtcggtctggccggccgaggtgggtgatctgtagagcgaaacgccgagccgggagaggagggaggccgcaccggcgattgtagaagcagaaccggtggaggagtagaggagggcgccgaatcgatgcgcggctccgcggacgccgtcgtggttgctcgggacgtggtggcctcgtcgagcccgtccaaggccgcgtcggcgttggacatgacgagatacccgaggctcagcccagatggcctcccgctgcccaatggcagcggcagcggcgcgagcaagaagcctgcagcgccggtgtcgccggcccccagatcgagcaaggatgacgtggcaccggccgtcgccaccgacagctcccgcatcgcggcgttcctagcctcgacgtcgctcgagcccaagccgcgcgctcgcgcaccgcagccacagccgacggctcctaactcggcgcccaccgcagccgtcgccgcgaacaggagccccgcgcgcgaccacggccacggccactgctccgaccactccgatcccgcctccccgagctccaccggggcccgcgaattgctgctccggtggggacagaacaagcgcatgcgctgccgccgcgactgcgcgtccgcgtcgccgcagcggcggcaggcgggcggcaagataccgcgccgctcatcgtcgccggcggcggacaatctgatgccgccgccgagcgcagcgccctacgcccgcgggtccaacctccgctacgccacgcctcgcccgccgcgctccggcgccagcgacgcgcaccacggccgcggggccctccccaacccgctcagatcggcggaggactgtgccggtgcctgtgccggtgccggggagaagttcttggcggttgctgaggcagcggcgagggcccagaagcagcgggcggtgtcgccgcataaggtgggcctgggcgtcccggacccgaagcagcagcagaaccagtggggcagcagcggcagtggccatcagcagcaggccggcgcggcggcgggggcgtcgtcgaagccggcggcgaagctggaggtgccgcggatctacaccacgctgtcccgaaaggagaaggaggaggacttcatggccatgaaaggcaccaagctgccgcagcgccccaagcggcggccaaagatcatcgagaagaccgtcagtgcgatctgtcccggggtgtggctgacggatgcgaccaggagcaggtacgaggtgcgcgagaagaagtgccccaagaagcaacagaagcaccggggcctcaagggcatggagagcatcgacagcgactccgactgaccaccgaccgacggcagcaggccgaagggcgtgcggtggcagcaacgcggcgagacgaagaagaaggaggaggttcggcgacagcgaaggcttctgtgcaggacaaggcgttcaagcatttaaaaacgagaggagaaaccgcttcacgatgatggtggcagaagaggcaatgagatggctccctaatagcgtgatgagagagacgtggtgcgagcagccaagccaagcacacttcccttgggtgccagaaaagggtgtgttttgttataaaatattttgtatagtgatcagccccctccctttacagttacttcccaagggacatatctcctggggaacattattttgg

SEQ ID NO: 72571 - DNA, 2628 bp, Zea Mays
gtggaaatgataaagcctcggcccttcaggctggctctgctcctcctcctcctcgccattgctgtgcgttctccgcctcaccagatttcgcaacagaaccttcgttccctgccgtctcttgtcggtctggccggccgaggtgggtgatctgtagagcgaaacgccgagccgggagaggagggaggccgcaccggcgattgtagaagcagaaccggtggaggagtagaggagggcgccgaatcgatgcgcggctccgcggacgccgtcgtggttgctcgggacgtggtggcctcgtcgagcccgtccaaggccgcgtcggcgttggacatgacgaggtacgcgaatccaccaccaatcccgttcgcctgccgctgcagctgcagctgcagcgttgtgttcgtcggtgttctttcctgagaccaaagccgcgaatttgcgctctcgtttccgcagtcagtggttgttgccggctcctgcggggctgattcgaacaagtttctccctttcgtgccgtgttcgcggcccttctctgctgttctcttcgcaagctcttcgaggcgccgtttgatctgcgggcaggccagttgttctcgcgtctcgcagcctgtgtctcacccgcccacctgtgctggttggttcttcgctggtctcggttcggttctccatagattgcaggttttcgttctgaattatccgctcggctttctgggatgattatttctctgcacagatctctgaaccgttcgtttaacgtggagtcctgctgcggtttgcgagcgttctggttttctgcggttgcaaattcacgcaggaagacgagattttgcacatcttttcatccatgactccagatacccgaggctcagcccagatggcctcccgctgcccaatggcagcggcagcggcgcgagcaagaagcctgcagcgccggtgtcgccggcccccagatcgagcaaggatgacgtggcaccggccgtcgccaccgacagctcccgcatcgcggcgttcctagcctcgacgtcgctcgagcccaagccgcgcgctcgcgcaccgcagccacagccgacggctcctaactcggcgcccaccgcagccgtcgccgcgaacaggagccccgcgcgcgaccacggccacggccactgctccgaccactccgatcccgcctccccgagctccaccggggcccgcgaattgctgctccggtggggacagaacaagcgcatgcgctgccgccgcgactgcgcgtccgcgtcgccgcagcggcggcaggcgggcggcaagataccgcgccgctcatcgtcgccggcggcggacaatctgatgccgccgccgagcgcagcgccctacgcccgcgggtccaacctccgctacgccacgcctcgcccgccgcgctccggcgccagcgacgcgcaccacggccgcggggccctccccaacccgctcagatcggcggaggactgtgccggtgcctgtgccggtgccggggagaagttcttggcggttgctgaggcagcggcgagggcccagaagcagcgggcggtgtcgccgcataaggtgggcctgggcgtcccggacccgaagcagcagcagaaccagtggggcagcagcggcagtggccatcagcagcaggccggcgcggcggcgggggcgtcgtcgaagccggcggcgaagctggaggtgccgcggatctacaccacgctgtcccgaaaggagaaggaggaggacttcatggccatgaaaggcaccaagctgccgcagcgccccaagcggcggccaaagatcatcgagaagaccgtcagtgcgatctgtcccggggtgtggctgacggatgcgaccaggagcagcaacagaagcaccggggcctcaagggcatggagagcatcgacagcgactccgactgaccaccgaccgacggcagcaggccgaagggcgtgcggtggcagcaacgcggcgagacgaagaagaaggaggaggttcggcgacagcgaagggtgcgtgtcaacagccacgcgctctcggagactcacattgtcgcgctgggttaagggatgccaaaaagaacaagaggagggtggattcagtaggaaaaagacaattctttttcgtgttaaccatagcggcgccgtgctatatagccggcgttttgtatatctgggtagcgacgagacgatgtcgtagccggcgtctttttctttttcgtttcgttcgcgacactgggtgggttgcccgccgcgtttatttgtggttgggtttgtgcatactactagactgtctcagcaagaggaagcaactagacttttagaccctacttggcatagttcattcattacaacaacaagcactgcctaataaactaaaaggaagagcagcttctgtgcaggacaaggcgttcaagcatttaaaaacgagaggagaaaccgcttcacgatgatggtggcagaagaggcaatgagatggctccctaatagcgtgatgagagagacgtggtgcgagcagccaagccaagcacacttcccttgggtgccagaaaagggtgtgttttgttataaaatattttgtatagtgatcagccccctccctttacagttacttcccaagggacatatctcctggggaacattattttgg

SEQ ID NO: 72572 - DNA, 1194 bp, Zea Mays
gaccaaatcatctctaattaggaagcaatgtcgaggcggctaagcgatgctacaatggaacaatccaataacagtgattcgtctgttggcgagaggcccatccagcctcgaaagaatatgaaccccctacctcaataaaggcaaagaccacaactccaaaaattacattttcacagtcctaaatggactgatggcagcattcctttggatgtactttctgataaactcacaaaaataagcaaggtaaacaattgtagttttactttattggctcccagtcttcatttagtgatgctgactttaccagagtttctaatacaatttctaccaagtttcaggaagcttttgaacgaagagatttcgtagcaactattgtagctagcgccctgcaagaggcattgatctctgtatctgtgatcaggaacatatataaattaatgttgcgattactaatccgatgttaacaagattttttctaaaggcatcacaaacttgctatgttttgttctgaatgagtgaatatcatgtgcagttttaaagttaccatctatcttcatctcattttctttccaattctaggtctgggatgcaactgctgcagatccaaatttgcattatccttttgagctcaacatgtcatctatgatatgtattgtaactaatcatgtttttactacttcatgattcagatcgctgctagccagaccaagatttacatggtgcttcagcttgtcaatgggggcaaactgttcgatggtattactcttggatatgtaattggtggcaataacatgagaagcgacgccaaccatctcacagaagggatcaatatcttaattgccacactggacaggcttttggaccatctgcaaaataccggtagtttcaaatacaaagagctaaagagtaccaaaaaggtgagcaggcgctatcctaaaattgagaagagccaggctactagaaaaagaagaagagcattcttcaagatcaagattatgtcggccctcccttttttgatggatgcttctcgtgattatacaaaaatgatatttaggggttttagggaaccatgtaaaataccattagtttatttcaaaataggggtacagtgacatgtttcatatctagatggttagtatcatcctttgtatactcgtgcaggtttccattaaaattgaaaaaactcatctccca

SEQ ID NO: 72573 - DNA, 3460 bp, Zea Mays
aaacatgcttctactggtaatccttgtcaagtgtcaacccaaccgtccacggtccgccctcctccttcgttcacgtcttcctcctcgcgttcctctcgtcagtacggcgacgccgcaaggctcgcaccgctgacagtcccccttcccggatcgagcctctcttttcccagatcggattctaatttggctatcgccgccgccctacgccaggtgccgagtccttagctgatcttcgccggcgaggagcgcccaccaggagttacagattgaatgacaagaatgttctctatatcatcctcagtatgtgtgaagaaatagtctgtaactacacatacctttcattgcaattaccaagaactggaaatggacgatgataatgggcttgagcttagtttgggcctatctttgggcgggtcatcagggaaggccaaggctagagatgcacctctagaaccaaaagcagaaccccaagtggaagaaagcagtagcaaaggtggtttacaaactcctgatgctccttctgggaaattttatcaaaagagcgctgataaccatgaacaaaatagtaaacagaggcacagccctgttgcaccacaatttgggaacttctggggacaaccagggaattcctccggtccagtggtagatggttctgttgaaccggtgagtcatcagcctcagctttccagttatcaagatggaaggatgccaattaacagtggaaataattctgaggagcagaagccagtttctggtaaccacaagttgccttctgaagagatgaactttcagaagaaacatcagacagctagtgaccagcctgatgcattcagtaagagctctgacggaggtgcaaagaatgcacctatctcgattagtacggatgatggttcaactggtgaaaatgaggatgttgcagagtcagaagcagaaggctcaaattcttggttggttgcacagcgtgaagacagtgctaagggctctgttgttaacaaaggaactgataggaaaaggtccgccgatgctgctgcagatggttttaaaggaaagagacaaccaagtttctcaggaagcgagtccagctctggaaagttgacacctggaaatcttatatcgatgcaggcatcaaatgtagtggctttgccatatcaagtcccaggtcaagtttctggacctcctgtcttaactaatgcaccaaattttcacccggtatgtactgtgcagttgaggccgcccacaaatggtggactagctgtccagacaatgggtagtgcctctcaagttgcttttggttacccagcagtccagctaccaacacttgaaacgggctcttcatgggcatttggtgctccacctcaggctctgtcttcttttactgcaaaagacaaagctgatcaaacaggaaccaagcaagttgacgatggcaagaagccccaggaggcaggtgcttcctcgtctgctcatgctgaagatgagaaaaaggctgatagaggactctctcttatgggttctgccataaggccaggcatcgcaccaaatgtcaaatttggagggtctggatcatatccggatcttccctgggtttctaccatcggcgccggaccaaatggcagaaccatatcaggtgtgacatacaagtttggtagaaatgaggtaaagatagtatgtgcttgccatggcactcacatgtctccggaggagttcatgcggcatgcaagtgcagatgctccggcccaagataatagtgcaaccctgccagcattccctgctggtaaccaagccacgtctgcagaaaattaggttagcggttcagagaatgcttgactaataatccttgcccctcttgtgtctatatcagccattcactgtaatactcagtgttcatctcgtgttaactttttatcatgcaagtttagattcttgtattttgagctttgtttgaggataaaatctgtgtatttttagcgctatgtaacacatggactgccaattgctgtggttggattttgatctatagacgatgtgttcattgctattagaaacagggacttggtcttcttcgtaagttcctcgcgaagggtgagagcatctcatgagagtgtatttctataactcgttctctctaaattatatttgaagagtcattaaaataaaaaaaacgttttaatatcttattagtctaatagtttttatatcttttttttactctaatagttttgcttagccttgtccggacacggcgtcgttcggggccacgcctgaccttgctcctctggttctgaggctggctctatcttcttgaccatatcgacctgagcagtgccaatctcgccgcgggcttccactgctttgccctatgcactttacgccgccccccggactggaaaattgcttccccgcggacctccactccaacggtgcccgtatctcctttgtcctggctggatccgtataatctcctttgtcctccccctcccctcgttcccgtctccctcgcgttcctctcgaccgtacgccgccgcctggctcgcaccgtcgacagtacctcagtccagatcgaccctccctctacccagatcgggttccagttggcctaccgcccccgccgccctactacaggtgccgaggccttcaccggcgaagagcgcccgccagacaaatggaactgggtgataaggcggtcggttttctgctgactctgacaagcttaaccttatttacatactacacattctgggtcatcattttgccatttgtcgacagcgaccactttgtgcacaagtacttcctgcctcaagagtatgcgattttgataccggtactggccggcgtggttctcctttcgttcttgagcgtgtttgtgggccttgtgatgctcaaatcgaagaagaagaagacggcttaatcgggtttgccatgtacactgctgtgtcattcacttagtgtgatgaaatgcatgagttcgcagtatctaattgctagaagctcggttctgtaatcagttccgtcatactttaaaggtctttactttgtcatctggatgtgtgttttttttattctggtggtcaattaaaagcagtgttcatcaaaactctagttagaggtcacatatcgttagccattattcggaccgaacagcattttgaagagtgaacgattgacagtggctaaaagacgaccgctcactcatcctcttcacagctgtcgggttggtatccaagcgctgatgatgcagaggcaagattctggcgtgcaaaaaaaaactgagagttgttctgttcgttgtgggtagcatcgattgtgcaatttcagtggttaccggattagttaggttaaactgagaatttttagagtatatatgacaactcaagtccgcccccaccttttccagcgccggcaaggtccagctcccggaggcgaggaaagcagcggccaaagagtgacactgatcagagacaga

SEQ ID NO: 72574 - DNA, 2593 bp, Zea Mays
actggtaatccttgtcaagtgtcaacccaaccgtccacggtccgccctcctccttcgttcacgtcttcctcctcgcgttcctctcgtcagtacggcgacgccgcaaggctcgcaccgctgacagtcccccttcccggatcgagcctctcttttcccagatcggattctaatttggctatcgccgccgccctacgccaggtgccgagtccttagctgatcttcgccggcgaggagcgcccaccaggagttacagattgaatgacaagaatgttctctatatcatcctcagtatgtgtgaagaaatagtctgtaactacacatacctttcattgcaattaccaagaactggaaatggacgatgataatgggcttgagcttagtttgggcctatctttgggcgggtcatcagggaaggccaaggctagagatgcacctctagaaccaaaagcagaaccccaagtggaagaaagcagtagcaaaggtggtttacaaactcctgatgctccttctgggaaattttatcaaaagagcgctgataaccatgaacaaaatagtaaacagaggcacagccctgttgcaccacaatttgggaacttctggggacaaccagggaattcctccggtccagtggtagatggttctgttgaaccggtgagtcatcagcctcagctttccagttatcaagatggaaggatgccaattaacagtggaaataattctgaggagcagaagccagtttctggtaaccacaagttgccttctgaagagatgaactttcagaagaaacatcagacagctagtgaccagcctgatgcattcagtaagagctctgacggaggtgcaaagaatgcacctatctcgattagtacggatgatggttcaactggtgaaaatgaggatgttgcagagtcagaagcagaaggctcaaattcttggttggttgcacagcgtgaagacagtgctaagggctctgttgttaacaaaggaactgataggaaaaggtccgccgatgctgctgcagatggttttaaaggaaagagacaaccaagtttctcaggaagcgagtccagctctggaaagttgacacctggaaatcttatatcgatgcaggcatcaaatgtagtggctttgccatatcaagtcccaggtcaagtttctggacctcctgtcttaactaatgcaccaaattttcacccggtatgtactgtgcagttgaggccgcccacaaatggtggactagctgtccagacaatgggtagtgcctctcaagttgcttttggttacccagcagtccagctaccaacacttgaaacgggctcttcatgggcatttggtgctccacctcaggctctgtcttcttttactgcaaaagacaaagctgatcaaacaggaaccaagcaagttgacgatggcaagaagccccaggaggcaggtgcttcctcgtctgctcatgctgaagatgagaaaaaggctgatagaggactctctcttatgggttctgccataaggccaggcatcgcaccaaatgtcaaatttggagggtctggatcatatccggatcttccctgggtttctaccatcggcgccggaccaaatggcagaaccatatcaggtgtgacatacaagtttggtagaaatgaggtaaagatagtatgtgcttgccatggcactcacatgtctccggaggagttcatgcggcatgcaagtgcagatgctccggcccaagataatagtgcaaccctgccagcattccctgctggtaaccaagccacgtctgcagaaaattagacaaatggaactgggtgataaggcggtcggttttctgctgactctgacaagcttaaccttatttacatactacacattctgggtcatcattttgccatttgtcgacagcgaccactttgtgcacaagtacttcctgcctcaagagtatgcgattttgataccggtactggccggcgtggttctcctttcgttcttgagcgtgtttgtgggccttgtgatgctcaaatcgaagaagaagaagacggcttaatcgggtttgccatgtacactgctgtgtcattcacttagtgtgatgaaatgcatgagttcgcagtatctaattgctagaagctcggttctgtaatcagttccgtcatactttaaaggtctttactttgtcatctggatgtgtgttttttttattctggtggtcaattaaaagcagtgttcatcaaaactctagttagaggtcacatatcgttagccattattcggaccgaacagcattttgaagagtgaacgattgacagtggctaaaagacgaccgctcactcatcctcttcacagctgtcgggttggtatccaagcgctgatgatgcagaggcaagattctggcgtgcaaaaaaaaactgagagttgttctgttcgttgtgggtagcatcgattgtgcaatttcagtggttaccggattagttaggttaaactgagaatttttagagtatatatgacaactcaagtccgcccccaccttttccagcgccggcaaggtccagctcccggaggcgaggaaagcagcggccaaagagtgacactgatcagagacaga

SEQ ID NO: 72575 - DNA, 2957 bp, Zea Mays
actggtaatccttgtcaagtgtcaacccaaccgtccacggtccgccctcctccttcgttcacgtcttcctcctcgcgttcctctcgtcagtacggcgacgccgcaaggctcgcaccgctgacagtcccccttcccggatcgagcctctcttttcccagatcggattctaatttggctatcgccgccgccctacgccaggtgccgagtccttagctgatcttcgccggcgaggagcgcccaccagattgaatgacaagaatgttctctatatcatcctcagtatgtgtgaagaaatagtctgtaactacacatacctttcattgcaattaccaagaactggaaatggacgatgataatgggcttgagcttagtttgggcctatctttgggcgggtcatcagggaaggccaaggctagagatgcacctctagaaccaaaagcagaaccccaagtggaagaaagcagtagcaaaggtggtttacaaactcctgatgctccttctgggaaattttatcaaaagagcgctgataaccatgaacaaaatagtaaacagaggcacagccctgttgcaccacaatttgggaacttctggggacaaccagggaattcctccggtccagtggtagatggttctgttgaaccggtgagtcatcagcctcagctttccagttatcaagatggaaggatgccaattaacagtggaaataattctgaggagcagaagccagtttctggtaaccacaagttgccttctgaagagatgaactttcagaagaaacatcagacagctagtgaccagcctgatgcattcagtaagagctctgacggaggtgcaaagaatgcacctatctcgattagtacggatgatggttcaactggtgaaaatgaggatgttgcagagtcagaagcagaaggctcaaattcttggttggttgcacagcgtgaagacagtgctaagggctctgttgttaacaaaggaactgataggaaaaggtccgccgatgctgctgcagatggttttaaaggaaagagacaaccaagtttctcaggaagcgagtccagctctggaaagttgacacctggaaatcttatatcgatgcaggcatcaaatgtagtggctttgccatatcaagtcccaggtcaagtttctggacctcctgtcttaactaatgcaccaaattttcacccggtatgtactgtgcagttgaggccgcccacaaatggtggactagctgtccagacaatgggtagtgcctctcaagttgcttttggttacccagcagtccagctaccaacacttgaaacgggctcttcatgggcatttggtgctccacctcaggctctgtcttcttttactgcaaaagacaaagctgatcaaacaggaaccaagcaagttgacgatggcaagaagccccaggaggcaggtgcttcctcgtctgctcatgctgaagatgagaaaaaggctgatagaggactctctcttatgggttctgccataaggccaggcatcgcaccaaatgtcaaatttggagggtctggatcatatccggatcttccctgggtttctaccatcggcgccggaccaaatggcagaaccatatcaggtgtgacatacaagtttggtagaaatgaggtaaagatagtatgtgcttgccatggcactcacatgtctccggaggagttcatgcggcatgcaagtgcagatgctccggcccaagataatagtgcaaccctgccagcattccctgctggtaaccaagccacgtctgcagaaaattaggttagcggttcagagaatgcttgactaataatccttgcccctcttgtgtctatatcagccattcactgtaatactcagtgttcatctcgtgttaactttttatcatgcaagtttagattcttgtattttgagctttgtttgaggataaaatctgtgtatttttagcgctatgtaacacatggactgccaattgctgtggttggattttgatctatagacgatgtgttcattgctattagaaacagggacttggtcttcttcgtaagttcctcgcgaagggtgagagcatctcatgagagtgtatttctataactcgttctctctaaattatatttgaagagtcattaaaataaaaaaaacgttttaatatcttattagtctaatagtttttatatcttttttttactctaatagttttgcttagccttgtccggacacggcgtcgttcggggccacgcctgaccttgctcctctggttctgaggctggctctatcttcttgaccatatcgacctgagcagtgccaatctcgccgcgggcttccactgctttgccctatgcactttacgccgccccccggactggaaaattgcttccccgcggacctccactccaacggtgcccgtatctcctttgtcctggctggatccgtataatctcctttgtcctccccctcccctcgttcccgtctccctcgcgttcctctcgaccgtacgccgccgcctggctcgcaccgtcgacagtacctcagtccagatcgaccctccctctacccagatcgggttccagttggcctaccgcccccgccgccctactacaggtgccgaggccttcaccggcgaagagcgcccgccagacaaatggaactgggtgataaggcggtcggttttctgctgactctgacaagcttaaccttatttacatactacacattctgggtcatcattttgccatttgtcgacagcgaccactttgtgcacaagtacttcctgcctcaagagtatgcgattttgataccggtactggccggcgtggttctcctttcgttcttgagcgtgtttgtgggccttgtgatgctcaaatcgaagaagaagaagacggcttaatcggcgccggcaaggtccagctcccggaggcgaggaaagcagcggccaaagagtgacactgatcagagacaga

SEQ ID NO: 72576 - DNA, 3233 bp, Zea Mays
ctcggtcccctccgcgcacgcgcaaaccaccgttcccccgcccgctccactgatccccatccccctcagatcctccctgcaaatcaaatccccatgcccgcagcgcctcgcctcggctgctctacctctatcccgcgacccgcgagattggaatcgcggagccccgccgccctcctccaaaacggcatcgtctctgctcggggtcacctttcctccctctcacttcctcttcttcatttaggtgtgttagttaagcagaggaggtggctttgcttgttgctcgtgtttctgcgtggatgcgtccaggggtttagcaagtcgctggccatgacggtgctcttcgagatcagggacaagaccttcttcgccgtcgcgattctggctatgcgccatcctaggaaactcgtattggcaggctgtttaactgcactaagaaggctgtttaactacactaagagtcatgacagctctatcgacttatctaggttgggttgcaccaaatctgagctgtcatgacaaaaatcatgatgcaatacaagcagaatatgcttcctgaaagacaaagtaatcacaaagttgaggcagataaaatggttgagcaaaccaatcaatctgaagttagctttgtgaaggctgagcatctgaatggaagtaaaattcggcagacaggcattgaggattactcctatgacaaggatgttgtagagatcaaactgccagacacagatctttcttctgattatggtgttcattttgtcaaggatgtctgcattgatgaaggagttcttcctgatcaaaagatttcatcagaaaagcaagtagaccaaaaagtgtctataagctttgattccagggaagagataagtgctgactctacaaaaactgcacatgagttgaaatcgaaaatagttgtcctacctgtcaagtgtgatactcatgacaatattgtggaacagaactcctcatgcaaaaagcgtgatcttgaagataacaatactacagatgtatctaccgagtctaatgatgagggattaaatcccaaacaattaccatttcatgaagttgcacaagattaccaggaggttgatagtgtcatttcggagagcaatgaaaatcaggaccgacttttcactggagatgcaacccatcagggacttgagaaatatgttatgacaaagctgtttaatcgggtattcgcatcagtcccagaagatgtgaagagtgatgaagaactttttgagaattaacttgtacgagaatgaaacatcatggctggtatgagaattaacttccctcgttttttggcatttttttgcttgatgtattgcatctctggcaagctgcacacatgaataggtttctggcagaaactgaaccaggattgaattgtacttgtgtcttgcgttgggttggtcttttggatctttctatgtattatgtctatactttgtagactactggccagccactacattcgcgtattactcttccattgtgagtttttgctcttcactatccgatgcccaccaatctaagcagccaaggcatgcatacctaaccttctcgaggacaattcaggagaatctcagctgttcctcatgtggagaacctccagaggctcacatgtattcctacactcaccgcaacgagaatctgattgttcttgtgaggcacttgctgcctaaatattgtttacctggtgaatcagaaggaaagatttggatgtggacttgatgcttaaggtgtgaacgtgaaagtggggtccccagatcatcacgaagggtgataatgtcagctgaagcacactacctttcatttgggaagttccttgaacttagtttttcaagccactcaaccgctagaaggctgccaatatgcgggcattcactcaatacggattgtctgcgctttttttgggttgggctccaaagttgcaatgttcccgtattcctcagtcgaaatttacaatgcctgcaaaccacagcctactcttgagattcacaaccccgatatgcacaaagatgccccaaggttgctgccctcgtgtttcgtgctctgattgttgagtcttcaatgagagctgattccagttatatagaggtgaacaagcttttgattatttcttttgttaatttggtgcaacatatagaggtgaacaagcttattaaaggaagatccttgtacaatcaagagttcatacaatagatgaaacgatattgtgattctctcaatggtggcttcatgagcaagcaatcattcaccttgttcactaaaatttcagactgtagctcagataaggctttgagcattccttgctacaatgcttccgagagaagggaaaccggcaaaggggaaaagagacgaatagaagggcattggtgccctctcacacacaggccaagtatacatccacatgccacaaggctgaagcttccacatgaacaagagaatggatcgtgatagctattgcaagatgatgcacaagtacataggatcagatgttacataacttgtgacacttccagtcataatttttgagccaatgacaatgcttcagaaaatggctgagctttgttaggtgttccattttagttatctgtctacttcctttaaactggttctggttatatgcgcgcgtatctattattatgtataagcattgttgctactggtccttatcgagaatcgcataaggagacaacttcatgggtatgttcagatagtttatcttttgttgcttattgtccgtgtaaatacacaaggcgcctttgatagcacttggtttccctgttgggatttttagcttgtcttagtatccaacttacaccaccatctgatatctgatcctgacaacaggctaggaggcttaactgacggtttcgaccttgggatgaacatgctgttgggaggagacaaggaagatgatggcggttcaagcaagtcgcatggcaagagcggaaaccgaaagaagcacctgaagaacaacaagaggaagaggcattagccctggactcacactcctgtatcacttcaacatacttgagtgtgtgacatgtcagttattttacagatatgttagttttaccatagtattgttcgatgtgatcctagcatgcccgtgaatgctttggttccctatagagctgttgatgtcttacacaaatgtattacaaaacttttttcataacaatataacacacatttgtacataaattaccgtggtattatacgtt

SEQ ID NO: 72577 - DNA, 3692 bp, Zea Mays
gcaaatcaaatccccatgcccgcagcgcctcgcctcggctgctctacctctatcccgcgacccgcgagattggaatcgcggagccccgccgccctcctccaaaacggcatcgtctctgctcggggtcacctttcctccctctcacttcctcttcttcatttaggtgtgttagttaagcagaggaggtggctttgcttgttgctcgtgtttctgcgtggatgcgtccaggggtttagcaagtcgctggccatgacggtgctcttcgagatcagggacaagaccttcttcgccgtcgcgattctggctatgcgccatcctaggaaactcgtattggcaggctgtttaactgcactaagaaggctgtttaactacactaagagtcatgacagctctatcgacttatctaggttgggttgcaccaaatctgagctgtcatgacaaaaatcatgatgcaatacaagcagaatatgcttcctgaaagacaaagtaatcacaaagttgaggcagataaaatggttgagcaaaccaatcaatctgaagttagctttgtgaaggctgagcatctgaatggaagtaaaattcggcagacaggcattgaggattactcctatgacaaggatgttgtagagatcaaactgccagacacagatctttcttctgattatggtgttcattttgtcaaggatgtctgcattgatgaaggagttcttcctgatcaaaagatttcatcagaaaagcaagtagaccaaaaagtgtctataagctttgattccagggaagagataagtgctgactctacaaaaactgcacatgagttgaaatcgaaaatagttgtcctacctgtcaagtgtgatactcatgacaatattgtggaacagaactcctcatgcaaaaagcgtgatcttgaagataacaatactacagatgtatctaccgagtctaatgatgagggattaaatcccaaacaattaccatttcatgaagttgcacaagattaccaggaggttgatagtgtcatttcggagagcaatgaaaatcaggaccgacttttcactggagatgcaacccatcaggtttcatcgaatgattgttatgaagctggaattagtatcgcgtcagaggccagtaatttatcattttaaaaactggcactacatcttgaaaaaaggataatttatcattttattacgttgtatacggactaataatttatcattatattataccgtatatctactaatattttatcattttattatgttgtatactgagtaatagttatatgtgctagaatttttactcttcgtagcatatgacaacgtttgacttctcttttagggacttgagaaatatgttatgacaaagctgtttaatcgggtattcgcatcagtcccagaagatgtgaagagtgatgaagaactttttgagaattaacttgtacgagaatgaaacatcatggctgactactggccagccactacattcgcgtattactcttccattgtgagtttttgctcttcactatccgatgcccaccaatctaagcagccaaggcatgcatacctaaccttctcgaggacaattcaggagaatctcagctgttcctcatgtggagaacctccagaggctcacatgtattcctacactcaccgcaacgagaatctgattgttcttgtgaggcacttgctgcctaaatattgtttacctggtgaatcagaaggaaagatttggatgtggacttgatgcttaaggtgtgaacgtgaaagtggggtccccagatcatcacgaagggtgataatgtcagctgaagcacactacctttcatttgggaagttccttgaacttagtttttcaagccactcaaccgctagaaggctgccaatatgcgggcattcactcaatacggattgtctgcgctttttttgggttgggctccaaagttgcaatgttcccgtattcctcagtcgaaatttacaatgcctgcaaaccacagcctactcttgagattcacaaccccgatatgcacaaagatgccccaaggttgctgccctcgtgtttcgtgctctgattgttgagtcttcaatgagagctgattccagttatatagaggtgaacaagcttttgattatttcttttgttaatttggtgcaacatatagaggtgaacaagcttattaaaggaagatccttgtacaatcaagagttcatacaatagatgaaacgatattgtgattctctcaatggtggcttcatgagcaagcaatcattcaccttgttcactaaaatttcagactgtagctcagataaggctttgagcattccttggtagtattatatttcctttgtcgccaccaactttaagtagtattaaaagaatttttcttaactcttacatttcattttccctgttcttttttgcgtaatagctacaatgcttccgagagaagggaaaccggcaaaggggaaaagagacgaatagaagggcattggtgccctctcacacacaggccaagtatacatccacatgccacaaggctgaagcttccacatgaacaagagaatggtgcacattgccttacatgacacatttatttcccaatcactgtgcaattcttagtttagttctgtattggttgttgccaaataatttgtgagatattgagatcgataacttggtttaagtattgcaccttttgacaaatataatttgccatgaacatggatattgaaggctatactctgaaatgcagtctcactacataattgactaataaaaatatgttttcttattacatgattctgtttagtagaatctatggttttaaggtcatagtagttttacgatcgtatacttgaagttctggtccgattcaggatcactattttaacaaccttgtgtggttaatttgcaggatcgtgatagctattgcaagatgatgcacaagtacataggatcagatgttacataacttgtgacacttccagtcataatttttgagccaatgacaatgcttcagaaaatggctgagctttgttaggtgttccattttagttatctgtctacttcctttaaactggttctggttatatgcgcgcgtatctattattatgtataagcattgttgctactggtccttatcgagaatcgcataaggagacaacttcatgggtatgttcagatagtttatcttttgttgcttattgtccgtgtaaatacacaaggcgcctttgatagcacttggtttccctgttgggatttttagcttgtcttagtatccaacttacaccaccatctgatatctgatcctgacaacaggctaggaggcttaactgacggtttcgaccttgggatgaacatgctgttgggaggagacaaggaagatgatggcggttcaagcaagtcgcatggcaagagcggaaaccgaaagaagcacctgaagaacaacaagaggaagaggcattagccctggactcacactcctgtatcacttcaacatacttgagtgtgtgacatgtcagttattttacagatatgttagttttaccatagtattgttcgatgtgatcctagcatgcccgtgaatgctttggttccctatagagctgttgatgtcttacacaaatgtattacaaaacttttttcataacaatataacacacatttgtacataaattaccgtggtattatacgtt

SEQ ID NO: 72578 - DNA, 2997 bp, Zea Mays
atccccatgcccgcagcgcctcgcctcggctgctctacctctatcccgcgacccgcgagattggaatcgcggagccccgccgccctcctccaaaacggcatcgtctctgctcggggtcacctttcctccctctcacttcctcttcttcatttaggtgtgttagttaagcagaggaggtggctttgcttgttgctcgtgtttctgcgtggatgcgtccaggggtttagcaagtcgctggccatgacggtgctcttcgagatcagggacaagaccttcttcgccgtcgcgttatatttgctagattctggctatgcgccatcctaggaaactcgtattggcaggctgtttaactgcactaagaaggctgtttaactacactaagagtcatgacagctctatcgacttatctaggttgggttgcaccaaatctggatgtctgcattgatgaaggagttcttcctgatcaaaagatttcatcagaaaagcaagtagaccaaaaagtgtctataagctttgattccagggaagagataagtgctgactctacaaaaactgcacatgagttgaaatcgaaaatagttgtcctacctgtcaagtgtgatactcatgacaatattgtggaacagaactcctcatgcaaaaagcgtgatcttgaagataacaatactacagatgtatctaccgagtctaatgatgagggattaaatcccaaacaattaccatttcatgaagttgcacaagattaccaggaggttgatagtgtcatttcggagagcaatgaaaatcaggaccgacttttcactggagatgcaacccatcaggtttcatcgaatgattgttatgaagctggaattagtatcgcgtcagaggccagtaatttatcattttaaaaactggcactacatcttgaaaaaaggataatttatcattttattacgttgtatacggactaataatttatcattatattataccgtatatctactaatattttatcattttattatgttgtatactgagtaatagttatatgtgctagaatttttactcttcgtagcatatgacaacgtttgacttctcttttagggacttgagaaatatgttatgacaaagctgtttaatcgggtattcgcatcagtcccagaagatgtgaagagtgatgaagaactttttgagaattaacttgtacgagaatgaaacatcatggctgactactggccagccactacattcgcgtattactcttccattgtgagtttttgctcttcactatccgatgcccaccaatctaagcagccaaggcatgcatacctaaccttctcgaggacaattcaggaggtatggtgcataaaaaagtaggaaccacaatgagattgtgatgctgctcagggcacatgccttttgtgtgatgtctgaatgttcatagcccttgtgctcctcatccacccattttaagaatatgctcacgtctcatgattgtgtctttcttcagaatctcagctgttcctcatgtggagaacctccagaggctcacatgtattcctacactcaccgcaacgagaatctgattgttcttgtgaggcacttgctgcctaaatattgtttacctggtgaatcagaaggaaagatttggatgtggacttgatgcttaaggtgtgaacgtgaaagtggggtccccagatcatcacgaagggtgataatgtcagctgaagcacactacctttcatttgggaagttccttgaacttagtttttcaagccactcaaccgctagaaggctgccaatatgcgggcattcactcaatacggattgtctgcgctttttttgggttgggctccaaagttgcaatgttcccgtattcctcagtcgaaatttacaatgcctgcaaaccacagcctactcttgagattcacaaccccgatatgcacaaagatgccccaaggttgctgccctcgtgtttcgtgctctgattgttgagtcttcaatgagagctgattccagttatatagaggtgaacaagcttttgattatttcttttgttaatttggtgcaacatatagaggtgaacaagcttattaaaggaagatccttgtacaatcaagagttcatacaatagatgaaacgatattgtgattctctcaatggtggcttcatgagcaagcaatcattcaccttgttcactaaaatttcagactgtagctcagataaggctttgagcattccttgctacaatgcttccgagagaagggaaaccggcaaaggggaaaagagacgaatagaagggcattggtgccctctcacacacaggccaagtatacatccacatgccacaaggctgaagcttccacatgaacaagagaatggatcgtgatagctattgcaagatgatgcacaagtacataggatcagatgttacataacttgtgacacttccagtcataatttttgagccaatgacaatgcttcagaaaatggctgagctttgttaggtgttccattttagttatctgtctacttcctttaaactggttctggttatatgcgcgcgtatctattattatgtataagcattgttgctactggtccttatcgagaatcgcataaggagacaacttcatgggctaggaggcttaactgacggtttcgaccttgggatgaacatgctgttgggaggagacaaggaagatgatggcggttcaagcaagtcgcatggcaagagcggaaaccgaaagaagcacctgaagaacaacaagaggaagaggcattagccctggactcacactcctgtatcacttcaacatacttgagtgtgtgacatgtcagttattttacagatatgttagttttaccatagtattgttcgatgtgatcctagcatgcccgtgaatgctttggttccctatagagctgttgatgtcttacacaaatgtattacaaaacttttttcataacaatataacacacatttgtacataaattaccgtggtattatacgtt

SEQ ID NO: 72579 - DNA, 3481 bp, Zea Mays
atccccatgcccgcagcgcctcgcctcggctgctctacctctatcccgcgacccgcgagattggaatcgcggagccccgccgccctcctccaaaacggcatcgtctctgctcggggtcacctttcctccctctcacttcctcttcttcatttaggtgtgttagttaagcagaggaggtggctttgcttgttgctcgtgtttctgcgtggatgcgtccaggggtttagcaagtcgctggccatgacggtgctcttcgagatcagggacaagaccttcttcgccgtcgcggtgttcggtggtatgccgccgcggcgttcctctttgctcggcttttgggtgcgaccgtgggagattctggctatgcgccatcctaggaaactcgtattggcaggctgtttaactgcactaagaaggctgtttaactacactaagagtcatgacagctctatcgacttatctaggttgggttgcaccaaatctgagctgtcatgacaaaaatcatgatgcaatacaagcagaatatgcttcctgaaagacaaagtaatcacaaagttgaggcagataaaatggttgagcaaaccaatcaatctgaagttagctttgtgaaggctgagcatctgaatggaagtaaaattcggcagacaggcattgaggattactcctatgacaaggatgttgtagagatcaaactgccagacacagatctttcttctgattatggtgttcattttgtcaaggatgtctgcattgatgaaggagttcttcctgatcaaaagatttcatcagaaaagcaagtagaccaaaaagtgtctataagctttgattccagggaagagataagtgctgactctacaaaaactgcacatgagttgaaatcgaaaatagttgtcctacctgtcaagtgtgatactcatgacaatattgtggaacagaactcctcatgcaaaaagcgtgatcttgaagataacaatactacagatgtatctaccgagtctaatgatgagggattaaatcccaaacaattaccatttcatgaagttgcacaagattaccaggaggttgatagtgtcatttcggagagcaatgaaaatcaggaccgacttttcactggagatgcaacccatcaggtttcatcgaatgattgttatgaagctggaattagtatcgcgtcagaggccagtaatttatcattttaaaaactggcactacatcttgaaaaaaggataatttatcattttattacgttgtatacggactaataatttatcattatattataccgtatatctactaatattttatcattttattatgttgtatactgagtaatagttatatgtgctagaatttttactcttcgtagcatatgacaacgtttgacttctcttttagggacttgagaaatatgttatgacaaagctgtttaatcgggtattcgcatcagtcccagaagatgtgaagagtgatgaagaactttttgagaattaacttgtacgagaatgaaacatcatggctggtatgagaattaacttccctcgttttttggcatttttttgcttgatgtattgcatctctggcaagctgcacacatgaataggtttctggcagaaactgaaccaggattgaattgtacttgtgtcttgcgttgggttggtcttttggatctttctatgtattatgtctatactttgtagactactggccagccactacattcgcgtattactcttccattgtgagtttttgctcttcactatccgatgcccaccaatctaagcagccaaggcatgcatacctaaccttctcgaggacaattcaggaggtatggtgcataaaaaagtaggaaccacaatgagattgtgatgctgctcagggcacatgccttttgtgtgatgtctgaatgttcatagcccttgtgctcctcatccacccattttaagaatatgctcacgtctcatgattgtgtctttcttcagaatctcagctgttcctcatgtggagaacctccagaggctcacatgtattcctacactcaccgcaacgagaatctgattgttcttgtgaggcacttgctgcctaaatattgtttacctggtgaatcagaaggaaagatttggatgtggacttgatgcttaaggtgtgaacgtgaaagtggggtccccagatcatcacgaagggtgataatgtcagctgaagcacactacctttcatttgggaagttccttgaacttagtttttcaagccactcaaccgctagaaggctgccaatatgcgggcattcactcaatacggattgtctgcgctttttttgggttgggctccaaagttgcaatgttcccgtattcctcagtcgaaatttacaatgcctgcaaaccacagcctactcttgagattcacaaccccgatatgcacaaagatgccccaaggttgctgccctcgtgtttcgtgctctgattgttgagtcttcaatgagagctgattccagttatatagaggtgaacaagcttttgattatttcttttgttaatttggtgcaacatatagaggtgaacaagcttattaaaggaagatccttgtacaatcaagagttcatacaatagatgaaacgatattgtgattctctcaatggtggcttcatgagcaagcaatcattcaccttgttcactaaaatttcagactgtagctcagataaggctttgagcattccttgctacaatgcttccgagagaagggaaaccggcaaaggggaaaagagacgaatagaagggcattggtgccctctcacacacaggccaagtatacatccacatgccacaaggctgaagcttccacatgaacaagagaatggatcgtgatagctattgcaagatgatgcacaagtacataggatcagatgttacataacttgtgacacttccagtcataatttttgagccaatgacaatgcttcagaaaatggctgagctttgttaggtgttccattttagttatctgtctacttcctttaaactggttctggttatatgcgcgcgtatctattattatgtataagcattgttgctactggtccttatcgagaatcgcataaggagacaacttcatgggctaggaggcttaactgacggtttcgaccttgggatgaacatgctgttgggaggagacaaggaagatgatggcggttcaagcaagtcgcatggcaagagcggaaaccgaaagaagcacctgaagaacaacaagaggaagaggcattagccctggactcacactcctgtatcacttcaacatacttgagtgtgtgacatgtcagttattttacagatatgttagttttaccatagtattgttcgatgtgatcctagcatgcccgtgaatgctttggttccctatagagctgttgatgtcttacacaaatgtattacaaaacttttttcataacaatataacacacatttgtacataaattaccgtggtattatacgtt

SEQ ID NO: 72580 - DNA, 3025 bp, Zea Mays
atccccatgcccgcagcgcctcgcctcggctgctctacctctatcccgcgacccgcgagattggaatcgcggagccccgccgccctcctccaaaacggcatcgtctctgctcggggtcacctttcctccctctcacttcctcttcttcatttaggtgtgttagttaagcagaggaggtggctttgcttgttgctcgtgtttctgcgtggatgcgtccaggggtttagcaagtcgctggccatgacggtgctcttcgagatcagggacaagaccttcttcgccgtcgcgattctggctatgcgccatcctaggaaactcgtattggcaggctgtttaactgcactaagaaggctgtttaactacactaagagtcatgacagctctatcgacttatctaggttgggttgcaccaaatctgagctgtcatgacaaaaatcatgatgcaatacaagcagaatatgcttcctgaaagacaaagtaatcacaaagttgaggcagataaaatggttgagcaaaccaatcaatctgaagttagctttgtgaaggctgagcatctgaatggaagtaaaattcggcagacaggcattgaggattactcctatgacaaggatgttgtagagatcaaactgccagacacagatctttcttctgattatggtgttcattttgtcaaggatgtctgcattgatgaaggagttcttcctgatcaaaagatttcatcagaaaagcaagtagaccaaaaagtgtctataagctttgattccagggaagagataagtgctgactctacaaaaactgcacatgagttgaaatcgaaaatagttgtcctacctgtcaagtgtgatactcatgacaatattgtggaacagaactcctcatgcaaaaagcgtgatcttgaagataacaatactacagatgtatctaccgagtctaatgatgagggattaaatcccaaacaattaccatttcatgaagttgcacaagattaccaggaggttgatagtgtcatttcggagagcaatgaaaatcaggaccgacttttcactggagatgcaacccatcaggtttcatcgaatgattgttatgaagctggaattagtatcgcgtcagaggccagtaatttatcattttaaaaactggcactacatcttgaaaaaaggataatttatcattttattacgttgtatacggactaataatttatcattatattataccgtatatctactaatattttatcattttattatgttgtatactgagtaatagttatatgtgctagaatttttactcttcgtagcatatgacaacgtttgacttctcttttagggacttgagaaatatgttatgacaaagctgtttaatcgggtattcgcatcagtcccagaagatgtgaagagtgatgaagaactttttgagaattaacttgtacgagaatgaaacatcatggctgactactggccagccactacattcgcgtattactcttccattgtgagtttttgctcttcactatccgatgcccaccaatctaagcagccaaggcatgcatacctaaccttctcgaggacaattcaggaggtatggtgcataaaaaagtaggaaccacaatgagattgtgatgctgctcagggcacatgccttttgtgtgatgtctgaatgttcatagcccttgtgctcctcatccacccattttaagaatatgctcacgtctcatgattgtgtctttcttcagaatctcagctgttcctcatgtggagaacctccagaggctcacatgtattcctacactcaccgcaacgagaatctgattgttcttgtgaggcacttgctgcctaaatattgtttacctggtgaatcagaaggaaagatttggatgtggacttgatgcttaaggtgtgaacgtgaaagtggggtccccagatcatcacgaagggtgataatgtcagctgaagcacactacctttcatttgggaagttccttgaacttagtttttcaagccactcaaccgctagaaggctgccaatatgcgggcattcactcaatacggattgtctgcgctttttttgggttgggctccaaagttgcaatgttcccgtattcctcagtcgaaatttacaatgcctgcaaaccacagcctactcttgagattcacaaccccgatatgcacaaagatgccccaaggttgctgccctcgtgtttcgtgctctgattgttgagtcttcaatgagagctgattccagttatatagagctacaatgcttccgagagaagggaaaccggcaaaggggaaaagagacgaatagaagggcattggtgccctctcacacacaggccaagtatacatccacatgccacaaggctgaagcttccacatgaacaagagaatggatcgtgatagctattgcaagatgatgcacaagtacataggatcagatgttacataacttgtgacacttccagtcataatttttgagccaatgacaatgcttcagaaaatggctgagctttgttaggtgttccattttagttatctgtctacttcctttaaactggttctggttatatgcgcgcgtatctattattatgtataagcattgttgctactggtccttatcgagaatcgcataaggagacaacttcatgggctaggaggcttaactgacggtttcgaccttgggatgaacatgctgttgggaggagacaaggaagatgatggcggttcaagcaagtcgcatggcaagagcggaaaccgaaagaagcacctgaagaacaacaagaggaagaggcattagccctggactcacactcctgtatcacttcaacatacttgagtgtgtgacatgtcagttattttacagatatgttagttttaccatagtattgttcgatgtgatcctagcatgcccgtgaatgctttggttccctatagagctgttgatgtcttacacaaatgtattacaaaacttttttcataacaatataacacacatttgtacataaattaccgtggtattatacgtt

SEQ ID NO: 72581 - DNA, 2867 bp, Zea Mays
atccccatgcccgcagcgcctcgcctcggctgctctacctctatcccgcgacccgcgagattggaatcgcggagccccgccgccctcctccaaaacggcatcgtctctgctcggggtcacctttcctccctctcacttcctcttcttcatttaggtgtgttagttaagcagaggaggtggctttgcttgttgctcgtgtttctgcgtggatgcgtccaggggtttagcaagtcgctggccatgacggtgctcttcgagatcagggacaagaccttcttcgccgtcgcgattctggctatgcgccatcctaggaaactcgtattggcaggctgtttaactgcactaagaaggctgtttaactacactaagagtcatgacagctctatcgacttatctaggttgggttgcaccaaatctgagctgtcatgacaaaaatcatgatgcaatacaagcagaatatgcttcctgaaagacaaagtaatcacaaagttgaggcagataaaatggttgagcaaaccaatcaatctgaagttagctttgtgaaggctgagcatctgaatggaagtaaaattcggcagacaggcattgaggattactcctatgacaaggatgttgtagagatcaaactgccagacacagatctttcttctgattatggtgttcattttgtcaaggatgtctgcattgatgaaggagttcttcctgatcaaaagatttcatcagaaaagcaagtagaccaaaaagtgtctataagctttgattccagggaagagataagtgctgactctacaaaaactgcacatgagttgaaatcgaaaatagttgtcctacctgtcaagtgtgatactcatgacaatattgtggaacagaactcctcatgcaaaaagcgtgatcttgaagataacaatactacagatgtatctaccgagtctaatgatgagggattaaatcccaaacaattaccatttcatgaagttgcacaagattaccaggaggttgatagtgtcatttcggagagcaatgaaaatcaggaccgacttttcactggagatgcaacccatcaggtttcatcgaatgattgttatgaagctggaattagtatcgcgtcagaggccagtaatttatcattttaaaaactggcactacatcttgaaaaaaggataatttatcattttattacgttgtatacggactaataatttatcattatattataccgtatatctactaatattttatcattttattatgttgtatactgagtaatagttatatgtgctagaatttttactcttcgtagcatatgacaacgtttgacttctcttttagggacttgagaaatatgttatgacaaagctgtttaatcgggtattcgcatcagtcccagaagatgtgaagagtgatgaagaactttttgagaattaacttgtacgagaatgaaacatcatggctgaatctcagctgttcctcatgtggagaacctccagaggctcacatgtattcctacactcaccgcaacgagaatctgattgttcttgtgaggcacttgctgcctaaatattgtttacctggtgaatcagaaggaaagatttggatgtggacttgatgcttaaggtgtgaacgtgaaagtggggtccccagatcatcacgaagggtgataatgtcagctgaagcacactacctttcatttgggaagttccttgaacttagtttttcaagccactcaaccgctagaaggctgccaatatgcgggcattcactcaatacggattgtctgcgctttttttgggttgggctccaaagttgcaatgttcccgtattcctcagtcgaaatttacaatgcctgcaaaccacagcctactcttgagattcacaaccccgatatgcacaaagatgccccaaggttgctgccctcgtgtttcgtgctctgattgttgagtcttcaatgagagctgattccagttatatagagagttcatacaatagatgaaacgatattgtgattctctcaatggtggcttcatgagcaagcaatcattcaccttgttcactaaaatttcagactgtagctcagataaggctttgagcattccttgctacaatgcttccgagagaagggaaaccggcaaaggggaaaagagacgaatagaagggcattggtgccctctcacacacaggccaagtatacatccacatgccacaaggctgaagcttccacatgaacaagagaatggatcgtgatagctattgcaagatgatgcacaagtacataggatcagatgttacataacttgtgacacttccagtcataatttttgagccaatgacaatgcttcagaaaatggctgagctttgttaggtgttccattttagttatctgtctacttcctttaaactggttctggttatatgcgcgcgtatctattattatgtataagcattgttgctactggtccttatcgagaatcgcataaggagacaacttcatgggctaggaggcttaactgacggtttcgaccttgggatgaacatgctgttgggaggagacaaggaagatgatggcggttcaagcaagtcgcatggcaagagcggaaaccgaaagaagcacctgaagaacaacaagaggaagaggcattagccctggactcacactcctgtatcacttcaacatacttgagtgtgtgacatgtcagttattttacagatatgttagttttaccatagtattgttcgatgtgatcctagcatgcccgtgaatgctttggttccctatagagctgttgatgtcttacacaaatgtattacaaaacttttttcataacaatataacacacatttgtacataaattaccgtggtattatacgtt

SEQ ID NO: 72582 - DNA, 2496 bp, Zea Mays
atccccatgcccgcagcgcctcgcctcggctgctctacctctatcccgcgacccgcgagattggaatcgcggagccccgccgccctcctccaaaacggcatcgtctctgctcggggtcacctttcctccctctcacttcctcttcttcatttaggtgtgttagttaagcagaggaggtggctttgcttgttgctcgtgtttctgcgtggatgcgtccaggggtttagcaagtcgctggccatgacggtgctcttcgagatcagggacaagaccttcttcgccgtcgcgattctggctatgcgccatcctaggaaactcgtattggcaggctgtttaactgcactaagaaggctgtttaactacactaagagtcatgacagctctatcgacttatctaggttgggttgcaccaaatctgagctgtcatgacaaaaatcatgatgcaatacaagcagaatatgcttcctgaaagacaaagtaatcacaaagttgaggcagataaaatggttgagcaaaccaatcaatctgaagttagctttgtgaaggctgagcatctgaatggaagatgtctgcattgatgaaggagttcttcctgatcaaaagatttcatcagaaaagcaagtagaccaaaaagtgtctataagctttgattccagggaagagataagtgctgactctacaaaaactgcacatgagttgaaatcgaaaatagttgtcctacctgtcaagtgtgatactcatgacaatattgtggaacagaactcctcatgcaaaaagcgtgatcttgaagataacaatactacagatgtatctaccgagtctaatgatgagggattaaatcccaaacaattaccatttcatgaagttgcacaagattaccaggaggttgatagtgtcatttcggagagcaatgaaaatcaggaccgacttttcactggagatgcaacccatcagggacttgagaaatatgttatgacaaagctgtttaatcgggtattcgcatcagtcccagaagatgtgaagagtgatgaagaactttttgagaattaacttgtacgagaatgaaacatcatggctgactactggccagccactacattcgcgtattactcttccattgtgagtttttgctcttcactatccgatgcccaccaatctaagcagccaaggcatgcatacctaaccttctcgaggacaattcaggagaatctcagctgttcctcatgtggagaacctccagaggctcacatgtattcctacactcaccgcaacgagaatctgattgttcttgtgaggcacttgctgcctaaatattgtttacctggtgaatcagaaggaaagatttggatgtggacttgatgcttaaggtgtgaacgtgaaagtggggtccccagatcatcacgaagggtgataatgtcagctgaagcacactacctttcatttgggaagttccttgaacttagtttttcaagccactcaaccgctagaaggctgccaatatgcgggcattcactcaatacggattgtctgcgctttttttgggttgggctccaaagttgcaatgttcccgtattcctcagtcgaaatttacaatgcctgcaaaccacagcctactcttgagattcacaaccccgatatgcacaaagatgccccaaggttgctgccctcgtgtttcgtgctctgattgttgagtcttcaatgagagctgattccagttatatagagctacaatgcttccgagagaagggaaaccggcaaaggggaaaagagacgaatagaagggcattggtgccctctcacacacaggccaagtatacatccacatgccacaaggctgaagcttccacatgaacaagagaatggatcgtgatagctattgcaagatgatgcacaagtacataggatcagatgttacataacttgtgacacttccagtcataatttttgagccaatgacaatgcttcagaaaatggctgagctttgttaggtgttccattttagttatctgtctacttcctttaaactggttctggttatatgcgcgcgtatctattattatgtataagcattgttgctactggtccttatcgagaatcgcataaggagacaacttcatgggctaggaggcttaactgacggtttcgaccttgggatgaacatgctgttgggaggagacaaggaagatgatggcggttcaagcaagtcgcatggcaagagcggaaaccgaaagaagcacctgaagaacaacaagaggaagaggcattagccctggactcacactcctgtatcacttcaacatacttgagtgtgtgacatgtcagttattttacagatatgttagttttaccatagtattgttcgatgtgatcctagcatgcccgtgaatgctttggttccctatagagctgttgatgtcttacacaaatgtattacaaaacttttttcataacaatataacacacatttgtacataaattaccgtggtattatacgtt

SEQ ID NO: 72583 - DNA, 2908 bp, Zea Mays
atccccatgcccgcagcgcctcgcctcggctgctctacctctatcccgcgacccgcgagattggaatcgcggagccccgccgccctcctccaaaacggcatcgtctctgctcggggtcacctttcctccctctcacttcctcttcttcatttaggtgtgttagttaagcagaggaggtggctttgcttgttgctcgtgtttctgcgtggatgcgtccaggggtttagcaagtcgctggccatgacggtgctcttcgagatcagggacaagaccttcttcgccgtcgcgattctggctatgcgccatcctaggaaactcgtattggcaggctgtttaactgcactaagaaggctgtttaactacactaagagtcatgacagctctatcgacttatctaggttgggttgcaccaaatctgagctgtcatgacaaaaatcatgatgcaatacaagcagaatatgcttcctgaaagacaaagtaatcacaaagttgaggcagataaaatggttgagcaaaccaatcaatctgaagttagctttgtgaaggctgagcatctgaatggaagatgtctgcattgatgaaggagttcttcctgatcaaaagatttcatcagaaaagcaagtagaccaaaaagtgtctataagctttgattccagggaagagataagtgctgactctacaaaaactgcacatgagttgaaatcgaaaatagttgtcctacctgtcaagtgtgatactcatgacaatattgtggaacagaactcctcatgcaaaaagcgtgatcttgaagataacaatactacagatgtatctaccgagtctaatgatgagggattaaatcccaaacaattaccatttcatgaagttgcacaagattaccaggaggttgatagtgtcatttcggagagcaatgaaaatcaggaccgacttttcactggagatgcaacccatcaggtttcatcgaatgattgttatgaagctggaattagtatcgcgtcagaggccagtaatttatcattttaaaaactggcactacatcttgaaaaaaggataatttatcattttattacgttgtatacggactaataatttatcattatattataccgtatatctactaatattttatcattttattatgttgtatactgagtaatagttatatgtgctagaatttttactcttcgtagcatatgacaacgtttgacttctcttttagggacttgagaaatatgttatgacaaagctgtttaatcgggtattcgcatcagtcccagaagatgtgaagagtgatgaagaactttttgagaattaacttgtacgagaatgaaacatcatggctgactactggccagccactacattcgcgtattactcttccattgtgagtttttgctcttcactatccgatgcccaccaatctaagcagccaaggcatgcatacctaaccttctcgaggacaattcaggagaatctcagctgttcctcatgtggagaacctccagaggctcacatgtattcctacactcaccgcaacgagaatctgattgttcttgtgaggcacttgctgcctaaatattgtttacctggtgaatcagaaggaaagatttggatgtggacttgatgcttaaggtgtgaacgtgaaagtggggtccccagatcatcacgaagggtgataatgtcagctgaagcacactacctttcatttgggaagttccttgaacttagtttttcaagccactcaaccgctagaaggctgccaatatgcgggcattcactcaatacggattgtctgcgctttttttgggttgggctccaaagttgcaatgttcccgtattcctcagtcgaaatttacaatgcctgcaaaccacagcctactcttgagattcacaaccccgatatgcacaaagatgccccaaggttgctgccctcgtgtttcgtgctctgattgttgagtcttcaatgagagctgattccagttatatagagctacaatgcttccgagagaagggaaaccggcaaaggggaaaagagacgaatagaagggcattggtgccctctcacacacaggccaagtatacatccacatgccacaaggctgaagcttccacatgaacaagagaatggatcgtgatagctattgcaagatgatgcacaagtacataggatcagatgttacataacttgtgacacttccagtcataatttttgagccaatgacaatgcttcagaaaatggctgagctttgttaggtgttccattttagttatctgtctacttcctttaaactggttctggttatatgcgcgcgtatctattattatgtataagcattgttgctactggtccttatcgagaatcgcataaggagacaacttcatgggtatgttcagatagtttatcttttgttgcttattgtccgtgtaaatacacaaggcgcctttgatagcacttggtttccctgttgggatttttagcttgtcttagtatccaacttacaccaccatctgatatctgatcctgacaacaggctaggaggcttaactgacggtttcgaccttgggatgaacatgctgttgggaggagacaaggaagatgatggcggttcaagcaagtcgcatggcaagagcggaaaccgaaagaagcacctgaagaacaacaagaggaagaggcattagccctggactcacactcctgtatcacttcaacatacttgagtgtgtgacatgtcagttattttacagatatgttagttttaccatagtattgttcgatgtgatcctagcatgcccgtgaatgctttggttccctatagagctgttgatgtcttacacaaatgtattacaaaacttttttcataacaatataacacacatttgtacataaattaccgtggtattatacgtt

SEQ ID NO: 72584 - DNA, 2519 bp, Zea Mays
ccatttcaaataggagttatttataaaaatacgaggcaggaccaatagagattttacatgatccgtcgcgttacaacggtcaccgtctgtaaaaccgcaagaatccaggggctggattgcaaccggcgacgcaactgacctccctccagagtccagaccgaccgacgccgaccggcgacggcgaccgcccgcgatttgtttactcgtctcgctcacctccgcctccgcgaggagctcctttttctctatccaaccataccctcaccaactccccctgtctcggtttgcgtggagagagaaagggagggagcgagaagtcaagccggagccgggaacagctcaacaccacgggccgcggtttctgaaaaggagaggcgtggtgggaaggggagggggagcgggaggggggcgagccagccagagagccgtacgcgaagcaagcagccccctgcatctagatcaggcgttctgctcgcaccgccgccgccgccgccgccgccgccgcttccttctctcaccgacgctaattggagatcacgtctgggcctggctgctcgtcttccgtcctgggtacaattcgattgatgacctcatcagggaagaatgttttgcagtcttacatgagttaaagggatagaaagtgcaacaaccgtggaataaaggactcgtgcttttgagtaattcaggaggagtacatgcatcacgaagccttgattctggaatggtgtccagtcgaaggaacagtgggattatcctacgggaagggtcggttagggactggtccgagttcaacaatccctcgccgtccccaaaactgctgtactcacagtcctatgtcgcaatgagggggttgctggcctcagtgatctccttggactttttcctgctgtcgagcaagctaaaatctgtgtgcgcggctatgacttcccagaggcatggccgatcacaggagaggtcaaaatcaaaggggttgacctgcaggagagttgcagtccatctgctgttctttttcatggttggcattttcattgggttcatgcctttgttctctgtcgatgtttacaagaaaatagtatccgaaaacgagaggcttccgttccatgatggtgtgattgaggcggaaatgatgggcaccaaagttaaggagttggagacagttgtagtagagaaagaggtcgaactgattgacgagcctcaggttcaagagagccctccagttcctgcaatgttggatgatgaggcagattttgctgaatcttcacctgcattacctgctattgaagaatctgacattcctgtgaagaagctgctgataatcgtgacgatcacttctgttcggccacaacaggcatattacttgaatcggctagcccatgttttgaaagctgtacaggcacctcttttatggttggtggtggaatggcctgaacagtcctatgaaacagcagaaattctgaggtcttctggggttatgtacaggcatcttatatgtagaaagaataccacgagtgtacgaaagattgctgtatgtcaaaggaataatgcaatctatcatgtcaaaaggcatcaccttgatggtataatgcattttgctgatgaagagcggtcatactcagctgatgtatttgaagaaatgcagaagatcaggcgctttggctcatggcctgtagcaatccatgttggaacgaagtatagggcagttttggaaggccctatttgcaaaggaaaccgagtcatgggatggcacacagtccagacggttcagaagaagagttcgactcgtcgattcccaattggcttctctgcatttgctttcaacagcacaatgttgtgggaccctcaaagatggaaccgcccacctatggattctgttatggtccactcaggtggaagaggtggtttgcaggaatcacgatttatagaaaagctcgttaagaacgagcgccaggtagagggtcttccggacaattgcagtcgggttatggtctggaatttcaacctggaacctcctcgagtcaactaccccacaggctgggcactatataagaacctagaaccggacatgcctgtgacatagtttcctgccgctgccactgtgcctgcttctagaggtggtccagaactccacataggctgctcgtccatgccatcctgagcgagttgcgccaaagattacatggatactgcacgctgagatcttactcccttcccccgcgcgccttttagttttgtgtattcctgttatgccctttattttgtgtttctccttatattcaccagcagctagatacgccgtgtagactttcttttcatgtaggctcttctgttcttttcatactgtgtgtgttaccttactacagatgtataaaggctctcatacattgcagctgtttttaagaggaaaggcaaaaataccttcttgatagttgatacgtgaagagattcaagcaaaaccgatcagcttttcagtcgttttggctttccatgagttgctttgccacgaggcaatgacctttgcg

SEQ ID NO: 72585 - DNA, 2860 bp, Zea Mays
ctgacctccctccagagtccagaccgaccgacgccgaccggcgacggcgaccgcccgcgatttgtttactcgtctcgctcacctccgcctccgcgaggagctcctttttctctatccaaccataccctcaccaactccccctgtctcggtttgcgtggagagagaaagggagggagcgagaagtcaagccggagccgggaacagctcaacaccacgggccgcggtttctgaaaaggagaggcgtggtgggaaggggagggggagcgggaggggggcgagccagccagagagccgtacgcgaagcaagcagccccctgcatctagatcaggcgttctgctcgcaccgccgccgccgccgccgccgccgccgcttccttctctcaccgacgctaattggagatcacgtctgggcctggctgctcgtcttccgtcctgggtacaattcgattgatgacctcatcagggaagaatgttttgcagtcttacatgagttaaagggatagaaagtgcaacaaccgtggaataaaggactcgtgcttttgagtaattcaggaggagtacatgcatcacgaagccttgattctggaatggtgtccagtcgaaggaacagtgggattatcctacgggaagggtcggttagggactggtccgagttcaacaatccctcgccgtccccaaaactgctgtactcacagtcctatgtcgcaatgagggggttgctggcctcagtgatctccttggactttttcctgctgtcgagcaagctaaaatctgtgtgcgcggctatgacttcccagaggcatggccgatcacaggagaggtcaaaatcaaaggggttgacctgcaggagagttgcagtccatctgctgttctttttcatggttggcattttcattgggttcatgcctttgttctctgtcgatgtttacaagaaaatagtatccgaaaacgagaggcttccgttccatgatggtgtgattgaggcggaaatgatgggcaccaaagttaaggagttggagacagttgtagtagagaaagaggtcgaactgattgacgagcctcaggttcaagagagccctccagttcctgcaatgttggatgatgaggcagattttgctgaatcttcacctgcattacctgctattgaagaatctgacattcctgtgaagaagctgctgataatcgtgacgatcacttctgttcggccacaacaggcatattacttgaatcggctagcccatgttttgaaagctgtacaggcacctcttttatggttggtggtggaatggcctgaacagtcctatgaaacagcagaaattctgaggtcttctggggttatgtacaggcatcttatatgtagaaagaataccacgagtgtacgaaagattgctgtatgtcaaaggaataatgcaatctatcatgtcaaaaggcatcaccttgatggtataatgcattttgctgatgaagagcggtcatactcagctgatgtatttgaagaaatgcagaagatcaggcgctttggctcatggcctgtagcaatccatgttggaacgaagtatagggcagttttggaaggccctatttgcaaaggaaaccgagtcatgggatggcacacagtccagacggttcagaagaagagttcgactcgtcgattcccaattggcttctctgcatttgctttcaacagcacaatgttgtgggaccctcaaagatggaaccgcccacctatggattctgttatggtccactcaggtggaagaggtggtttgcaggtgagtttgtttggatatttgaactgtaatggtagggaggctgcagtaatttttcacatagttgatggaactcttgtgtaaagtcaggactcatctatgttgaaggttggtcctagttgctacttagcgaaacttcagtttacagctctccattcttataaaaatggccaatgtcgtggtggaagtggaacaacataccgtagaatttggttctgcaataaaataatagattaacaatggaggcaaaattaatagataaaaaccataagtgtgacatgtgtcgccacaaattgcaagtatcgccaccaattgcaaatgcaccatggccatctttcctgacatagaacgaagcaatgtggtctgacctgacatatgttttttttgcaggaatcacgatttatagaaaagctcgttaagaacgagcgccaggtagagggtcttccggacaattgcagtcgggttatggtctggaatttcaacctggaacctcctcgagtcaactaccccacaggctgggcactatataagaacctagaaccggacatgcctgtgacatagtttcctgccgctgccactgtgcctgcttctagaggtgatttctcccagcaaggcagagaagtttggagcacacgtctccagcgtattggtagttctaaatttcaactccctgctgttaccaggtggtccagaactccacataggctgctcgtccatgccatcctgagcgagttgcgccaaagattacatggatactgcacgctgagatcttactcccttcccccgcgcgccttttagttttgtgtattcctgttatgccctttattttgtgtttctccttatattcaccagcagctagatacgccgtgtagactttcttttcatgtaggctcttctgttcttttcatactgtgtgtgttaccttactacagatgtataaaggctctcatacattgcagctgtttttaagaggaaaggcaaaaataccttcttgatagttgatacgtgaagagattcaagcaaaaccgatcagcttttcagtcgttttggctttccatgagttgctttgccacgaggcaatgacctttgcg

SEQ ID NO: 72586 - DNA, 1191 bp, Zea Mays
acacgcatgtctctagaagaaaaaaaaatctccatccgcgctctacatcgccagtcgtactccccgcgtcggattccctgtgtgctcccctgcgtgctccatcgcgccgccacccagagtccttccccaacgccgccctctccctctcggcgccctgctggccggcgctccctccagcccctccccatggccgagcgcatctccatggtggtcaggagcttgtcccatggctgagctccctctccatggtcgcgctcctcccctgctccatccatggctgccgtcgagtctccctggacgggctcaagtgccatacgccgtcggctctagtctccagctcgcctagcaccatcgtcatctgccagctccatcatcggtcgttcctagtattttccccaacaccgagcctctctgacctcgctgctcgtcggtgcaatttatctgtgttcatgaagaaagtgaagcccgtgtacatagctcgcaaggtgttctgttgaaagcttcacctgatgcttgtcgtcattcttgcggattcaagtatgattagtatggtaagccgattcactactcctgctatcgattcgatgtccggattggttataatatttgttgatgattatcttgtttgcaacgtatgcattgtgacggcattagacatttgttaaaatgcttcatatatatggtgtgtggtttagttaaaattgcaagtataaatttggtagtggtgagtgttggggccttcgtctttcgaaggtcctcaaaaacatgatttaacaatgtttctagagtataatacatgaacaggtacctttggactcggatcagaaccacagtgtgaagaaccacaaagaatacgaaggttggcgcagagccgaagctatgcacaggggagcttcggtatgatagcaaaaaagggaaccgacttaaaagggaaaaggctatttagacctcgatggatcactatagagtcattagcaaatgtaaagggcatgagtgtaattttacatgggttgcgtcccgtgcctataaatagatgaacagtgctcccgtactgttcacgctaacttgacatttgcttttgcatcacgttcgtacctttgctgtctatcaagtcgaaggtgccaagtgtaattcaatattgtttttattttctcatgataatataatgaagacgagttgataatgctatat

SEQ ID NO: 72587 - DNA, 1647 bp, Zea Mays
acacgcatgtctctagaagaaaaaaaaatctccatccgcgctctacatcgccagtcgtactccccgcgtcggattccctgtgtgctcccctgcgtgctccatcgcgccgccacccagagtccttccccaacgccgccctctccctctcggcgccctgctggccggcgctccctccagcccctccccatggccgagcgcatctccatggtggtcaggagcttgtcccatggctgagctccctctccatggtcgcgctcctcccctgctccatccatggctgccgtcgagtctccctggacgggctcaagtgccatacgccgtcggctctagtctccagctcgcctaggtcggtgttcctctccctctcctaatctccatggccgctggcgctcttgctcgggtccatggtcgcgactcgagtcacccctttgtgctggccgaccatccagccatggtggcgcgcacccttgcttcctactccactcggcgccccctgctcttcccctggtcgcccatggcgcccggccgccccttctctctctgctccagcgtgtgacggcgtcgagctcccttcgtcacgcccttccttgctcctcccaggcccaaccatggagctcacccacgacgcccgtcgtcctacctactcgagctcgccctctcctcatcttccagccgcctctgctcacctccctcatctccctcgggtccagcgcgctctctccctggctcgggtgccggtcgccgtcatggagttttgtttggtcggctcatcgttgacctcgccagtgccgtcgaaccccatcctcccctgctcgacctcgtcgtcgttcctcagcttcacgccgacctctagcccgccatagagcttccctgcgacgcgcctccatgtccaaggccagcttggcctcctccctagcgctcttggacccgacgtccccagtctatcacgccatactcagatctcgccgactgacttccaccatccaccatgctgtgtgctggcattccctcgcggcagaccacaccgtcgtctaaccttgttcacttcgctgcagcaccatcgtcatctgccagctccatcatcggtcgttcctagtattttccccaacaccgagcctctctgacctcgctgctcgtcggtgcaatttatctgtgttcatgaagaaagtgaagcccgtgtacatagctcgcaaggtgttctgttgaaagcttcacctgatgcttgtcgtcattcttgcggattcaagtatgattagtatggtacctttggactcggatcagaaccacagtgtgaagaaccacaaagaatacgaaggttggcgcagagccgaagctatgcacaggggagcttcggtatgatagcaaaaaagggaaccgacttaaaagggaaaaggctatttagacctcgatggatcactatagagtcattagcaaatgtaaagggcatgagtgtaattttacatgggttgcgtcccgtgcctataaatagatgaacagtgctcccgtactgttcacgctaacttgacatttgcttttgcatcacgttcgtacctttgctgtctatcaagtcgaaggtgccaagtgtaattcaatattgtttttattttctcatgataatataatgaagacgagttgataatgctatat

SEQ ID NO: 72588 - DNA, 1988 bp, Zea Mays
tcactctcactctccctttctctcgtggagacgactgggcgaccgccggcgccgacctacaccaggtgcccaggccttcgtcgggaccatcgccggcgacgaacacccaccagctggatctgatccaattacagtcagaaatgtcttcagttgggagaagcaatggcaccagggcggcgaatggtgcagctgccatcagtacttccacgacggaagcaggctcagccgacgccagatttcactcccaactactacatcaggacaggaagggcgggaaaagaattgttcctgcagcacgcacttctgatgggaatggatcaaatactcgtggaaatggtctccagtctggtgccaattcaaaccaaaatctgcctatgaatttatctcttctagctccaccatcatcaccagcatccttctcaaactctgcgcttccttcgactgctcaatcaccgaattgctttctgtctgtatctgcaaactctcctggtggtccaacgtccaatatgttcgctgttgggccatatgctaatgaacctcaacttgtctcaccacctgtcttctcaacttacacaactgagccatccactgcaccgttgaccccaccacctgagctggctcatgcaactacaccttcttctccagatgttccatatgctagatttctttcttcttctatgggtatcaaaactgccagcaaggatcacaacatgcctttcctatcaacaacctattctggtggttcaggactccagacatcttatccactttaccctgaaagcccctgtagcagcctcatctcaccggcttcagtaactccgaggactggtctatcttcacctatacctgagcaagaggttcctcctgcccattggaagacctctaggtctgcctgcgacacgccatatttcagggcttcgcccattcccgagcaagaaaccactgcacaatggaagacctctagatctgcttgtgacacaccgtatgccaggacctcaccaaccaatatatttgggctggattcatctacaccgagaaactatatgctagacaacaatttctttcggccagcggcatctgctcaattctacctggaccaggctcagcagacattttcacataatggcggaagggtcagtgtatccagggagaagcaaggtgccgatgaaattgaagcttacagggcttcatttggatttagtgcggatgaaattgtccaatctcagtcttatgtgggaataccggatgcagttgatgaatcattcagtatatcaccatttggaaacaatactccagctactgagatctgcccattcagtgatctgcctaatgaggtggataaatcatgtgcctacgcgaaagatgacacaagcccaaagaaatcagcaaaccagctctccactgattctccaaacaaagttctgcgtttggacgtgttcaaaggaacaaaaggaggtcatcagtctgaggacgagtgtatcaggaaagatggtcatcttttcagaaagacagcagatgaaatatccctaaaacccatagaagtaagaaagaaatcgcttcctggccattcttgctcggatgcagagatcgagtacaggaggacacggagtttaagggatgccaacggcgttctatcacggcgcagtgcattggcaagacagctgcactaatatggtactagtatgcagggtgatttcatagttcatgtagcctagtgtgcattggatccgagctgtcattagagtaatctgtagggcaaagagtagcctctaccgtatatgaggatcatattgccagattgtgctctagatatgtgattatgagcctgtactctgtttgaactccaagatcctctttgtaggcacactccaatcgtatgcaggagctgtgagatggaatagcgttggtacattacaggagttcgtgtttcggtcttcctcttcctgatgatgtaacttgtgtttgaatcttgcagaatgctggtttgg

SEQ ID NO: 72589 - DNA, 2011 bp, Zea Mays
tcactctcactctccctttctctcgtggagacgactgggcgaccgccggcgccgacctacaccaggtgcccaggccttcgtcgggaccatcgccggcgacgaacacccaccagctggatctgatccaattacagtcagaaatgtcttcagttgggagaagcaatggcaccagggcggcgaatggtgcagctgccatcagtacttccacgacggaagcaggctcagccgacgccagatttcactcccaactactacatcaggacagggcttatcatgtttcggatcgcagaagggcgggaaaagaattgttcctgcagcacgcacttctgatgggaatggatcaaatactcgtggaaatggtctccagtctggtgccaattcaaaccaaaatctgcctatgaatttatctcttctagctccaccatcatcaccagcatccttctcaaactctgcgcttccttcgactgctcaatcaccgaattgctttctgtctgtatctgcaaactctcctggtggtccaacgtccaatatgttcgctgttgggccatatgctaatgaacctcaacttgtctcaccacctgtcttctcaacttacacaactgagccatccactgcaccgttgaccccaccacctgagctggctcatgcaactacaccttcttctccagatgttccatatgctagatttctttcttcttctatgggtatcaaaactgccagcaaggatcacaacatgcctttcctatcaacaacctattctggtggttcaggactccagacatcttatccactttaccctgaaagcccctgtagcagcctcatctcaccggcttcagtaactccgaggactggtctatcttcacctatacctgagcaagaggttcctcctgcccattggaagacctctaggtctgcctgcgacacgccatatttcagggcttcgcccattcccgagcaagaaaccactgcacaatggaagacctctagatctgcttgtgacacaccgtatgccaggacctcaccaaccaatatatttgggctggattcatctacaccgagaaactatatgctagacaacaatttctttcggccagcggcatctgctcaattctacctggaccaggctcagcagacattttcacataatggcggaagggtcagtgtatccagggagaagcaaggtgccgatgaaattgaagcttacagggcttcatttggatttagtgcggatgaaattgtccaatctcagtcttatgtgggaataccggatgcagttgatgaatcattcagtatatcaccatttggaaacaatactccagctactgagatctgcccattcagtgatctgcctaatgaggtggataaatcatgtgcctacgcgaaagatgacacaagcccaaagaaatcagcaaaccagctctccactgattctccaaacaaagttctgcgtttggacgtgttcaaaggaacaaaaggaggtcatcagtctgaggacgagtgtatcaggaaagatggtcatcttttcagaaagacagcagatgaaatatccctaaaacccatagaagtaagaaagaaatcgcttcctggccattcttgctcggatgcagagatcgagtacaggaggacacggagtttaagggatgccaacggcgttctatcacggcgcagtgcattggcaagacagctgcactaatatggtactagtatgcagggtgatttcatagttcatgtagcctagtgtgcattggatccgagctgtcattagagtaatctgtagggcaaagagtagcctctaccgtatatgaggatcatattgccagattgtgctctagatatgtgattatgagcctgtactctgtttgaactccaagatcctctttgtaggcacactccaatcgtatgcaggagctgtgagatggaatagcgttggtacattacaggagttcgtgtttcggtcttcctcttcctgatgatgtaacttgtgtttgaatcttgcagaatgctggtttgg

SEQ ID NO: 72590 - DNA, 1932 bp, Zea Mays
tcactctcactctccctttctctcgtggagacgactgggcgaccgccggcgccgacctacaccagggcggcgaatggtgcagctgccatcagtacttccacgacggaagcaggctcagccgacgccagatttcactcccaactactacatcaggacaggcaaagtagatgggctggctgcttttcaggcttatcatgtttcggatcgcagaagggcgggaaaagaattgttcctgcagcacgcacttctgatgggaatggatcaaatactcgtggaaatggtctccagtctggtgccaattcaaaccaaaatctgcctatgaatttatctcttctagctccaccatcatcaccagcatccttctcaaactctgcgcttccttcgactgctcaatcaccgaattgctttctgtctgtatctgcaaactctcctggtggtccaacgtccaatatgttcgctgttgggccatatgctaatgaacctcaacttgtctcaccacctgtcttctcaacttacacaactgagccatccactgcaccgttgaccccaccacctgagctggctcatgcaactacaccttcttctccagatgttccatatgctagatttctttcttcttctatgggtatcaaaactgccagcaaggatcacaacatgcctttcctatcaacaacctattctggtggttcaggactccagacatcttatccactttaccctgaaagcccctgtagcagcctcatctcaccggcttcagtaactccgaggactggtctatcttcacctatacctgagcaagaggttcctcctgcccattggaagacctctaggtctgcctgcgacacgccatatttcagggcttcgcccattcccgagcaagaaaccactgcacaatggaagacctctagatctgcttgtgacacaccgtatgccaggacctcaccaaccaatatatttgggctggattcatctacaccgagaaactatatgctagacaacaatttctttcggccagcggcatctgctcaattctacctggaccaggctcagcagacattttcacataatggcggaagggtcagtgtatccagggagaagcaaggtgccgatgaaattgaagcttacagggcttcatttggatttagtgcggatgaaattgtccaatctcagtcttatgtgggaataccggatgcagttgatgaatcattcagtatatcaccatttggaaacaatactccagctactgagatctgcccattcagtgatctgcctaatgaggtggataaatcatgtgcctacgcgaaagatgacacaagcccaaagaaatcagcaaaccagctctccactgattctccaaacaaagttctgcgtttggacgtgttcaaaggaacaaaaggaggtcatcagtctgaggacgagtgtatcaggaaagatggtcatcttttcagaaagacagcagatgaaatatccctaaaacccatagaagtaagaaagaaatcgcttcctggccattcttgctcggatgcagagatcgagtacaggaggacacggagtttaagggatgccaacggcgttctatcacggcgcagtgcattggcaagacagctgcactaatatggtactagtatgcagggtgatttcatagttcatgtagcctagtgtgcattggatccgagctgtcattagagtaatctgtagggcaaagagtagcctctaccgtatatgaggatcatattgccagattgtgctctagatatgtgattatgagcctgtactctgtttgaactccaagatcctctttgtaggcacactccaatcgtatgcaggagctgtgagatggaatagcgttggtacattacaggagttcgtgtttcggtcttcctcttcctgatgatgtaacttgtgtttgaatcttgcagaatgctggtttgg

SEQ ID NO: 72591 - DNA, 2018 bp, Zea Mays
tcactctcactctccctttctctcgtggagacgactgggcgaccgccggcgccgacctacaccaggtgcccaggccttcgtcgggaccatcgccggcgacgaacacccaccagtcagaaatgtcttcagttgggagaagcaatggcaccagggcggcgaatggtgcagctgccatcagtacttccacgacggaagcaggctcagccgacgccagatttcactcccaactactacatcaggacaggcaaagtagatgggctggctgcttttcaggcttatcatgtttcggatcgcagaagggcgggaaaagaattgttcctgcagcacgcacttctgatgggaatggatcaaatactcgtggaaatggtctccagtctggtgccaattcaaaccaaaatctgcctatgaatttatctcttctagctccaccatcatcaccagcatccttctcaaactctgcgcttccttcgactgctcaatcaccgaattgctttctgtctgtatctgcaaactctcctggtggtccaacgtccaatatgttcgctgttgggccatatgctaatgaacctcaacttgtctcaccacctgtcttctcaacttacacaactgagccatccactgcaccgttgaccccaccacctgagctggctcatgcaactacaccttcttctccagatgttccatatgctagatttctttcttcttctatgggtatcaaaactgccagcaaggatcacaacatgcctttcctatcaacaacctattctggtggttcaggactccagacatcttatccactttaccctgaaagcccctgtagcagcctcatctcaccggcttcagtaactccgaggactggtctatcttcacctatacctgagcaagaggttcctcctgcccattggaagacctctaggtctgcctgcgacacgccatatttcagggcttcgcccattcccgagcaagaaaccactgcacaatggaagacctctagatctgcttgtgacacaccgtatgccaggacctcaccaaccaatatatttgggctggattcatctacaccgagaaactatatgctagacaacaatttctttcggccagcggcatctgctcaattctacctggaccaggctcagcagacattttcacataatggcggaagggtcagtgtatccagggagaagcaaggtgccgatgaaattgaagcttacagggcttcatttggatttagtgcggatgaaattgtccaatctcagtcttatgtgggaataccggatgcagttgatgaatcattcagtatatcaccatttggaaacaatactccagctactgagatctgcccattcagtgatctgcctaatgaggtggataaatcatgtgcctacgcgaaagatgacacaagcccaaagaaatcagcaaaccagctctccactgattctccaaacaaagttctgcgtttggacgtgttcaaaggaacaaaaggaggtcatcagtctgaggacgagtgtatcaggaaagatggtcatcttttcagaaagacagcagatgaaatatccctaaaacccatagaagtaagaaagaaatcgcttcctggccattcttgctcggatgcagagatcgagtacaggaggacacggagtttaagggatgccaacggcgttctatcacggcgcagtgcattggcaagacagctgcactaatatggtactagtatgcagggtgatttcatagttcatgtagcctagtgtgcattggatccgagctgtcattagagtaatctgtagggcaaagagtagcctctaccgtatatgaggatcatattgccagattgtgctctagatatgtgattatgagcctgtactctgtttgaactccaagatcctctttgtaggcacactccaatcgtatgcaggagctgtgagatggaatagcgttggtacattacaggagttcgtgtttcggtcttcctcttcctgatgatgtaacttgtgtttgaatcttgcagaatgctggtttgg

SEQ ID NO: 72592 - DNA, 1939 bp, Zea Mays
ctaatttcgattttttgcaaaaaaaaaaaatcggtcagaaatgtcttcagttgggagaagcaatggcaccagggcggcgaatggtgcagctgccatcagtacttccacgacggaagcaggctcagccgacgccagatttcactcccaactactacatcaggacaggcaaagtagatgggctggctgcttttcaggcttatcatgtttcggatcgcagaagggcgggaaaagaattgttcctgcagcacgcacttctgatgggaatggatcaaatactcgtggaaatggtctccagtctggtgccaattcaaaccaaaatctgcctatgaatttatctcttctagctccaccatcatcaccagcatccttctcaaactctgcgcttccttcgactgctcaatcaccgaattgctttctgtctgtatctgcaaactctcctggtggtccaacgtccaatatgttcgctgttgggccatatgctaatgaacctcaacttgtctcaccacctgtcttctcaacttacacaactgagccatccactgcaccgttgaccccaccacctgagctggctcatgcaactacaccttcttctccagatgttccatatgctagatttctttcttcttctatgggtatcaaaactgccagcaaggatcacaacatgcctttcctatcaacaacctattctggtggttcaggactccagacatcttatccactttaccctgaaagcccctgtagcagcctcatctcaccggcttcagtaactccgaggactggtctatcttcacctatacctgagcaagaggttcctcctgcccattggaagacctctaggtctgcctgcgacacgccatatttcagggcttcgcccattcccgagcaagaaaccactgcacaatggaagacctctagatctgcttgtgacacaccgtatgccaggacctcaccaaccaatatatttgggctggattcatctacaccgagaaactatatgctagacaacaatttctttcggccagcggcatctgctcaattctacctggaccaggctcagcagacattttcacataatggcggaagggtcagtgtatccagggagaagcaaggtgccgatgaaattgaagcttacagggcttcatttggatttagtgcggatgaaattgtccaatctcagtcttatgtgggaataccggatgcagttgatgaatcattcagtatatcaccatttggaaacaatactccagctactgagatctgcccattcagtgatctgcctaatgaggtggataaatcatgtgcctacgcgaaagatgacacaagcccaaagaaatcagcaaaccagctctccactgattctccaaacaaagttctgcgtttggacgtgttcaaaggaacaaaaggaggtcatcagtctgaggacgagtgtatcaggaaagatggtcatcttttcagaaagacagcagatgaaatatccctaaaacccatagaagtaagaaagaaatcgcttcctggccattcttgctcggatgcagagatcgagtacaggaggacacggagtttaagggatgccaacggcgttctatcacggcgcagtgcattggcaagacagctgcactaatatggtactagtatgcagggtgatttcatagttcatgtagcctagtgtgcattggatccgagctgtcattagagtaatctgtagggcaaagagtagcctctaccgtatatgaggatcatattgccagattgtgctctagatatgtgattatgagcctgtactctgtttgaactccaagatcctctttgtaggcacactccaatcgtatgcaggagctgtgagatggaatagcgttggtacattacaggagttcgtgtttcggtcttcctcttcctgatgatgtaacttgtgtttgaatcttgcagaatgctggtttgg

SEQ ID NO: 72593 - DNA, 914 bp, Zea Mays
gtgaatcctgcggatagcctgacggctcgtttgaccttcgtctgtcgtctcgtctcgtccacctccccagcggcgcgtgaagcttgaggcaatccccgccctctctagccctgcgcaaccagttcggttccatggccaacagcaatctcccgcgccgaatcatcaaggagacgcagcggcttctcagcgaaccaggtgtctgactagttccgcgcgagctctctcggaattttgccattttgcaccggggattagcgcgtcgccgtcggaggagaatatgcggtacttcaatgtcatgatccttggccccgcgcagtcaccctatgaaggtggagttttcaagcttgaactattcttgcctgaggaatatccaatggctgccccaaaagttagatttctcacaaaaatttaccatcctaatattgacaagcttggtaggatatgcctcgacattcttaaggacaaatggagtccagctcttcagatacgtacagttctactgagcattcaggcacttctgagcgccccaaacccagatgatcctctctcagacaacattgcgaaacactggaaatccaacgaagctgaagctgttgagacagcgaaggagtggactcgcctgtacacaagtggggcatgacagccaagtgttgttccagatgtaacaacacttccatagtttggggtcgattgaacacccctcttgcttggtgtgcgcaaatttgtgaaatgttgcaatggggtaaaaaacaaaaagctccaatcatgctttgtacttgtggctgtagctccgttcgctgcagtgcccatgaacatcaaagcaggtgttgctttgtccgttcctatccgaccatcagttgcttatcccccctgttccatgtgttgtggctatgaggattcagattcatgctgcc

SEQ ID NO: 72594 - DNA, 369 bp, Zea Mays
gaatcctgcggatagcctgacggctcgtttgaccttcgtctgtcgtctcgtctcgtccacctccccagcggcgcgtgaagcttgaggcaatccccgccctctctagccctgcgcaaccagttcggttccatggccaacagcaatctcccgcgccgaatcatcaaggagacgcagcggcttctcagcgaaccagcaccggggattagcgcgtcgccgtcggaggagaatatgcggtacttcaatgtcatgatccttggccccgcgcagtcaccctatgaaggtggagttttcaagcttgaactattcttgcctgaggaatatccaatggctgccccaaaatggttagatagaagtacaggcctgacgcag

SEQ ID NO: 72595 - DNA, 512 bp, Zea Mays
gaatcctgcggatagcctgacggctcgtttgaccttcgtctgtcgtctcgtctcgtccacctccccagcggcgcgtgaagcttgaggcaatccccgccctctctagccctgcgcaaccagttcggttccatggccaacagcaatctcccgcgccgaatcatcaaggagacgcagcggcttctcagcgaaccagcaccggggattagcgcgtcgccgtcggaggagaatatgcggtacttcaatgtcatgatccttggccccgcgcagtcaccctatgaaggtggagttttcaagcttgaactattcttgcctgaggaatatccaatggctgccccaaaagttagatttctcacaaaaatttaccatcctaatattgacaagcttggtaggatatgcctcgacattcttaaggacaaatggagtccagctcttcagatacgtacagttctactgagtatccagttttcggcttgcatatgtagttctcgagtgtctacctacctctacggtta

SEQ ID NO: 72596 - DNA, 823 bp, Zea Mays
gaatcctgcggatagcctgacggctcgtttgaccttcgtctgtcgtctcgtctcgtccacctccccagcggcgcgtgaagcttgaggcaatccccgccctctctagccctgcgcaaccagttcggttccatggccaacagcaatctcccgcgccgaatcatcaaggagacgcagcggcttctcagcgaaccagcaccggggattagcgcgtcgccgtcggaggagaatatgcggtacttcaatgtcatgatccttggccccgcgcagtcaccctatgaaggtggagttttcaagcttgaactattcttgcctgaggaatatccaatggctgccccaaaacttggtaggatatgcctcgacattcttaaggacaaatggagtccagctcttcagatacgtacagttctactgagcattcaggcacttctgagcgccccaaacccagatgatcctctctcagacaacattgcgaaacactggaaatccaacgaagctgaagctgttgagacagcgaaggagtggactcgcctgtacacaagtggggcatgacagccaagtgttgttccagatgtaacaacacttccatagtttggggtcgattgaacacccctcttgcttggtgtgcgcaaatttgtgaaatgttgcaatggggtaaaaaacaaaaagctccaatcatgctttgtacttgtggctgtagctccgttcgctgcagtgcccatgaacatcaaagcaggtgttgctttgtccgttcctatccgaccatcagttgcttatcccccctgttccatgtgttgtggctatgaggattcagattcatgctgcc

SEQ ID NO: 72597 - DNA, 806 bp, Zea Mays
gaatcctgcggatagcctgacggctcgtttgaccttcgtctgtcgtctcgtctcgtccacctccccagcggcgcgtgaagcttgaggcaatccccgccctctctagccctgcgcaaccagttcggttccatggccaacagcaatctcccgcgccgaatcatcaaggagacgcagcggcttctcagcgaaccagcaccggggattagcgcgtcgccgtcggaggagaatatgcggtacttcaatgtcatgatccttggccccgcgcagtcaccctatgaaggttagatttctcacaaaaatttaccatcctaatattgacaagcttggtaggatatgcctcgacattcttaaggacaaatggagtccagctcttcagatacgtacagttctactgagcattcaggcacttctgagcgccccaaacccagatgatcctctctcagacaacattgcgaaacactggaaatccaacgaagctgaagctgttgagacagcgaaggagtggactcgcctgtacacaagtggggcatgacagccaagtgttgttccagatgtaacaacacttccatagtttggggtcgattgaacacccctcttgcttggtgtgcgcaaatttgtgaaatgttgcaatggggtaaaaaacaaaaagctccaatcatgctttgtacttgtggctgtagctccgttcgctgcagtgcccatgaacatcaaagcaggtgttgctttgtccgttcctatccgaccatcagttgcttatcccccctgttccatgtgttgtggctatgaggattcagattcatgctgcc

SEQ ID NO: 72598 - DNA, 2110 bp, Zea Mays
gggggtggtggctctttgcaccgcttttttcgaacgctactttagcttttactcttcttttctcttggcttccgctcctcgcccacgcctcctcctccagtcctccctttcgtcgtcgcttccctccccttcccgttcgaatcctctgaccaccgcagagcctcccccctgaggaaaccctagcgcagccgccgaccgccgccgacccgtagcatggcgtccccggcccggcccgtcgccgcgtccgtctccggcgccttcggcctctcgcccgaccccaagcgctgctccttcgaccaggcgctccggcacaaggatttccaggagaacaggctgttgatgtcatttgttaatttccatgagcaagagaagatctctaaagaaatcgtaacacacgctatagaaagctgcatgaagaaacaagcagataacctgttgaattcactggacgttatcagcggtaggttgtcacagttggagttatactgctatagactggaaaggtccattggagaattacgaagtgacgtgatggattatcataacgaagcaaatctgaacttccggtgcgttgaaaagcaagtgaaagaggttcagaaatctgtgcaggctgttcaggaaaagcaggagcttgctgaaactcagaaagaaatgaccaaacttcagatagtacatgaggattctgcacaaaagagtgaaggtactgctccatcagttttcatgaatagggaaaatgaggttgcccttgtgccattgcaccaagtaaatgctgttcagtcacctcctgtgcaattccaaagttgcagtggccttattctacagcaactgatgccagtccaagaccagcagcgctcgaaccaaaccgctgtgtactgtatgcgaggccaaagccatctggagcacagacaggcccaaatgttcgaagctgctggtcaatctctgcagacacacactcggaaaactcagccaccgacagtagttgaggtatctcaggtaaccagtcaggcaccagagttctaccctcatccgcagcaccaatggcaacatcagaccggccagcaggttttctcacaggcaaggcaaccacaaccacatgtactacagcagcagtacagcaacatccagcaaggtccagcacagatggttcagctgcaaacgtcctctccacatgctcatagtacaccacaggtcacagtagtatatcctccatacgggcctcatcagtctgcctgtggtaatgctgaggcacgcagtgggggcatagttgtgccaccttcatactctacaatttcttcatcccaccggaagcatcatgaagctgctcctgtttatgtacaaagcaacacagtttctgttccactggcggagcagcatcagcagcttcattcactcggcaatggctcatttgtacctcagccaagcaaagttagtccatgcggtctagcgtcatatacggtacaagggaatgcacagacctatagccctgcttatggaagcccttccagcaatcctgctactattgttgctgtccttaatcaacaagcacatggcagttctcccatggtgcttcatcacttgggaccccagtcagtgctgaaccatccgatagacattgctgaaaaggttactcggatgggttactcgaaggatcaggttgagggtcttgcactccgtatggtggctgcaggccagcctgcagaccataaccccctgcatgataggttgagctctgttagccatggtgtagctcctcatgcatggtctggataggtatttcctctggcgtctttttttatcagccaggattgcatatccaccagcttatttttaccagttggaggatcgagatgaaataagtctgtttagattagttaaagtgatcctggcatatgtcctgccttttaatggacacatgcttgtaattttctcgtggacttgcacacgcatgattggaatataaaacgatacgataatttgttggttgctactactttcttgcttggtcaactgctcagacgcctgtagacggctccctttggaatgtcggaaagtttcctgtaaaaatgaactgattccggtgaaatctatatgttccaaatgggacctgaat

SEQ ID NO: 72599 - DNA, 1938 bp, Zea Mays
gttcattgctcgttgccggggatgggggtgcaccgtgctgccttgttctggatttccaggagaacaggctgttgatgtcatttgttaatttccatgagcaagagaagatctctaaagaaatcgtaacacacgctatagaaagctgcatgaagaaacaagcagataacctgttgaattcactggacgttatcagcggtaggttgtcacagttggagttatactgctatagactggaaaggtccattggagaattacgaagtgacgtgatggattatcataacgaagcaaatctgaacttccggtgcgttgaaaagcaagtgaaagagaaatctgtgcaggctgttcaggaaaagcaggagcttgctgaaactcagaaagaaatgaccaaacttcagatagtacatgaggattctgcacaaaagagtgaaggtactgctccatcagttttcatgaatagggaaaatgaggttgcccttgtgccattgcaccaagtaaatgctgttcagtcacctcctgtgcaattccaaagttgcagtggccttattctacagcaactgatgccagtccaagaccagcagcgctcgaaccaaaccgctgtgtactgtatgcgaggccaaagccatctggagcacagacaggcccaaatgttcgaagctgctggtcaatctctgcagacacacactcggaaaactcagccaccgacagtagttgaggtatctcaggtaaccagtcaggcaccagagttctaccctcatccgcagcaccaatggcaacatcagaccggccagcaggttttctcacaggcaaggcaaccacaaccacatgtactacagcagcagtacagcaacatccagcaaggtccagcacagatggttcagctgcaaacgtcctctccacatgctcatagtacaccacaggtcacagtagtatatcctccatacgggcctcatcagtctgcctgtggtaatgctgaggcacgcagtgggggcatagttgtgccaccttcatactctacaatttcttcatcccaccggaagcatcatgaagctgctcctgtttatgtacaaagcaacacagtttctgttccactggcggagcagcatcagcagcttcattcactcggcaatggctcatttgtacctcagccaagcaaagttagtccatgcggtctagcgtcatatacggtacaagggaatgcacagacctatagccctgcttatggaagcccttccagcaatcctgctactattgttgctgtccttaatcaacaagcacatggcagttctcccatggtgcttcatcacttgggaccccagtcagtgctgaaccatccgatagacattgctgaaaaggttactcggatgggttactcgaaggatcaggttgagggtcttgcactccgtatggtggctgcaggccagcctgcagaccataaccccctgcatgataggttgagctctgttagccatggtgtagctcctcatgcatggtctggataggtaagaacgacaaatgcagccgtcacgcttacttattactcatgaggtgtttgtgtgatatatctcggtatgtgctttattatcgtcggaaatcttcaggtatttcctctggcgtctttttttatcagccaggattgcatatccaccagcttatttttaccagttggaggatcgagatgaaataagtctgtttagattagttaaagtgatcctggcatatgtcctgccttttaatggacacatgcttgtaattttctcgtggacttgcacacgcatgattggaatataaaacgatacgataatttgttggttgctactactttcttgcttggtcaactgctcagacgcctgtagacggctccctttggaatgtcggaaagtttcctgtaaaaatgaactgattccggtgaaatctatatgttccaaatgggacctgaat

SEQ ID NO: 72600 - DNA, 5267 bp, Zea Mays
cggaagagcaccaaacgccagcagcagcagcagcgaggcaaaataataaaaagtcggaggcatcaaatccaaaagtccctgagcaaccgaggcagccctttcgatcatatgagaccaagatgttttctggtcccaaaaccatgaaggcttcggcaatcttgcctaccacagaccctttacttcaaaatacagggaaacggaaatccttcattggctcttctcatcttggctcacaggcagtacatgaataccagtttcttcctgagcagccaagtgatacatatgagagggcaagccagtcacacttctatgattcttcagcagaagcgtcaaacttgagggtagctccgctgtctacaggatcacgctttctccatggagttgagcaggcacctagctatacatttcacagtcaatcatctggttctagccatttgactcaacgtggcagtggcaggtcacctattgcatcggcattgacagatcatgagggggctttgtcaaatattaatgctagcacaactccaatccacggccaacttggcatccctcaagttgccggattcgaaagccccctggcatcccctgaaagattgggttatcatgatgaagatacatatcacatggacagaaagcgcaagcataatgaggaagctaagattgctagggaggttgaggctcatgaaaagagaatcagaaaggagcttgagaagcaagatctgctgaacagaaagagagaagaacaaatgcggagagaaatggagagacatgatcgtgagagacgtaaggaagaggagaggttgatgcgtgaaaggcagagggaagaagagaaattccaaagggaacaaagacgcgaacacaagcgcatggagaagtttatgcagaaacaatctatacgagctgaaaaactgagacaaagagaggagcttcgacgagagaaagaagctgcgaggcagaaggctgctaatgagagggctacagctcgtagaattgcgcgagagagtatggaactgatggaagatgagcgcttggaactattagagttggcctctcgtagtaaagggctgccctcaatggtttctcttgatagtgacacattacagcagcttgattcattcagaggaatgctggggaagttccctcctgaaactgtgagactgaaggtgcctttttcaataaaaccatgggcagcttccgaggatattattggaaaccttttgatggcttggaagttttttgttaccttcggtgatgttcttgggcttccgtcatttacgttggatgaatttgtgcaggctcttcatgattatgattcaaggcttttaggtgaattgcatgtttctctgctgaaatctgttataaaagatattgaggatgttgcccggactccttcagttgctttaggtgtaaatcagagcagttctgctaatcctggaggtggtcacccacaaattgttgaaggggcctatgcttggggcatcaacatactcaactggcagagacacttgaactttcttacatggcctgaaatattgcgccaatttggtttatgtgctggttttgggcctcagttaaagaaaagtgatgctgaaattgtccatcaccgcgatgataacgagggtcgtaatggtgtagatgtcatttccattctgcgaaatggttcagccgctgtgaaggctgctgctttaatgaaagaaagagggtatactaatcgtcgtaggtctcgacaccgtctgacacctggaacagtaaagtttgctgctttccatgtactgtcacttgaagggagcaaaggtctcacaatattggaagttgcagaaaagatccagaaatctggacttagagaccttacaacaagtaagacaccagaggcatctatatctgcggcattgtcgagagacactaagctttttgaaagaacggcaccttcgacatattgtgttaaaactccttacagaaaggacccagatgattctgaggctgtgttggcagcggcacgtgaaaaaatcagggcgtttcagaatgcgcttccggagtgtgaagaagtcgagaaggatgtggatgaggctgagagggatgatgattctgaatgtgatgatgccgatgatgatgctgatggtgatgatgtgaatattgaagacaaggatgccaagtcgccccttgttggagctcaatatggtgcacaaattacagtagttggtgacataaagaaagaatcaaacatcgtgatgaacacatcagtgccaccaagcattcagattaaatctagtgcaagtgtaccatttcatactttagacagtaaagcaagtagttcaactgatccagaggttggagatgatgctaaagacattgagatagacgaaagtaatcaaggggagtcctgggtacaggggctagctgagggtgactactgtgatcttagtgtagacgaacgcctcaatgctttggttgcacttattgccgttgctaacgagggaaattctatccgtgcaattctggaggaacgcctagaagcagcgagtgctttgaaaaaacaattgtgggctgaggcacaacttgataagaggcgtataagggatgactttactagtaagatgcagtatgattcttatgtgagtatgaaggttgatacagatcaagaaaataatgctgctgaaattacccttacaccagtgcatgaccctattaaaaacaataacggaaatgccaatttgatgaacaatggtttgcttgttgataagcagaaccagcttactactggtgatgtatatcatcagcggaatggtgcaagccgagaatcgagtactaacgcagaaagcttgtctgttcagcaatatgcttcatctgagaaaactcgatctcagttgaaatccttcataggtcacaaggcagaacagctttatgtgtacaggtctctaccacttggacaagaccggagacggaaccggtattggcagttctctgcatcttcatcatcctatgaccctggttcgggaagaatcttttttgaatctagagatggatactggagggtcattgatacatcagaggcatttgaagctttggtagcttcccttgatactcgtggcatccgcgagtcacatttgcactcaattttgcaaagtatcgagccaaccttcaaggaagctgttgagaggaaaaggtgtgctaatttagaacacccaactggacggacttcggaaaatggaagtaatgaaagtccaaattgcaacaatgaatttggaagtccatgcagtaccctttctggtgttgcttctgataatcttatggcacattcagatattttcaagatagaggttgggcgcaatgaagctgagaagaattctatctcgaaaagggcttccgtgtttctgaaatggatctggagagagtgctacagtcaccaatctacatacgccatgagatatggaaagaagcggtgtcctgagttgattcactcttgtgattattgctaccagatatacttagctgaagaaaggcactgttcttgccacaaaacattcaaacacattcacaatttcttggaacactcatcacaatgtgaagaaaaacaaagaacagatcccaattggaagatgcaaactgtggacctttctgtacccgtaggattgagattgctaaggctgctcttagctaccattgaggccttagtaccggcagaagctcttctacctttttggacggatgggtatcggaaatcttggggtgcgaagttgtattctgcatcatctgccgaagaagtcttgcagatgcttagtgtgctggaaagtgcaataaagcgagactacttatcatctaactttgaaacgacaactgagttgcttaattcaagcacacaagattttgctactcagaattcggctggaggttctggatctgccactgcacttccatgggttcctgacactactgctgctgtagccttgagattgttagacttggatgcttccatctcatacacccttcatccaaagttgggttcaaataaggagcaagaatctggagatttcatgaaacttccaccgagatatccttctatgaataagggcaaacaagaaatagaacagttcaggcctattggttttgatcaacaggatggaacgttgctacctaacagcaatggtcgtagaggtcggggaaggggaggtagaggaggcagcaggggaggtagatctcgtggtcatggtggtagggttcccagaggtattggcagctcttccaggattcagttcagggatgacaatagtatgctctatgggagagccccacgaaagaatgcacgtggtggccgcggccgtggacgtggacgtggacgtggacttcgaactgttagacctcggcaaccatccgagctcagtgccagatcaattccaaaggcaaacctattgggcagttttagcatgttaagtaagacaaatcacactggcactacgcattctcccgagagctcaggtgcagaagagtgggcctttgagaggagggaatatgtgaaggatgatgagaacaatttggtctctcaatccgatgagtctgaggaaaatgtcgaacctatgaatgaggaatatggtgagcatatttcaggctatccaagagacaattccgactccagacccgtacagatgatgggtgatgggagcgacgataatgatgaggatgctgaaggagatgagggtgaggaagatggagaggactatgaagctgaagatcctggtgatgaggatgatgacgttgagatggatggggatgatgatgtcgaggtggatgaggatgatgacattgagatggatggggatgatgacattgaagatgatgatgacgacgacggtggagatggagcagccaacggagatgaggatggaggtggtacatcatcatattcttcagagtatagtgaatgatgagtgattgaagttgtgcaggcttgtggtaaatgatgtaacagaggctttggtgggctcaccaacgctaatgctgacttgaaaaactatttaggaggttgccagttctaaactgtcttgtgtggcttgttattagatagaagccactcaacattagaagatcggccttgtgtgtatacatacataccaattatcaaaagttgaaaatgagggtcgatcagctgtctgttttatgttcagctacttttttcattgttatatattgggagcgttctctttaagacggttgacatatttctaaactcactctcaattttgattttgtagcaagcttgaaaaaaattgctt

SEQ ID NO: 72601 - DNA, 5045 bp, Zea Mays
cggaagagcaccaaacgccagcagcagcagcagcgaggcaaaataataaaaagtcggaggcatcaaatccaaaagtccctgagcaaccgaggcagccctttcgatcatatgagaccaagatgttttctggtcccaaaaccatgaaggcagtacatgaataccagtttcttcctgagcagccaagtgatacatatgagagggcaagccagtcacacttctatgattcttcagcagaagcgtcaaacttgagggtagctccgctgtctacaggatcacgctttctccatggagttgagcaggcacctagctatacatttcacagtcaatcatctggttctagccatttgactcaacgtggcagtggcaggtcacctattgcatcggcattgacagatcatgagggggctttgtcaaatattaatgctagcacaactccaatccacggccaacttggcatccctcaagttgccggattcgaaagccccctggcatcccctgaaagattgggttatcatgatgaagatacatatcacatggacagaaagcgcaagcataatgaggaagctaagattgctagggaggttgaggctcatgaaaagagaatcagaaaggagcttgagaagcaagatctgctgaacagaaagagagaagaacaaatgcggagagaaatggagagacatgatcgtgagagacgtaaggaagaggagaggttgatgcgtgaaaggcagagggaagaagagaaattccaaagggaacaaagacgcgaacacaagcgcatggagaagtttatgcagaaacaatctatacgagctgaaaaactgagacaaagagaggagcttcgacgagagaaagaagctgcgaggcagaaggctgctaatgagagggctacagctcgtagaattgcgcgagagagtatggaactgatggaagatgagcgcttggaactattagagttggcctctcgtagtaaagggctgccctcaatggtttctcttgatagtgacacattacagcagcttgattcattcagaggaatgctggggaagttccctcctgaaactgtgagactgaaggtgcctttttcaataaaaccatgggcagcttccgaggatattattggaaaccttttgatggcttggaagttttttgttaccttcggtgatgttcttgggcttccgtcatttacgttggatgaatttgtgcaggctcttcatgattatgattcaaggcttttaggtgaattgcatgtttctctgctgaaatctgttataaaagatattgaggatgttgcccggactccttcagttgctttaggtgtaaatcagagcagttctgctaatcctggaggtggtcacccacaaattgttgaaggggcctatgcttggggcatcaacatactcaactggcagagacacttgaactttcttacatggcctgaaatattgcgccaatttggtttatgtgctggttttgggcctcagttaaagaaaagtgatgctgaaattgtccatcaccgcgatgataacgagggtcgtaatggtgtagatgtcatttccattctgcgaaatggttcagccgctgtgaaggctgctgctttaatgaaagaaagagggtatactaatcgtcgtaggtctcgacaccgtctgacacctggaacagtaaagtttgctgctttccatgtactgtcacttgaagggagcaaaggtctcacaatattggaagttgcagaaaagatccagaaatctggacttagagaccttacaacaagtaagacaccagaggcatctatatctgcggcattgtcgagagacactaagctttttgaaagaacggcaccttcgacatattgtgttaaaactccttacagaaaggacccagatgattctgaggctgtgttggcagcggcacgtgaaaaaatcagggcgtttcagaatgcgcttccggagtgtgaagaagtcgagaaggatgtggatgaggctgagagggatgatgattctgaatgtgatgatgccgatgatgatgctgatggtgatgatgtgaatattgaagacaaggatgccaagtcgccccttgttggagctcaatatggtgcacaaattacagtagttggtgacataaagaaagaatcaaacatcgtgatgaacacatcagtgccaccaagcattcagattaaatctagtgcaagtgtaccatttcatactttagacagtaaagcaagtagttcaactgatccagaggttggagatgatgctaaagacattgagatagacgaaagtaatcaaggggagtcctgggtacaggggctagctgagggtgactactgtgatcttagtgtagacgaacgcctcaatgctttggttgcacttattgccgttgctaacgagggaaattctatccgtgcaattctggaggaacgcctagaagcagcgagtgctttgaaaaaacaattgtgggctgaggcacaacttgataagaggcgtataagggatgactttactagtaagatgcagtatgattcttataaccagcttactactggtgatgtatatcatcagcggaatggtgcaagccgagaatcgagtactaacgcagaaagcttgtctgttcagcaatatgcttcatctgagaaaactcgatctcagttgaaatccttcataggtcacaaggcagaacagctttatgtgtacaggtctctaccacttggacaagaccggagacggaaccggtattggcagttctctgcatcttcatcatcctatgaccctggttcgggaagaatcttttttgaatctagagatggatactggagggtcattgatacatcagaggcatttgaagctttggtagcttcccttgatactcgtggcatccgcgagtcacatttgcactcaattttgcaaagtatcgagccaaccttcaaggaagctgttgagaggaaaaggtgtgctaatttagaacacccaactggacggacttcggaaaatggaagtaatgaaagtccaaattgcaacaatgaatttggaagtccatgcagtaccctttctggtgttgcttctgataatcttatggcacattcagatattttcaagatagaggttgggcgcaatgaagctgagaagaattctatctcgaaaagggcttccgtgtttctgaaatggatctggagagagtgctacagtcaccaatctacatacgccatgagatatggaaagaagcggtgtcctgagttgattcactcttgtgattattgctaccagatatacttagctgaagaaaggcactgttcttgccacaaaacattcaaacacattcacaatttcttggaacactcatcacaatgtgaagaaaaacaaagaacagatcccaattggaagatgcaaactgtggacctttctgtacccgtaggattgagattgctaaggctgctcttagctaccattgaggccttagtaccggcagaagctcttctacctttttggacggatgggtatcggaaatcttggggtgcgaagttgtattctgcatcatctgccgaagaagtcttgcagatgcttagtgtgctggaaagtgcaataaagcgagactacttatcatctaactttgaaacgacaactgagttgcttaattcaagcacacaagattttgctactcagaattcggctggaggttctggatctgccactgcacttccatgggttcctgacactactgctgctgtagccttgagattgttagacttggatgcttccatctcatacacccttcatccaaagttgggttcaaataaggagcaagaatctggagatttcatgaaacttccaccgagatatccttctatgaataagggcaaacaagaaatagaacagttcaggcctattggttttgatcaacaggatggaacgttgctacctaacagcaatggtcgtagaggtcggggaaggggaggtagaggaggcagcaggggaggtagatctcgtggtcatggtggtagggttcccagaggtattggcagctcttccaggattcagttcagggatgacaatagtatgctctatgggagagccccacgaaagaatgcacgtggtggccgcggccgtggacgtggacgtggacgtggacttcgaactgttagacctcggcaaccatccgagctcagtgccagatcaattccaaaggcaaacctattgggcagttttagcatgttaagtaagacaaatcacactggcactacgcattctcccgagagctcaggtgcagaagagtgggcctttgagaggagggaatatgtgaaggatgatgagaacaatttggtctctcaatccgatgagtctgaggaaaatgtcgaacctatgaatgaggaatatggtgagcatatttcaggctatccaagagacaattccgactccagacccgtacagatgatgggtgatgggagcgacgataatgatgaggatgctgaaggagatgagggtgaggaagatggagaggactatgaagctgaagatcctggtgatgaggatgatgacgttgagatggatggggatgatgatgtcgaggtggatgaggatgatgacattgagatggatggggatgatgacattgaagatgatgatgacgacgacggtggagatggagcagccaacggagatgaggatggaggtggtacatcatcatattcttcagagtatagtgaatgatgagtgattgaagttgtgcaggcttgtggtaaatgatgtaacagaggctttggtgggctcaccaacgctaatgctgacttgaaaaactatttaggaggttgccagttctaaactgtcttgtgtggcttgttattagatagaagccactcaacattagaagatcggccttgtgtgtatacatacataccaattatcaaaagttgaaaatgagggtcgatcagctgtctgttttatgttcagctacttttttcattgttatatattgggagcgttctctttaagacggttgacatatttctaaactcactctcaattttgattttgtagcaagcttgaaaaaaattgctt

SEQ ID NO: 72602 - DNA, 5893 bp, Zea Mays
ttttattagcatggaagcgaaatccaaacccctgaccaattcgggccgagcagcaggcggaggaggagttgcatccgtggcctcccgtgttgctcctcctcgcgcccgcgtccctattacttctccgcgtccgtgctggggcgcggcgcgcccaccgatcctgttctacctcgcgtctgcgctgcgacgttacctgctgctgtcgcccgtcggtggtggaattcgtcgcgcggatcgagccgcgggctcgattcgggcttggcgcctctgtatatatgtcggaattcgccgtagcgtgtgattaggttttgttgttcttctgtgtcggcctggtcttcgcgtgttgtgttttgttgtctggcggaggcgaatctagggtaacggtcagtcgggaatggagtcctccgacgacgggggctccgggccggcggcagggagtcccggccctccgtcggcccccgcagccgttggcggtgcgagtagcgctcctggcgcgtctggatccggcgggaagccgccggtgaagcgcgtcatgaagacgccctaccagctggaggtcctcgagaggacgtacgcagaggactcgtatcccaacgagacgaagcgggcggagctgtcggtgcagttgaacctcacagacaggcagcttcagatgtggttctgccaccgccggctcaaggaccggaaaccgccggccaagaggcagctaagggacgaggaggttagcgtcccagtcatagggccgccgccacctgtgcttccgcctccattgcctcccagcgagatgatggtggggactgtcggaacctatggtgagcagctgctgccctattccaggagagggtctggccggttatcggctgcacctaggttatctgtgccggagattgggaggaggtactatgaaccgccacaagtcatgctgcctcatatggcaccagtgcaccttatgcaagcagagcaccgggtgatcgattctgtggaagcacttataggggaacctttgagggacgatggaccagtgcttggtattgaatttgatccacttcctcctggtgcatttggagcacctatcgtccctgagcaaccgaggcagccctttcgatcatatgagaccaagatgttttctggtcccaaaaccatgaaggcagtacatgaataccagtttcttcctgagcagccaagtgatacatatgagagggcaagccagtcacacttctatgattcttcagcagaagcgtcaaacttgagggtagctccgctgtctacaggatcacgctttctccatggagttgagcaggcacctagctatacatttcacagtcaatcatctggttctagccatttgactcaacgtggcagtggcaggtcacctattgcatcggcattgacagatcatgagggggctttgtcaaatattaatgctagcacaactccaatccacggccaacttggcatccctcaagttgccggattcgaaagccccctggcatcccctgaaagattgggttatcatgatgaagatacatatcacatggacagaaagcgcaagcataatgaggaagctaagattgctagggaggttgaggctcatgaaaagagaatcagaaaggagcttgagaagcaagatctgctgaacagaaagagagaagaacaaatgcggagagaaatggagagacatgatcgtgagagacgtaaggaagaggagaggttgatgcgtgaaaggcagagggaagaagagaaattccaaagggaacaaagacgcgaacacaagcgcatggagaagtttatgcagaaacaatctatacgagctgaaaaactgagacaaagagaggagcttcgacgagagaaagaagctgcgaggcagaaggctgctaatgagagggctacagctcgtagaattgcgcgagagagtatggaactgatggaagatgagcgcttggaactattagagttggcctctcgtagtaaagggctgccctcaatggtttctcttgatagtgacacattacagcagcttgattcattcagaggaatgctggggaagttccctcctgaaactgtgagactgaaggtgcctttttcaataaaaccatgggcagcttccgaggatattattggaaaccttttgatggcttggaagttttttgttaccttcggtgatgttcttgggcttccgtcatttacgttggatgaatttgtgcaggctcttcatgattatgattcaaggcttttaggtgaattgcatgtttctctgctgaaatctgttataaaagatattgaggatgttgcccggactccttcagttgctttaggtgtaaatcagagcagttctgctaatcctggaggtggtcacccacaaattgttgaaggggcctatgcttggggcatcaacatactcaactggcagagacacttgaactttcttacatggcctgaaatattgcgccaatttggtttatgtgctggttttgggcctcagttaaagaaaagtgatgctgaaattgtccatcaccgcgatgataacgagggtcgtaatggtgtagatgtcatttccattctgcgaaatggttcagccgctgtgaaggctgctgctttaatgaaagaaagagggtatactaatcgtcgtaggtctcgacaccgtctgacacctggaacagtaaagtttgctgctttccatgtactgtcacttgaagggagcaaaggtctcacaatattggaagttgcagaaaagatccagaaatctggacttagagaccttacaacaagtaagacaccagaggcatctatatctgcggcattgtcgagagacactaagctttttgaaagaacggcaccttcgacatattgtgttaaaactccttacagaaaggacccagatgattctgaggctgtgttggcagcggcacgtgaaaaaatcagggcgtttcagaatgcgcttccggagtgtgaagaagtcgagaaggatgtggatgaggctgagagggatgatgattctgaatgtgatgatgccgatgatgatgctgatggtgatgatgtgaatattgaagacaaggatgccaagtcgccccttgttggagctcaatatggtgcacaaattacagtagttggtgacataaagaaagaatcaaacatcgtgatgaacacatcagtgccaccaagcattcagattaaatctagtgcaagtgtaccatttcatactttagacagtaaagcaagtagttcaactgatccagaggttggagatgatgctaaagacattgagatagacgaaagtaatcaaggggagtcctgggtacaggggctagctgagggtgactactgtgatcttagtgtagacgaacgcctcaatgctttggttgcacttattgccgttgctaacgagggaaattctatccgtgcaattctggaggaacgcctagaagcagcgagtgctttgaaaaaacaattgtgggctgaggcacaacttgataagaggcgtataagggatgactttactagtaagatgcagtatgattcttatctttatgtgtacaggtctctaccacttggacaagaccggagacggaaccggtattggcagttctctgcatcttcatcatcctatgaccctggttcgggaagaatcttttttgaatctagagatggatactggagggtcattgatacatcagaggcatttgaagctttggtagcttcccttgatactcgtggcatccgcgagtcacatttgcactcaattttgcaaagtatcgagccaaccttcaaggaagctgttgagaggaaaaggtgtgctaatttagaacacccaactggacggacttcggaaaatggaagtaatgaaagtccaaattgcaacaatgaatttggaagtccatgcagtaccctttctggtgttgcttctgataatcttatggcacattcagatattttcaagatagaggttgggcgcaatgaagctgagaagaattctatctcgaaaagggcttccgtgtttctgaaatggatctggagagagtgctacagtcaccaatctacatacgccatgagatatggaaagaagcggtgtcctgagttgattcactcttgtgattattgctaccagatatacttagctgaagaaaggcactgttcttgccacaaaacattcaaacacattcacaatttcttggaacactcatcacaatgtgaagaaaaacaaagaacagatcccaattggaagatgcaaactgtggacctttctgtacccgtaggattgagattgctaaggctgctcttagctaccattgaggccttagtaccggcagaagctcttctacctttttggacggatgggtatcggaaatcttggggtgcgaagttgtattctgcatcatctgccgaagaagtcttgcagatgcttagtgtgctggaaagtgcaataaagcgagactacttatcatctaactttgaaacgacaactgagttgcttaattcaagcacacaagattttgctactcagaattcggctggaggttctggatctgccactgcacttccatgggttcctgacactactgctgctgtagccttgagattgttagacttggatgcttccatctcatacacccttcatccaaagttgggttcaaataaggagcaagaatctggagatttcatgaaacttccaccgagatatccttctatgaataagggcaaacaagaaatagaacagttcaggcctattggttttgatcaacaggatggaacgttgctacctaacagcaatggtcgtagaggtcggggaaggggaggtagaggaggcagcaggggaggtagatctcgtggtcatggtggtagggttcccagaggtattggcagctcttccaggattcagttcagggatgacaatagtatgctctatgggagagccccacgaaagaatgcacgtggtggccgcggccgtggacgtggacgtggacgtggacttcgaactgttagacctcggcaaccatccgagctcagtgccagatcaattccaaaggcaaacctattgggcagttttagcatgttaagtaagacaaatcacactggcactacgcattctcccgagagctcaggtgcagaagagtgggcctttgagaggagggaatatgtgaaggatgatgagaacaatttggtctctcaatccgatgagtctgaggaaaatgtcgaacctatgaatgaggaatatggtgagcatatttcaggctatccaagagacaattccgactccagacccgtacagatgatgggtgatgggagcgacgataatgatgaggatgctgaaggagatgagggtgaggaagatggagaggactatgaagctgaagatcctggtgatgaggatgatgacgttgagatggatggggatgatgatgtcgaggtggatgaggatgatgacattgagatggatggggatgatgacattgaagatgatgatgacgacgacggtggagatggagcagccaacggagatgaggatggaggtggtacatcatcatattcttcagagtatagtgaatgatgagtgattgaagttgtgcaggcttgtggtaaatgatgtaacagaggctttggtgggctcaccaacgctaatgctgacttgaaaaactatttaggaggttgccagttctaaactgtcttgtgtggcttgttattagatagaagccactcaacattagaagatcggccttgtgtgtatacatacataccaattatcaaaagttgaaaatgagggtcgatcagctgtctgttttatgttcagctacttttttcattgttatatattgggagcgttctctttaagacggttgacatatttctaaactcactctcaattttgattttgtagcaagcttgaaaaaaattgctt

SEQ ID NO: 72603 - DNA, 5783 bp, Zea Mays
gcgaaatccaaacccctgaccaattcgggccgagcagcaggcggaggaggagttgcatccgtggcctcccgtgttgctcctcctcgcgcccgcgtccctattacttctccgcgtccgtgctggggcgcggcgcgcccaccgatcctgttctacctcgcgtctgcgctgcgacgttacctgctgctgtcgcccgtcggtggtggaattcgtcgcgcggatcgagccgcgggctcgattcgggcttggcgcctctgtatatatgtcggaattcgccgtagcgtgtgattaggttttgttgttcttctgtgtcggcctggtcttcgcgtgttgtgttttgttgtctggcggaggcgaatctagggtaacggtcagtcgggaatggagtcctccgacgacgggggctccgggccggcggcagggagtcccggccctccgtcggcccccgcagccgttggcggtgcgagtagcgctcctggcgcgtctggatccggcgggaagccgccggtgaagcgcgtcatgaagacgccctaccagctggaggtcctcgagaggacgtacgcagaggactcgtatcccaacgagacgaagcgggcggagctgtcggtgcagttgaacctcacagacaggcagcttcagatgtggttctgccaccgccggctcaaggaccggaaaccgccggccaagaggcagctaagggacgaggaggttagcgtcccagtcatagggccgccgccacctgtgcttccgcctccattgcctcccagcgagatgatggtggggactgtcggaacctatggtgagcagctgctgccctattccaggagagggtctggccggttatcggctgcacctaggttatctgtgccggagattgggaggaggtactatgaaccgccacaagtcatgctgcctcatatggcaccagtgcaccttatgcaagcagagcaccgggtgatcgattctgtggaagcacttataggggaacctttgagggacgatggaccagtgcttggtattgaatttgatccacttcctcctggtgcatttggagcacctatcgtccctgagcaaccgaggcagccctttcgatcatatgagaccaagatgttttctggtcccaaaaccatgaaggcagtacatgaataccagtttcttcctgagcagccaagtgatacatatgagagggcaagccagtcacacttctatgattcttcagcagaagcgtcaaacttgaggtggcaggtcacctattgcatcggcattgacagatcatgagggggctttgtcaaatattaatgctagcacaactccaatccacggccaacttggcatccctcaagttgccggattcgaaagccccctggcatcccctgaaagattgggttatcatgatgaagatacatatcacatggacagaaagcgcaagcataatgaggaagctaagattgctagggaggttgaggctcatgaaaagagaatcagaaaggagcttgagaagcaagatctgctgaacagaaagagagaagaacaaatgcggagagaaatggagagacatgatcgtgagagacgtaaggaagaggagaggttgatgcgtgaaaggcagagggaagaagagaaattccaaagggaacaaagacgcgaacacaagcgcatggagaagtttatgcagaaacaatctatacgagctgaaaaactgagacaaagagaggagcttcgacgagagaaagaagctgcgaggcagaaggctgctaatgagagggctacagctcgtagaattgcgcgagagagtatggaactgatggaagatgagcgcttggaactattagagttggcctctcgtagtaaagggctgccctcaatggtttctcttgatagtgacacattacagcagcttgattcattcagaggaatgctggggaagttccctcctgaaactgtgagactgaaggtgcctttttcaataaaaccatgggcagcttccgaggatattattggaaaccttttgatggcttggaagttttttgttaccttcggtgatgttcttgggcttccgtcatttacgttggatgaatttgtgcaggctcttcatgattatgattcaaggcttttaggtgaattgcatgtttctctgctgaaatctgttataaaagatattgaggatgttgcccggactccttcagttgctttaggtgtaaatcagagcagttctgctaatcctggaggtggtcacccacaaattgttgaaggggcctatgcttggggcatcaacatactcaactggcagagacacttgaactttcttacatggcctgaaatattgcgccaatttggtttatgtgctggttttgggcctcagttaaagaaaagtgatgctgaaattgtccatcaccgcgatgataacgagggtcgtaatggtgtagatgtcatttccattctgcgaaatggttcagccgctgtgaaggctgctgctttaatgaaagaaagagggtatactaatcgtcgtaggtctcgacaccgtctgacacctggaacagtaaagtttgctgctttccatgtactgtcacttgaagggagcaaaggtctcacaatattggaagttgcagaaaagatccagaaatctggacttagagaccttacaacaagtaagacaccagaggcatctatatctgcggcattgtcgagagacactaagctttttgaaagaacggcaccttcgacatattgtgttaaaactccttacagaaaggacccagatgattctgaggctgtgttggcagcggcacgtgaaaaaatcagggcgtttcagaatgcgcttccggagtgtgaagaagtcgagaaggatgtggatgaggctgagagggatgatgattctgaatgtgatgatgccgatgatgatgctgatggtgatgatgtgaatattgaagacaaggatgccaagtcgccccttgttggagctcaatatggtgcacaaattacagtagttggtgacataaagaaagaatcaaacatcgtgatgaacacatcagtgccaccaagcattcagattaaatctagtgcaagtgtaccatttcatactttagacagtaaagcaagtagttcaactgatccagaggttggagatgatgctaaagacattgagatagacgaaagtaatcaaggggagtcctgggtacaggggctagctgagggtgactactgtgatcttagtgtagacgaacgcctcaatgctttggttgcacttattgccgttgctaacgagggaaattctatccgtgcaattctggaggaacgcctagaagcagcgagtgctttgaaaaaacaattgtgggctgaggcacaacttgataagaggcgtataagggatgactttactagtaagatgcagtatgattcttataaccagcttactactggtgatgtatatcatcagcggaatggtgcaagccgagaatcgagtactaacgcagaaagcttgtctgttcagcaatatgcttcatctgagaaaactcgatctcagttgaaatccttcataggtcacaaggcagaacagctttatgtgtacaggtctctaccacttggacaagaccggagacggaaccggtattggcagttctctgcatcttcatcatcctatgaccctggttcgggaagaatcttttttgaatctagagatggatactggagggtcattgatacatcagaggcatttgaagctttggtagcttcccttgatactcgtggcatccgcgagtcacatttgcactcaattttgcaaagtatcgagccaaccttcaaggaagctgttgagaggaaaagatattttcaagatagaggttgggcgcaatgaagctgagaagaattctatctcgaaaagggcttccgtgtttctgaaatggatctggagagagtgctacagtcaccaatctacatacgccatgagatatggaaagaagcggtgtcctgagttgattcactcttgtgattattgctaccagatatacttagctgaagaaaggcactgttcttgccacaaaacattcaaacacattcacaatttcttggaacactcatcacaatgtgaagaaaaacaaagaacagatcccaattggaagatgcaaactgtggacctttctgtacccgtaggattgagattgctaaggctgctcttagctaccattgaggccttagtaccggcagaagctcttctacctttttggacggatgggtatcggaaatcttggggtgcgaagttgtattctgcatcatctgccgaagaagtcttgcagatgcttagtgtgctggaaagtgcaataaagcgagactacttatcatctaactttgaaacgacaactgagttgcttaattcaagcacacaagattttgctactcagaattcggctggaggttctggatctgccactgcacttccatgggttcctgacactactgctgctgtagccttgagattgttagacttggatgcttccatctcatacacccttcatccaaagttgggttcaaataaggagcaagaatctggagatttcatgaaacttccaccgagatatccttctatgaataagggcaaacaagaaatagaacagttcaggcctattggttttgatcaacaggatggaacgttgctacctaacagcaatggtcgtagaggtcggggaaggggaggtagaggaggcagcaggggaggtagatctcgtggtcatggtggtagggttcccagaggtattggcagctcttccaggattcagttcagggatgacaatagtatgctctatgggagagccccacgaaagaatgcacgtggtggccgcggccgtggacgtggacgtggacgtggacttcgaactgttagacctcggcaaccatccgagctcagtgccagatcaattccaaaggcaaacctattgggcagttttagcatgttaagtaagacaaatcacactggcactacgcattctcccgagagctcaggtgcagaagagtgggcctttgagaggagggaatatgtgaaggatgatgagaacaatttggtctctcaatccgatgagtctgaggaaaatgtcgaacctatgaatgaggaatatggtgagcatatttcaggctatccaagagacaattccgactccagacccgtacagatgatgggtgatgggagcgacgataatgatgaggatgctgaaggagatgagggtgaggaagatggagaggactatgaagctgaagatcctggtgatgaggatgatgacgttgagatggatggggatgatgatgtcgaggtggatgaggatgatgacattgagatggatggggatgatgacattgaagatgatgatgacgacgacggtggagatggagcagccaacggagatgaggatggaggtggtacatcatcatattcttcagagtatagtgaatgatgagtgattgaagttgtgcaggcttgtggtaaatgatgtaacagaggctttggtgggctcaccaacgctaatgctgacttgaaaaactatttaggaggttgccagttctaaactgtcttgtgtggcttgttattagatagaagccactcaacattagaagatcggccttgtgtgtatacatacataccaattatcaaaagttgaaaatgagggtcgatcagctgtctgttttatgttcagctacttttttcattgttatatattgggagcgttctctttaagacggttgacatatttctaaactcactctcaattttgattttgtagcaagcttgaaaaaaattgctt

SEQ ID NO: 72604 - DNA, 5899 bp, Zea Mays
gcgaaatccaaacccctgaccaattcgggccgagcagcaggcggaggaggagttgcatccgtggcctcccgtgttgctcctcctcgcgcccgcgtccctattacttctccgcgtccgtgctggggcgcggcgcgcccaccgatcctgttctacctcgcgtctgcgctgcgacgttacctgctgctgtcgcccgtcggtggtggaattcgtcgcgcggatcgagccgcgggctcgattcgggcttggcgcctctgtatatatgtcggaattcgccgtagcgtgtgattaggttttgttgttcttctgtgtcggcctggtcttcgcgtgttgtgttttgttgtctggcggaggcgaatctagggtaacggtcagtcgggaatggagtcctccgacgacgggggctccgggccggcggcagggagtcccggccctccgtcggcccccgcagccgttggcggtgcgagtagcgctcctggcgcgtctggatccggcgggaagccgccggtgaagcgcgtcatgaagacgccctaccagctggaggtcctcgagaggacgtacgcagaggactcgtatcccaacgagacgaagcgggcggagctgtcggtgcagttgaacctcacagacaggcagcttcagatgtggttctgccaccgccggctcaaggaccggaaaccgccggccaagaggcagctaagggacgaggaggttagcgtcccagtcatagggccgccgccacctgtgcttccgcctccattgcctcccagcgagatgatggtggggactgtcggaacctatggtgagcagctgctgccctattccaggagagggtctggccggttatcggctgcacctaggttatctgtgccggagattgggaggaggtactatgaaccgccacaagtcatgctgcctcatatggcaccagtgcaccttatgcaagcagagcaccgggtgatcgattctgtggaagcacttataggggaacctttgagggacgatggaccagtgcttggtattgaatttgatccacttcctcctggtgcatttggagcacctatcgtccctgagcaaccgaggcagccctttcgatcatatgagaccaagatgttttctggtcccaaaaccatgaaggcagtacatgaataccagtttcttcctgagcagccaagtgatacatatgagagggcaagccagtcacacttctatgattcttcagcagaagcgtcaaacttgaggtggcaggtcacctattgcatcggcattgacagatcatgagggggctttgtcaaatattaatgctagcacaactccaatccacggccaacttggcatccctcaagttgccggattcgaaagccccctggcatcccctgaaagattgggttatcatgatgaagatacatatcacatggacagaaagcgcaagcataatgaggaagctaagattgctagggaggttgaggctcatgaaaagagaatcagaaaggagcttgagaagcaagatctgctgaacagaaagagagaagaacaaatgcggagagaaatggagagacatgatcgtgagagacgtaaggaagaggagaggttgatgcgtgaaaggcagagggaagaagagaaattccaaagggaacaaagacgcgaacacaagcgcatggagaagtttatgcagaaacaatctatacgagctgaaaaactgagacaaagagaggagcttcgacgagagaaagaagctgcgaggcagaaggctgctaatgagagggctacagctcgtagaattgcgcgagagagtatggaactgatggaagatgagcgcttggaactattagagttggcctctcgtagtaaagggctgccctcaatggtttctcttgatagtgacacattacagcagcttgattcattcagaggaatgctggggaagttccctcctgaaactgtgagactgaaggtgcctttttcaataaaaccatgggcagcttccgaggatattattggaaaccttttgatggcttggaagttttttgttaccttcggtgatgttcttgggcttccgtcatttacgttggatgaatttgtgcaggctcttcatgattatgattcaaggcttttaggtgaattgcatgtttctctgctgaaatctgttataaaagatattgaggatgttgcccggactccttcagttgctttaggtgtaaatcagagcagttctgctaatcctggaggtggtcacccacaaattgttgaaggggcctatgcttggggcatcaacatactcaactggcagagacacttgaactttcttacatggcctgaaatattgcgccaatttggtttatgtgctggttttgggcctcagttaaagaaaagtgatgctgaaattgtccatcaccgcgatgataacgagggtcgtaatggtgtagatgtcatttccattctgcgaaatggttcagccgctgtgaaggctgctgctttaatgaaagaaagagggtatactaatcgtcgtaggtctcgacaccgtctgacacctggaacagtaaagtttgctgctttccatgtactgtcacttgaagggagcaaaggtctcacaatattggaagttgcagaaaagatccagaaatctggacttagagaccttacaacaagtaagacaccagaggcatctatatctgcggcattgtcgagagacactaagctttttgaaagaacggcaccttcgacatattgtgttaaaactccttacagaaaggacccagatgattctgaggctgtgttggcagcggcacgtgaaaaaatcagggcgtttcagaatgcgcttccggagtgtgaagaagtcgagaaggatgtggatgaggctgagagggatgatgattctgaatgtgatgatgccgatgatgatgctgatggtgatgatgtgaatattgaagacaaggatgccaagtcgccccttgttggagctcaatatggtgcacaaattacagtagttggtgacataaagaaagaatcaaacatcgtgatgaacacatcagtgccaccaagcattcagattaaatctagtgcaagtgtaccatttcatactttagacagtaaagcaagtagttcaactgatccagaggttggagatgatgctaaagacattgagatagacgaaagtaatcaaggggagtcctgggtacaggggctagctgagggtgactactgtgatcttagtgtagacgaacgcctcaatgctttggttgcacttattgccgttgctaacgagggaaattctatccgtgcaattctggagcgagtgctttgaaaaaacaattgtgggctgaggcacaacttgataagaggcgtataagggatgactttactagtaagatgcagtatgattcttatgtgagtatgaaggttgatacagatcaagaaaataatgctgctgaaattacccttacaccagtgcatgaccctattaaaaacaataacggaaatgccaatttgatgaacaatggtttgcttgttgataagcagaaccagcttactactggtgatgtatatcatcagcggaatggtgcaagccgagaatcgagtactaacgcagaaagcttgtctgttcagcaatatgcttcatctgagaaaactcgatctcagttgaaatccttcataggtcacaaggcagaacagctttatgtgtacaggtctctaccacttggacaagaccggagacggaaccggtattggcagttctctgcatcttcatcatcctatgaccctggttcgggaagaatcttttttgaatctagagatggatactggagggtcattgatacatcagaggcatttgaagctttggtagcttcccttgatactcgtggcatccgcgagtcacatttgcactcaattttgcaaagtatcgagccaaccttcaaggaagctgttgagaggaaaagatattttcaagatagaggttgggcgcaatgaagctgagaagaattctatctcgaaaagggcttccgtgtttctgaaatggatctggagagagtgctacagtcaccaatctacatacgccatgagatatggaaagaagcggtgtcctgagttgattcactcttgtgattattgctaccagatatacttagctgaagaaaggcactgttcttgccacaaaacattcaaacacattcacaatttcttggaacactcatcacaatgtgaagaaaaacaaagaacagatcccaattggaagatgcaaactgtggacctttctgtacccgtaggattgagattgctaaggctgctcttagctaccattgaggccttagtaccggcagaagctcttctacctttttggacggatgggtatcggaaatcttggggtgcgaagttgtattctgcatcatctgccgaagaagtcttgcagatgcttagtgtgctggaaagtgcaataaagcgagactacttatcatctaactttgaaacgacaactgagttgcttaattcaagcacacaagattttgctactcagaattcggctggaggttctggatctgccactgcacttccatgggttcctgacactactgctgctgtagccttgagattgttagacttggatgcttccatctcatacacccttcatccaaagttgggttcaaataaggagcaagaatctggagatttcatgaaacttccaccgagatatccttctatgaataagggcaaacaagaaatagaacagttcaggcctattggttttgatcaacaggatggaacgttgctacctaacagcaatggtcgtagaggtcggggaaggggaggtagaggaggcagcaggggaggtagatctcgtggtcatggtggtagggttcccagaggtattggcagctcttccaggattcagttcagggatgacaatagtatgctctatgggagagccccacgaaagaatgcacgtggtggccgcggccgtggacgtggacgtggacgtggacttcgaactgttagacctcggcaaccatccgagctcagtgccagatcaattccaaaggcaaacctattgggcagttttagcatgttaagtaagacaaatcacactggcactacgcattctcccgagagctcaggtgcagaagagtgggcctttgagaggagggaatatgtgaaggatgatgagaacaatttggtctctcaatccgatgagtctgaggaaaatgtcgaacctatgaatgaggaatatggtgagcatatttcaggctatccaagagacaattccgactccagacccgtacagatgatgggtgatgggagcgacgataatgatgaggatgctgaaggagatgagggtgaggaagatggagaggactatgaagctgaagatcctggtgatgaggatgatgacgttgagatggatggggatgatgatgtcgaggtggatgaggatgatgacattgagatggatggggatgatgacattgaagatgatgatgacgacgacggtggagatggagcagccaacggagatgaggatggaggtggtacatcatcatattcttcagagtatagtgaatgatgagtgattgaagttgtgcaggcttgtggtaaatgatgtaacagaggctttggtgggctcaccaacgctaatgctgacttgaaaaactatttaggaggttgccagttctaaactgtcttgtgtggcttgttattagatagaagccactcaacattagaagatcggccttgtgtgtatacatacataccaattatcaaaagttgaaaatgagggtcgatcagctgtctgttttatgttcagctacttttttcattgttatatattgggagcgttctctttaagacggttgacatatttctaaactcactctcaattttgattttgtagcaagcttgaaaaaaattgctt

SEQ ID NO: 72605 - DNA, 6076 bp, Zea Mays
cgaaatccaaacccctgaccaattcgggccgagcagcaggcggaggaggagttgcatccgtggcctcccgtgttgctcctcctcgcgcccgcgtccctattacttctccgcgtccgtgctggggcgcggcgcgcccaccgatcctgttctacctcgcgtctgcgctgcgacgttacctgctgctgtcgcccgtcggtggtggaattcgtcgcgcggatcgagccgcgggctcgattcgggcttggcgcctctgtatatatgtcggaattcgccgtagcgtgtgattaggttttgttgttcttctgtgtcggcctggtcttcgcgtgttgtgttttgttgtctggcggaggcgaatctagggtaacggtcagtcgggaatggagtcctccgacgacgggggctccgggccggcggcagggagtcccggccctccgtcggcccccgcagccgttggcggtgcgagtagcgctcctggcgcgtctggatccggcgggaagccgccggtgaagcgcgtcatgaagacgccctaccagctggaggtcctcgagaggacgtacgcagaggactcgtatcccaacgagacgaagcgggcggagctgtcggtgcagttgaacctcacagacaggcagcttcagatgtggttctgccaccgccggctcaaggaccggaaaccgccggccaagaggcagctaagggacgaggaggttagcgtcccagtcatagggccgccgccacctgtgcttccgcctccattgcctcccagcgagatgatggtggggactgtcggaacctatggtgagcagctgctgccctattccaggagagggtctggccggttatcggctgcacctaggttatctgtgccggagattgggaggaggtactatgaaccgccacaagtcatgctgcctcatatggcaccagtgcaccttatgcaagcagagcaccgggtgatcgattctgtggaagcacttataggggaacctttgagggacgatggaccagtgcttggtattgaatttgatccacttcctcctggtgcatttggagcacctatcgtccctgagcaaccgaggcagccctttcgatcatatgagaccaagatgttttctggtcccaaaaccatgaaggcagtacatgaataccagtttcttcctgagcagccaagtgatacatatgagagggcaagccagtcacacttctatgattcttcagcagaagcgtcaaacttgagggtagctccgctgtctacaggatcacgctttctccatggagttgagcaggcacctagctatacatttcacagtcaatcatctggttctagccatttgactcaacgtggcagtggcaggtcacctattgcatcggcattgacagatcatgagggggctttgtcaaatattaatgctagcacaactccaatccacggccaacttggcatccctcaagttgccggattcgaaagccccctggcatcccctgaaagattgggttatcatgatgaagatacatatcacatggacagaaagcgcaagcataatgaggaagctaagattgctagggaggttgaggctcatgaaaagagaatcagaaaggagcttgagaagcaagatctgctgaacagaaagagagaagaacaaatgcggagagaaatggagagacatgatcgtgagagacgtaaggaagaggagaggttgatgcgtgaaaggcagagggaagaagagaaattccaaagggaacaaagacgcgaacacaagcgcatggagaagtttatgcagaaacaatctatacgagctgaaaaactgagacaaagagaggagcttcgacgagagaaagaagctgcgaggcagaaggctgctaatgagagggctacagctcgtagaattgcgcgagagagtatggaactgatggaagatgagcgcttggaactattagagttggcctctcgtagtaaagggctgccctcaatggtttctcttgatagtgacacattacagcagcttgattcattcagaggaatgctggggaagttccctcctgaaactgtgagactgaaggtgcctttttcaataaaaccatgggcagcttccgaggatattattggaaaccttttgatggcttggaagttttttgttaccttcggtgatgttcttgggcttccgtcatttacgttggatgaatttgtgcaggctcttcatgattatttgctttaggtgtaaatcagagcagttctgctaatcctggaggtggtcacccacaaattgttgaaggggcctatgcttggggcatcaacatactcaactggcagagacacttgaactttcttacatggcctgaaatattgcgccaatttggtttatgtgctggttttgggcctcagttaaagaaaagtgatgctgaaattgtccatcaccgcgatgataacgagggtcgtaatggtgtagatgtcatttccattctgcgaaatggttcagccgctgtgaaggctgctgctttaatgaaagaaagagggtatactaatcgtcgtaggtctcgacaccgtctgacacctggaacagtaaagtttgctgctttccatgtactgtcacttgaagggagcaaaggtctcacaatattggaagttgcagaaaagatccagaaatctggacttagagaccttacaacaagtaagacaccagaggcatctatatctgcggcattgtcgagagacactaagctttttgaaagaacggcaccttcgacatattgtgttaaaactccttacagaaaggacccagatgattctgaggctgtgttggcagcggcacgtgaaaaaatcagggcgtttcagaatgcgcttccggagtgtgaagaagtcgagaaggatgtggatgaggctgagagggatgatgattctgaatgtgatgatgccgatgatgatgctgatggtgatgatgtgaatattgaagacaaggatgccaagtcgccccttgttggagctcaatatggtgcacaaattacagtagttggtgacataaagaaagaatcaaacatcgtgatgaacacatcagtgccaccaagcattcagattaaatctagtgcaagtgtaccatttcatactttagacagtaaagcaagtagttcaactgatccagaggttggagatgatgctaaagacattgagatagacgaaagtaatcaaggggagtcctgggtacaggggctagctgagggtgactactgtgatcttagtgtagacgaacgcctcaatgctttggttgcacttattgccgttgctaacgagggaaattctatccgtgcaattctggaggaacgcctagaagcagcgagtgctttgaaaaaacaattgtgggctgaggcacaacttgataagaggcgtataagggatgactttactagtaagatgcagtatgattcttatgtgagtatgaaggttgatacagatcaagaaaataatgctgctgaaattacccttacaccagtgcatgaccctattaaaaacaataacggaaatgccaatttgatgaacaatggtttgcttgttgataagcagaaccagcttactactggtgatgtatatcatcagcggaatggtgcaagccgagaatcgagtactaacgcagaaagcttgtctgttcagcaatatgcttcatctgagaaaactcgatctcagttgaaatccttcataggtcacaaggcagaacagctttatgtgtacaggtctctaccacttggacaagaccggagacggaaccggtattggcagttctctgcatcttcatcatcctatgaccctggttcgggaagaatcttttttgaatctagagatggatactggagggtcattgatacatcagaggcatttgaagctttggtagcttcccttgatactcgtggcatccgcgagtcacatttgcactcaattttgcaaagtatcgagccaaccttcaaggaagctgttgagaggaaaaggtgtgctaatttagaacacccaactggacggacttcggaaaatggaagtaatgaaagtccaaattgcaacaatgaatttggaagtccatgcagtaccctttctggtgttgcttctgataatcttatggcacattcagatattttcaagatagaggttgggcgcaatgaagctgagaagaattctatctcgaaaagggcttccgtgtttctgaaatggatctggagagagtgctacagtcaccaatctacatacgccatgagatatggaaagaagcggtgtcctgagttgattcactcttgtgattattgctaccagatatacttagctgaagaaaggcactgttcttgccacaaaacattcaaacacattcacaatttcttggaacactcatcacaatgtgaagaaaaacaaagaacagatcccaattggaagatgcaaactgtggacctttctgtacccgtaggattgagattgctaaggctgctcttagctaccattgaggccttagtaccggcagaagctcttctacctttttggacggatgggtatcggaaatcttggggtgcgaagttgtattctgcatcatctgccgaagaagtcttgcagatgcttagtgtgctggaaagtgcaataaagcgagactacttatcatctaactttgaaacgacaactgagttgcttaattcaagcacacaagattttgctactcagaattcggctggaggttctggatctgccactgcacttccatgggttcctgacactactgctgctgtagccttgagattgttagacttggatgcttccatctcatacacccttcatccaaagttgggttcaaataaggagcaagaatctggagatttcatgaaacttccaccgagatatccttctatgaataagggcaaacaagaaatagaacagttcaggcctattggttttgatcaacaggatggaacgttgctacctaacagcaatggtcgtagaggtcggggaaggggaggtagaggaggcagcaggggaggtagatctcgtggtcatggtggtagggttcccagaggtattggcagctcttccaggattcagttcagggatgacaatagtatgctctatgggagagccccacgaaagaatgcacgtggtggccgcggccgtggacgtggacgtggacgtggacttcgaactgttagacctcggcaaccatccgagctcagtgccagatcaattccaaaggcaaacctattgggcagttttagcatgttaagtaagacaaatcacactggcactacgcattctcccgagagctcaggtgcagaagagtgggcctttgagaggagggaatatgtgaaggatgatgagaacaatttggtctctcaatccgatgagtctgaggaaaatgtcgaacctatgaatgaggaatatggtgagcatatttcaggctatccaagagacaattccgactccagacccgtacagatgatgggtgatgggagcgacgataatgatgaggatgctgaaggagatgagggtgaggaagatggagaggactatgaagctgaagatcctggtgatgaggatgatgacgttgagatggatggggatgatgatgtcgaggtggatgaggatgatgacattgagatggatggggatgatgacattgaagatgatgatgacgacgacggtggagatggagcagccaacggagatgaggatggaggtggtacatcatcatattcttcagagtatagtgaatgatgagtgattgaagttgtgcaggcttgtggtaaatgatgtaacagaggctttggtgggctcaccaacgctaatgctgacttgaaaaactatttaggaggttgccagttctaaactgtcttgtgtggcttgttattagatagaagccactcaacattagaagatcggccttgtgtgtatacatacataccaattatcaaaagttgaaaatgagggtcgatcagctgtctgttttatgttcagctacttttttcattgttatatattgggagcgttctctttaagacggttgacatatttctaaactcactctcaattttgattttgtagcaagcttgaaaaaaattgctt

SEQ ID NO: 72606 - DNA, 6208 bp, Zea Mays
caaacccctgaccaattcgggccgagcagcaggcggaggaggagttgcatccgtggcctcccgtgttgctcctcctcgcgcccgcgtccctattacttctccgcgtccgtgctggggcgcggcgcgcccaccgatcctgttctacctcgcgtctgcgctgcgacgttacctgctgctgtcgcccgtcggtggtggaattcgtcgcgcggatcgagccgcgggctcgattcgggcttggcgcctctgtatatatgtcggaattcgccgtagcgtgtgattaggttttgttgttcttctgtgtcggcctggtcttcgcgtgttgtgttttgttgtctggcggaggcgaatctagggtaacggtcagtcgggaatggagtcctccgacgacgggggctccgggccggcggcagggagtcccggccctccgtcggcccccgcagccgttggcggtgcgagtagcgctcctggcgcgtctggatccggcgggaagccgccggtgaagcgcgtcatgaagacgccctaccagctggaggtcctcgagaggacgtacgcagaggactcgtatcccaacgagacgaagcgggcggagctgtcggtgcagttgaacctcacagacaggcagcttcagatgtggttctgccaccgccggctcaaggaccggaaaccgccggccaagaggcagctaagggacgaggaggttagcgtcccagtcatagggccgccgccacctgtgcttccgcctccattgcctcccagcgagatgatggtggggactgtcggaacctatggtgagcagctgctgccctattccaggagagggtctggccggttatcggctgcacctaggttatctgtgccggagattgggaggaggtactatgaaccgccacaagtcatgctgcctcatatggcaccagtgcaccttatgcaagcagagcaccgggtgatcgattctgtggaagcacttataggggaacctttgagggacgatggaccagtgcttggtattgaatttgatccacttcctcctggtgcatttggagcacctatcgtccctgagcaaccgaggcagccctttcgatcatatgagaccaagatgttttctggtcccaaaaccatgaaggcagtacatgaataccagtttcttcctgagcagccaagtgatacatatgagagggcaagccagtcacacttctatgattcttcagcagaagcgtcaaacttgagggtagctccgctgtctacaggatcacgctttctccatggagttgagcaggcacctagctatacatttcacagtcaatcatctggttctagccatttgactcaacgtggcagtggcaggtcacctattgcatcggcattgacagatcatgagggggctttgtcaaatattaatgctagcacaactccaatccacggccaacttggcatccctcaagttgccggattcgaaagccccctggcatcccctgaaagattgggttatcatgatgaagatacatatcacatggacagaaagcgcaagcataatgaggaagctaagattgctagggaggttgaggctcatgaaaagagaatcagaaaggagcttgagaagcaagatctgctgaacagaaagagagaagaacaaatgcggagagaaatggagagacatgatcgtgagagacgtaaggaagaggagaggttgatgcgtgaaaggcagagggaagaagagaaattccaaagggaacaaagacgcgaacacaagcgcatggagaagtttatgcagaaacaatctatacgagctgaaaaactgagacaaagagaggagcttcgacgagagaaagaagctgcgaggcagaaggctgctaatgagagggctacagctcgtagaattgcgcgagagagtatggaactgatggaagatgagcgcttggaactattagagttggcctctcgtagtaaagggctgccctcaatggtttctcttgatagtgacacattacagcagcttgattcattcagaggaatgctggggaagttccctcctgaaactgtgagactgaaggtgcctttttcaataaaaccatgggcagcttccgaggatattattggaaaccttttgatggcttggaagttttttgttaccttcggtgatgttcttgggcttccgtcatttacgttggatgaatttgtgcaggctcttcatgattatgattcaaggcttttaggtgaattgcatgtttctctgctgaaatctgttataaaagatattgaggatgttgcccggactccttcagttgctttaggtgtaaatcagagcagttctgctaatcctggaggtggtcacccacaaattgttgaaggggcctatgcttggggcatcaacatactcaactggcagagacacttgaactttcttacatggcctgaaatattgcgccaatttggtttatgtgctggttttgggcctcagttaaagaaaagtgatgctgaaattgtccatcaccgcgatgataacgagggtcgtaatggtgtagatgtcatttccattctgcgaaatggttcagccgctgtgaaggctgctgctttaatgaaagaaagagggtatactaatcgtcgtaggtctcgacaccgtctgacacctggaacagtaaagtttgctgctttccatgtactgtcacttgaagggagcaaaggtctcacaatattggaagttgcagaaaagatccagaaatctggacttagagaccttacaacaagtaagacaccagaggcatctatatctgcggcattgtcgagagacactaagctttttgaaagaacggcaccttcgacatattgtgttaaaactccttacagaaaggacccagatgattctgaggctgtgttggcagcggcacgtgaaaaaatcagggcgtttcagaatgcgcttccggagtgtgaagaagtcgagaaggatgtggatgaggctgagagggatgatgattctgaatgtgatgatgccgatgatgatgctgatggtgatgatgtgaatattgaagacaaggatgccaagtcgccccttgttggagctcaatatggtgcacaaattacagtagttggtgacataaagaaagaatcaaacatcgtgatgaacacatcagtgccaccaagcattcagattaaatctagtgcaagtgtaccatttcatactttagacagtaaagcaagtagttcaactgatccagaggttggagatgatgctaaagacattgagatagacgaaagtaatcaaggggagtcctgggtacaggggctagctgagggtgactactgtgatcttagtgtagacgaacgcctcaatgctttggttgcacttattgccgttgctaacgagggaaattctatccgtgcaattctggaggaacgcctagaagcagcgagtgctttgaaaaaacaattgtgggctgaggcacaacttgataagaggcgtataagggatgactttactagtaagatgcagtatgattcttatgtgagtatgaaggttgatacagatcaagaaaataatgctgctgaaattacccttacaccagtgcatgaccctattaaaaacaataacggaaatgccaatttgatgaacaatggtttgcttgttgataagcagaaccagcttactactggtgatgtatatcatcagcggaatggtgcaagccgagaatcgagtactaacgcagaaagcttgtctgttcagcaatatgcttcatctgagaaaactcgatctcagttgaaatccttcataggtcacaaggcagaacagctttatgtgtacaggtctctaccacttggacaagaccggagacggaaccggtattggcagttctctgcatcttcatcatcctatgaccctggttcgggaagaatcttttttgaatctagagatggatactggagggtcattgatacatcagaggcatttgaagctttggtagcttcccttgatactcgtggcatccgcgagtcacatttgcactcaattttgcaaagtatcgagccaaccttcaaggaagctgttgagaggaaaaggtgtgctaatttagaacacccaactggacggacttcggaaaatggaagtaatgaaagtccaaattgcaacaatgaatttggaagtccatgcagtaccctttctggtgttgcttctgataatcttatggcacattcagatattttcaagatagaggttgggcgcaatgaagctgagaagaattctatctcgaaaagggcttccgtgtttctgaaatggatctggagagagtgctacagtcaccaatctacatacgccatgagatatggaaagaagcggtgtcctgagttgattcactcttgtgattattgctaccagatatacttagctgaagaaaggcactgttcttgccacaaaacattcaaacacattcacaatttcttggaacactcatcacaatgtgaagaaaaacaaagaacagatcccaattggaagatgcaaactgtggacctttctgtacccgtaggattgagattgctaaggctgctcttagctaccattgaggccttagtaccggcagaagctcttctacctttttggacggatgggtatcggaaatcttggggtgcgaagttgtattctgcatcatctgccgaagaagtcttgcaggctatgcatgaataattgttctgaatcttgtgcatgttttgacctccagcagagatgcttagtgtgctggaaagtgcaataaagcgagactacttatcatctaactttgaaacgacaactgagttgcttaattcaagcacacaagattttgctactcagaattcggctggaggttctggatctgccactgcacttccatgggttcctgacactactgctgctgtagccttgagattgttagacttggatgcttccatctcatacacccttcatccaaagttgggttcaaataaggagcaagaatctggagatttcatgaaacttccaccgagatatccttctatgaataagggcaaacaagaaatagaacagttcaggcctattggttttgatcaacaggatggaacgttgctacctaacagcaatggtcgtagaggtcggggaaggggaggtagaggaggcagcaggggaggtagatctcgtggtcatggtggtagggttcccagaggtattggcagctcttccaggattcagttcagggatgacaatagtatgctctatgggagagccccacgaaagaatgcacgtggtggccgcggccgtggacgtggacgtggacgtggacttcgaactgttagacctcggcaaccatccgagctcagtgccagatcaattccaaaggcaaacctattgggcagttttagcatgttaagtaagacaaatcacactggcactacgcattctcccgagagctcaggtgcagaagagtgggcctttgagaggagggaatatgtgaaggatgatgagaacaatttggtctctcaatccgatgagtctgaggaaaatgtcgaacctatgaatgaggaatatggtgagcatatttcaggctatccaagagacaattccgactccagacccgtacagatgatgggtgatgggagcgacgataatgatgaggatgctgaaggagatgagggtgaggaagatggagaggactatgaagctgaagatcctggtgatgaggatgatgacgttgagatggatggggatgatgatgtcgaggtggatgaggatgatgacattgagatggatggggatgatgacattgaagatgatgatgacgacgacggtggagatggagcagccaacggagatgaggatggaggtggtacatcatcatattcttcagagtatagtgaatgatgagtgattgaagttgtgcaggcttgtggtaaatgatgtaacagaggctttggtgggctcaccaacgctaatgctgacttgaaaaactatttaggaggttgccagttctaaactgtcttgtgtggcttgttattagatagaagccactcaacattagaagatcggccttgtgtgtatacatacataccaattatcaaaagttgaaaatgagggtcgatcagctgtctgttttatgttcagctacttttttcattgttatatattgggagcgttctctttaagacggttgacatatttctaaactcactctcaattttgattttgtagcaagcttgaaaaaaattgctt

SEQ ID NO: 72607 - DNA, 5838 bp, Zea Mays
cgggccgagcagcaggcggaggaggagttgcatccgtggcctcccgtgttgctcctcctcgcgcccgcgtccctattacttctccgcgtccgtgctggggcgcggcgcgcccaccgatcctgttctacctcgcgtctgcgctgcgacgttacctgctgctgtcgcccgtcggtggtggaattcgtcgcgcggatcgagccgcgggctcgattcgggcttggcgcctctgtatatatgtcggaattcgccgtagcgtgtgattaggttttgttgttcttctgtgtcggcctggtcttcgcgtgttgtgttttgttgtctggcggaggcgaatctagggtaacggtcagtcgggaatggagtcctccgacgacgggggctccgggccggcggcagggagtcccggccctccgtcggcccccgcagccgttggcggtgcgagtagcgctcctggcgcgtctggatccggcgggaagccgccggtgaagcgcgtcatgaagacgccctaccagctggaggtcctcgagaggacgtacgcagaggactcgtatcccaacgagacgaagcgggcggagctgtcggtgcagttgaacctcacagacaggcagcttcagatgtggttctgccaccgccggctcaaggaccggaaaccgccggccaagaggcagctaagggacgaggaggttagcgtcccagtcatagggccgccgccacctgtgcttccgcctccattgcctcccagcgagatgatggtggggactgtcggaacctatggtgagcagctgctgccctattccaggagagggtctggccggttatcggctgcacctaggttatctgtgccggagattgggaggaggtactatgaaccgccacaagtcatgctgcctcatatggcaccagtgcaccttatgcaagcagagcaccgggtgatcgattctgtggaagcacttataggggaacctttgagggacgatggaccagtgcttggtattgaatttgatccacttcctcctggtgcatttggagcacctatcgtccctgagcaaccgaggcagccctttcgatcatatgagaccaagatgttttctggtcccaaaaccatgaaggcagtacatgaataccagtttcttcctgagcagccaagtgatacatatgagagggcaagccagtcacacttctatgattcttcagcagaagcgtcaaacttgagggtagctccgctgtctacaggatcacgctttctccatggagttgagcaggcacctagctatacatttcacagtcaatcatctggttctagccatttgactcaacgtggcagtggcaggtcacctattgcatcggcattgacagatcatgagggggctttgtcaaatattaatgctagcacaactccaatccacggccaacttggcatccctcaagttgccggattcgaaagccccctggcatcccctgaaagattgggttatcatgatgaagatacatatcacatggacagaaagcgcaagcataatgaggaagctaagattgctagggaggttgaggctcatgaaaagagaatcagaaaggagcttgagaagcaagatctgctgaacagaaagagagaagaacaaatgcggagagaaatggagagacatgatcgtgagagacgtaaggaagaggagaggttgatgcgtgaaaggcagagggaagaagagaaattccaaagggaacaaagacgcgaacacaagcgcatggagaagtttatgcagaaacaatctatacgagctgaaaaactgagacaaagagaggagcttcgacgagagaaagaagctgcgaggcagaaggctgctaatgagagggctacagctcgtagaattgcgcgagagagtatggaactgatggaagatgagcgcttggaactattagagttggcctctcgtagtaaagggctgccctcaatggtttctcttgatagtgacacattacagcagcttgattcattcagaggaatgctggggaagttccctcctgaaactgtgagactgaaggtgcctttttcaataaaaccatgggcagcttccgaggatattattggaaaccttttgatggcttggaagttttttgttaccttcggtgatgttcttgggcttccgtcatttacgttggatgaatttgtgcaggctcttcatgattatgattcaaggcttttaggtgaattgcatgtttctctgctgaaatctgttataaaagatattgaggatgttgcccggactccttcagttgctttaggtgtaaatcagagcagttctgctaatcctggaggtggtcacccacaaattgttgaaggggcctatgcttggggcatcaacatactcaactggcagagacacttgaactttcttacatggcctgaaatattgcgccaatttggtttatgtgctggttttgggcctcagttaaagaaaagtgatgctgaaattgtccatcaccgcgatgataacgagggtcgtaatggtgtagatgtcatttccattctgcgaaatggttcagccgctgtgaaggctgctgctttaatgaaagaaagagggtatactaatcgtcgtaggtctcgacaccgtctgacacctggaacagtaaagtttgctgctttccatgtactgtcacttgaagggagcaaaggtctcacaatattggaagttgcagaaaagatccagaaatctggacttagagaccttacaacaagtaagacaccagaggcatctatatctgcggcattgtcgagagacactaagctttttgaaagaacggcaccttcgacatattgtgttaaaactccttacagaaaggacccagatgattctgaggctgtgttggcagcggcacgtgaaaaaatcagggcgtttcagaatgcgcttccggagtgtgaagaagtcgagaaggatgtggatgaggctgagagggatgatgattctgaatgtgatgatgccgatgatgatgctgatggtgatgatgtgaatattgaagacaaggatgccaagtcgccccttgttggagctcaatatggtgcacaaattacagtagttggtgacataaagaaagaatcaaacatcgtgatgaacacatcagtgccaccaagcattcagattaaatctagtgcaagtgtaccatttcatactttagacagtaaagcaagtagttcaactgatccagaggttggagatgatgctaaagacattgagatagacgaaagtaatcaaggggagtcctgggtacaggggctagctgagggtgactactgtgatcttagtgtagacgaacgcctcaatgctttggttgcacttattgccgttgctaacgagggaaattctatccgtgcaattctggaggaacgcctagaagcagcgagtgctttgaaaaaacaattgtgggctgaggcacaacttgataagaggcgtataagggatgactttactagtaagatgcagtatgattcttatgtctctaccacttggacaagaccggagacggaaccggtattggcagttctctgcatcttcatcatcctatgaccctggttcgggaagaatcttttttgaatctagagatggatactggagggtcattgatacatcagaggcatttgaagctttggtagcttcccttgatactcgtggcatccgcgagtcacatttgcactcaattttgcaaagtatcgagccaaccttcaaggaagctgttgagaggaaaaggtgtgctaatttagaacacccaactggacggacttcggaaaatggaagtaatgaaagtccaaattgcaacaatgaatttggaagtccatgcagtaccctttctggtgttgcttctgataatcttatggcacattcagatattttcaagatagaggttgggcgcaatgaagctgagaagaattctatctcgaaaagggcttccgtgtttctgaaatggatctggagagagtgctacagtcaccaatctacatacgccatgagatatggaaagaagcggtgtcctgagttgattcactcttgtgattattgctaccagatatacttagctgaagaaaggcactgttcttgccacaaaacattcaaacacattcacaatttcttggaacactcatcacaatgtgaagaaaaacaaagaacagatcccaattggaagatgcaaactgtggacctttctgtacccgtaggattgagattgctaaggctgctcttagctaccattgaggccttagtaccggcagaagctcttctacctttttggacggatgggtatcggaaatcttggggtgcgaagttgtattctgcatcatctgccgaagaagtcttgcagatgcttagtgtgctggaaagtgcaataaagcgagactacttatcatctaactttgaaacgacaactgagttgcttaattcaagcacacaagattttgctactcagaattcggctggaggttctggatctgccactgcacttccatgggttcctgacactactgctgctgtagccttgagattgttagacttggatgcttccatctcatacacccttcatccaaagttgggttcaaataaggagcaagaatctggagatttcatgaaacttccaccgagatatccttctatgaataagggcaaacaagaaatagaacagttcaggcctattggttttgatcaacaggatggaacgttgctacctaacagcaatggtcgtagaggtcggggaaggggaggtagaggaggcagcaggggaggtagatctcgtggtcatggtggtagggttcccagaggtattggcagctcttccaggattcagttcagggatgacaatagtatgctctatgggagagccccacgaaagaatgcacgtggtggccgcggccgtggacgtggacgtggacgtggacttcgaactgttagacctcggcaaccatccgagctcagtgccagatcaattccaaaggcaaacctattgggcagttttagcatgttaagtaagacaaatcacactggcactacgcattctcccgagagctcaggtgcagaagagtgggcctttgagaggagggaatatgtgaaggatgatgagaacaatttggtctctcaatccgatgagtctgaggaaaatgtcgaacctatgaatgaggaatatggtgagcatatttcaggctatccaagagacaattccgactccagacccgtacagatgatgggtgatgggagcgacgataatgatgaggatgctgaaggagatgagggtgaggaagatggagaggactatgaagctgaagatcctggtgatgaggatgatgacgttgagatggatggggatgatgatgtcgaggtggatgaggatgatgacattgagatggatggggatgatgacattgaagatgatgatgacgacgacggtggagatggagcagccaacggagatgaggatggaggtggtacatcatcatattcttcagagtatagtgaatgatgagtgattgaagttgtgcaggcttgtggtaaatgatgtaacagaggctttggtgggctcaccaacgctaatgctgacttgaaaaactatttaggaggttgccagttctaaactgtcttgtgtggcttgttattagatagaagccactcaacattagaagatcggccttgtgtgtatacatacataccaattatcaaaagttgaaaatgagggtcgatcagctgtctgttttatgttcagctacttttttcattgttatatattgggagcgttctctttaagacggttgacatatttctaaactcactctcaattttgattttgtagcaagcttgaaaaaaattgctt

SEQ ID NO: 72608 - DNA, 6199 bp, Zea Mays
caggcggaggaggagttgcatccgtggcctcccgtgttgctcctcctcgcgcccgcgtccctattacttctccgcgtccgtgctggggcgcggcgcgcccaccgatcctgttctacctcgcgtctgcgctgcgacgttacctgctgctgtcgcccgtcggtggtggaattcgtcgcgcggatcgagccgcgggctcgattcgggcttggcgcctctgtatatatgtcggaattcgccgtagcgtgtgattaggttttgttgttcttctgtgtcggcctggtcttcgcgtgttgtgttttgttgtctggcggaggcgaatctagggtaacggtcagtcgggaatggagtcctccgacgacgggggctccgggccggcggcagggagtcccggccctccgtcggcccccgcagccgttggcggtgcgagtagcgctcctggcgcgtctggatccggcgggaagccgccggtgaagcgcgtcatgaagacgccctaccagctggaggtcctcgagaggacgtacgcagaggactcgtatcccaacgagacgaagcgggcggagctgtcggtgcagttgaacctcacagacaggcagcttcagatgtggttctgccaccgccggctcaaggaccggaaaccgccggccaagaggcagctaagggacgaggaggttagcgtcccagtcatagggccgccgccacctgtgcttccgcctccattgcctcccagcgagatgatggtggggactgtcggaacctatggtgagcagctgctgccctattccaggagagggtctggccggttatcggctgcacctaggttatctgtgccggagattgggaggaggtactatgaaccgccacaagtcatgctgcctcatatggcaccagtgcaccttatgcaagcagagcaccgggtgatcgattctgtggaagcacttataggggaacctttgagggacgatggaccagtgcttggtattgaatttgatccacttcctcctggtgcatttggagcacctatcgtccctgagcaaccgaggcagccctttcgatcatatgagaccaagatgttttctggtcccaaaaccatgaaggcttcggcaatcttgcctaccacagaccctttacttcaaaatacagggaaacggaaatccttcattggctcttctcatcttggctcacaggcagtacatgaataccagtttcttcctgagcagccaagtgatacatatgagagggcaagccagtcacacttctatgattcttcagcagaagcgtcaaacttgagggtagctccgctgtctacaggatcacgctttctccatggagttgagcaggcacctagctatacatttcacagtcaatcatctggttctagccatttgactcaacgtggcagtggcaggtcacctattgcatcggcattgacagatcatgagggggctttgtcaaatattaatgctagcacaactccaatccacggccaacttggcatccctcaagttgccggattcgaaagccccctggcatcccctgaaagattgggttatcatgatgaagatacatatcacatggacagaaagcgcaagcataatgaggaagctaagattgctagggaggttgaggctcatgaaaagagaatcagaaaggagcttgagaagcaagatctgctgaacagaaagagagaagaacaaatgcggagagaaatggagagacatgatcgtgagagacgtaaggaagaggagaggttgatgcgtgaaaggcagagggaagaagagaaattccaaagggaacaaagacgcgaacacaagcgcatggagaagtttatgcagaaacaatctatacgagctgaaaaactgagacaaagagaggagcttcgacgagagaaagaagctgcgaggcagaaggctgctaatgagagggctacagctcgtagaattgcgcgagagagtatggaactgatggaagatgagcgcttggaactattagagttggcctctcgtagtaaagggctgccctcaatggtttctcttgatagtgacacattacagcagcttgattcattcagaggaatgctggggaagttccctcctgaaactgtgagactgaaggtgcctttttcaataaaaccatgggcagcttccgaggatattattggaaaccttttgatggcttggaagttttttgttaccttcggtgatgttcttgggcttccgtcatttacgttggatgaatttgtgcaggctcttcatgattatgattcaaggcttttaggtgaattgcatgtttctctgctgaaatctgttataaaagatattgaggatgttgcccggactccttcagttgctttaggtgtaaatcagagcagttctgctaatcctggaggtggtcacccacaaattgttgaaggggcctatgcttggggcatcaacatactcaactggcagagacacttgaactttcttacatggcctgaaatattgcgccaatttggtttatgtgctggttttgggcctcagttaaagaaaagtgatgctgaaattgtccatcaccgcgatgataacgagatgtcatttccattctgcgaaatggttcagccgctgtgaaggctgctgctttaatgaaagaaagagggtatactaatcgtcgtaggtctcgacaccgtctgacacctggaacagtaaagtttgctgctttccatgtactgtcacttgaagggagcaaaggtctcacaatattggaagttgcagaaaagatccagaaatctggacttagagaccttacaacaagtaagacaccagaggcatctatatctgcggcattgtcgagagacactaagctttttgaaagaacggcaccttcgacatattgtgttaaaactccttacagaaaggacccagatgattctgaggctgtgttggcagcggcacgtgaaaaaatcagggcgtttcagaatgcgcttccggagtgtgaagaagtcgagaaggatgtggatgaggctgagagggatgatgattctgaatgtgatgatgccgatgatgatgctgatggtgatgatgtgaatattgaagacaaggatgccaagtcgccccttgttggagctcaatatggtgcacaaattacagtagttggtgacataaagaaagaatcaaacatcgtgatgaacacatcagtgccaccaagcattcagattaaatctagtgcaagtgtaccatttcatactttagacagtaaagcaagtagttcaactgatccagaggttggagatgatgctaaagacattgagatagacgaaagtaatcaaggggagtcctgggtacaggggctagctgagggtgactactgtgatcttagtgtagacgaacgcctcaatgctttggttgcacttattgccgttgctaacgagggaaattctatccgtgcaattctggaggaacgcctagaagcagcgagtgctttgaaaaaacaattgtgggctgaggcacaacttgataagaggcgtataagggatgactttactagtaagatgcagtatgattcttatgtgagtatgaaggttgatacagatcaagaaaataatgctgctgaaattacccttacaccagtgcatgaccctattaaaaacaataacggaaatgccaatttgatgaacaatggtttgcttgttgataagcagaaccagcttactactggtgatgtatatcatcagcggaatggtgcaagccgagaatcgagtactaacgcagaaagcttgtctgttcagcaatatgcttcatctgagaaaactcgatctcagttgaaatccttcataggtcacaaggcagaacagctttatgtgtacaggtctctaccacttggacaagaccggagacggaaccggtattggcagttctctgcatcttcatcatcctatgaccctggttcgggaagaatcttttttgaatctagagatggatactggagggtcattgatacatcagaggcatttgaagctttggtagcttcccttgatactcgtggcatccgcgagtcacatttgcactcaattttgcaaagtatcgagccaaccttcaaggaagctgttgagaggaaaaggtgtgctaatttagaacacccaactggacggacttcggaaaatggaagtaatgaaagtccaaattgcaacaatgaatttggaagtccatgcagtaccctttctggtgttgcttctgataatcttatggcacattcagatattttcaagatagaggttgggcgcaatgaagctgagaagaattctatctcgaaaagggcttccgtgtttctgaaatggatctggagagagtgctacagtcaccaatctacatacgccatgagatatggaaagaagcggtgtcctgagttgattcactcttgtgattattgctaccagatatacttagctgaagaaaggcactgttcttgccacaaaacattcaaacacattcacaatttcttggaacactcatcacaatgtgaagaaaaacaaagaacagatcccaattggaagatgcaaactgtggacctttctgtacccgtaggattgagattgctaaggctgctcttagctaccattgaggccttagtaccggcagaagctcttctacctttttggacggatgggtatcggaaatcttggggtgcgaagttgtattctgcatcatctgccgaagaagtcttgcagatgcttagtgtgctggaaagtgcaataaagcgagactacttatcatctaactttgaaacgacaactgagttgcttaattcaagcacacaagattttgctactcagaattcggctggaggttctggatctgccactgcacttccatgggttcctgacactactgctgctgtagccttgagattgttagacttggatgcttccatctcatacacccttcatccaaagttgggttcaaataaggagcaagaatctggagatttcatgaaacttccaccgagatatccttctatgaataagggcaaacaagaaatagaacagttcaggcctattggttttgatcaacaggatggaacgttgctacctaacagcaatggtcgtagaggtcggggaaggggaggtagaggaggcagcaggggaggtagatctcgtggtcatggtggtagggttcccagaggtattggcagctcttccaggattcagttcagggatgacaatagtatgctctatgggagagccccacgaaagaatgcacgtggtggccgcggccgtggacgtggacgtggacgtggacttcgaactgttagacctcggcaaccatccgagctcagtgccagatcaattccaaaggcaaacctattgggcagttttagcatgttaagtaagacaaatcacactggcactacgcattctcccgagagctcaggtgcagaagagtgggcctttgagaggagggaatatgtgaaggatgatgagaacaatttggtctctcaatccgatgagtctgaggaaaatgtcgaacctatgaatgaggaatatggtgagcatatttcaggctatccaagagacaattccgactccagacccgtacagatgatgggtgatgggagcgacgataatgatgaggatgctgaaggagatgagggtgaggaagatggagaggactatgaagctgaagatcctggtgatgaggatgatgacgttgagatggatggggatgatgatgtcgaggtggatgaggatgatgacattgagatggatggggatgatgacattgaagatgatgatgacgacgacggtggagatggagcagccaacggagatgaggatggaggtggtacatcatcatattcttcagagtatagtgaatgatgagtgattgaagttgtgcaggcttgtggtaaatgatgtaacagaggctttggtgggctcaccaacgctaatgctgacttgaaaaactatttaggaggttgccagttctaaactgtcttgtgtggcttgttattagatagaagccactcaacattagaagatcggccttgtgtgtatacatacataccaattatcaaaagttgaaaatgagggtcgatcagctgtctgttttatgttcagctacttttttcattgttatatattgggagcgttctctttaagacggttgacatatttctaaactcactctcaattttgattttgtagcaagcttgaaaaaaattgctt

SEQ ID NO: 72609 - DNA, 5930 bp, Zea Mays
caggcggaggaggagttgcatccgtggcctcccgtgttgctcctcctcgcgcccgcgtccctattacttctccgcgtccgtgctggggcgcggcgcgcccaccgatcctgttctacctcgcgtctgcgctgcgacgttacctgctgctgtcgcccgtcggtggtggaattcgtcgcgcggatcgagccgcgggctcgattcgggcttggcgcctctgtatatatgtcggaattcgccgtagcgtgtgattaggttttgttgttcttctgtgtcggcctggtcttcgcgtgttgtgttttgttgtctggcggaggcgaatctagggtaacggtcagtcgggaatggagtcctccgacgacgggggctccgggccggcggcagggagtcccggccctccgtcggcccccgcagccgttggcggtgcgagtagcgctcctggcgcgtctggatccggcgggaagccgccggtgaagcgcgtcatgaagacgccctaccagctggaggtcctcgagaggacgtacgcagaggactcgtatcccaacgagacgaagcgggcggagctgtcggtgcagttgaacctcacagacaggcagcttcagatgtggttctgccaccgccggctcaaggaccggaaaccgccggccaagaggcagctaagggacgaggaggttagcgtcccagtcatagggccgccgccacctgtgcttccgcctccattgcctcccagcgagatgatggtggggactgtcggaacctatggtgagcagctgctgccctattccaggagagggtctggccggttatcggctgcacctaggttatctgtgccggagattgggaggaggtactatgaaccgccacaagtcatgctgcctcatatggcaccagtgcaccttatgcaagcagagcaccgggtgatcgattctgtggaagcacttataggggaacctttgagggacgatggaccagtgcttggtattgaatttgatccacttcctcctggtgcatttggagcacctatcgtccctgagcaaccgaggcagccctttcgatcatatgagaccaagatgttttctggtcccaaaaccatgaaggcttcggcaatcttgcctaccacagaccctttacttcaaaatacagggaaacggaaatccttcattggctcttctcatcttggctcacaggcagtacatgaataccagtttcttcctgagcagccaagtgatacatatgagagggcaagccagtcacacttctatgattcttcagcagaagcgtcaaacttgagggtagctccgctgtctacaggatcacgctttctccatggagttgagcaggcacctagctatacatttcacagtcaatcatctggttctagccatttgactcaacgtggcagtggcaggtcacctattgcatcggcattgacagatcatgagggggctttgtcaaatattaatgctagcacaactccaatccacggccaacttggcatccctcaagttgccggattcgaaagccccctggcatcccctgaaagattgggttatcatgatgaagatacatatcacatggacagaaagcgcaagcataatgaggaagctaagattgctagggaggttgaggctcatgaaaagagaatcagaaaggagcttgagaagcaagatctgctgaacagaaagagagaagaacaaatgcggagagaaatggagagacatgatcgtgagagacgtaaggaagaggagaggttgatgcgtgaaaggcagagggaagaagagaaattccaaagggaacaaagacgcgaacacaagcgcatggagaagtttatgcagaaacaatctatacgagctgaaaaactgagacaaagagaggagcttcgacgagagaaagaagctgcgaggcagaaggctgctaatgagagggctacagctcgtagaattgcgcgagagagtatggaactgatggaagatgagcgcttggaactattagagttggcctctcgtagtaaagggctgccctcaatggtttctcttgatagtgacacattacagcagcttgattcattcagaggaatgctggggaagttccctcctgaaactgtgagactgaaggtgcctttttcaataaaaccatgggcagcttccgaggatattattggaaaccttttgatggcttggaagttttttgttaccttcggtgatgttcttgggcttccgtcatttacgttggatgaatttgtgcaggctcttcatgattatgattcaaggcttttaggtgaattgcatgtttctctgctgaaatctgttataaaagatattgaggatgttgcccggactccttcagttgctttaggtgtaaatcagagcagttctgctaatcctggaggtggtcacccacaaattgttgaaggggcctatgcttggggcatcaacatactcaactggcagagacacttgaactttcttacatggcctgaaatattgcgccaatttggtttatgtgctggttttgggcctcagttaaagaaaagtgatgctgaaattgtccatcaccgcgatgataacgagggtcgtaatggtgtagatgtcatttccattctgcgaaatggttcagccgctgtgaaggctgctgctttaatgaaagaaagagggtatactaatcgtcgtaggtctcgacaccgtctgacacctggaacagtaaagtttgctgctttccatgtactgtcacttgaagggagcaaaggtctcacaatattggaagttgcagaaaagatccagaaatctggacttagagaccttacaacaagtaagacaccagaggcatctatatctgcggcattgtcgagagacactaagctttttgaaagaacggcaccttcgacatattgtgttaaaactccttacagaaaggacccagatgattctgaggctgtgttggcagcggcacgtgaaaaaatcagggcgtttcagaatgcgcttccggagtgtgaagaagtcgagaaggatgtggatgaggctgagagggatgatgattctgaatgtgatgatgccgatgatgatgctgatggtgatgatgtgaatattgaagacaaggatgccaagtcgccccttgttggagctcaatatggtgcacaaattacagtagttggtgacataaagaaagaatcaaacatcgtgatgaacacatcagtgccaccaagcattcagattaaatctagtgcaagtgtaccatttcatactttagacagtaaagcaagtagttcaactgatccagaggttggagatgatgctaaagacattgagatagacgaaagtaatcaaggggagtcctgggtacaggggctagctgagggtgactactgtgatcttagtgtagacgaacgcctcaatgctttggttgcacttattgccgttgctaacgagggaaattctatccgtgcaattctggaggaacgcctagaagcagcgagtgctttgaaaaaacaattgtgggctgaggcacaacttgataagaggcgtataagggatgactttactagtaagatgcagtatgattcttatctttatgtgtacaggtctctaccacttggacaagaccggagacggaaccggtattggcagttctctgcatcttcatcatcctatgaccctggttcgggaagaatcttttttgaatctagagatggatactggagggtcattgatacatcagaggcatttgaagctttggtagcttcccttgatactcgtggcatccgcgagtcacatttgcactcaattttgcaaagtatcgagccaaccttcaaggaagctgttgagaggaaaaggtgtgctaatttagaacacccaactggacggacttcggaaaatggaagtaatgaaagtccaaattgcaacaatgaatttggaagtccatgcagtaccctttctggtgttgcttctgataatcttatggcacattcagatattttcaagatagaggttgggcgcaatgaagctgagaagaattctatctcgaaaagggcttccgtgtttctgaaatggatctggagagagtgctacagtcaccaatctacatacgccatgagatatggaaagaagcggtgtcctgagttgattcactcttgtgattattgctaccagatatacttagctgaagaaaggcactgttcttgccacaaaacattcaaacacattcacaatttcttggaacactcatcacaatgtgaagaaaaacaaagaacagatcccaattggaagatgcaaactgtggacctttctgtacccgtaggattgagattgctaaggctgctcttagctaccattgaggccttagtaccggcagaagctcttctacctttttggacggatgggtatcggaaatcttggggtgcgaagttgtattctgcatcatctgccgaagaagtcttgcagatgcttagtgtgctggaaagtgcaataaagcgagactacttatcatctaactttgaaacgacaactgagttgcttaattcaagcacacaagattttgctactcagaattcggctggaggttctggatctgccactgcacttccatgggttcctgacactactgctgctgtagccttgagattgttagacttggatgcttccatctcatacacccttcatccaaagttgggttcaaataaggagcaagaatctggagatttcatgaaacttccaccgagatatccttctatgaataagggcaaacaagaaatagaacagttcaggcctattggttttgatcaacaggatggaacgttgctacctaacagcaatggtcgtagaggtcggggaaggggaggtagaggaggcagcaggggaggtagatctcgtggtcatggtggtagggttcccagaggtattggcagctcttccaggattcagttcagggatgacaatagtatgctctatgggagagccccacgaaagaatgcacgtggtggccgcggccgtggacgtggacgtggacgtggacttcgaactgttagacctcggcaaccatccgagctcagtgccagatcaattccaaaggcaaacctattgggcagttttagcatgttaagtaagacaaatcacactggcactacgcattctcccgagagctcaggtgcagaagagtgggcctttgagaggagggaatatgtgaaggatgatgagaacaatttggtctctcaatccgatgagtctgaggaaaatgtcgaacctatgaatgaggaatatggtgagcatatttcaggctatccaagagacaattccgactccagacccgtacagatgatgggtgatgggagcgacgataatgatgaggatgctgaaggagatgagggtgaggaagatggagaggactatgaagctgaagatcctggtgatgaggatgatgacgttgagatggatggggatgatgatgtcgaggtggatgaggatgatgacattgagatggatggggatgatgacattgaagatgatgatgacgacgacggtggagatggagcagccaacggagatgaggatggaggtggtacatcatcatattcttcagagtatagtgaatgatgagtgattgaagttgtgcaggcttgtggtaaatgatgtaacagaggctttggtgggctcaccaacgctaatgctgacttgaaaaactatttaggaggttgccagttctaaactgtcttgtgtggcttgttattagatagaagccactcaacattagaagatcggccttgtgtgtatacatacataccaattatcaaaagttgaaaatgagggtcgatcagctgtctgttttatgttcagctacttttttcattgttatatattgggagcgttctctttaagacggttgacatatttctaaactcactctcaattttgattttgtagcaagcttgaaaaaaattgctt

SEQ ID NO: 72610 - DNA, 6205 bp, Zea Mays
caggcggaggaggagttgcatccgtggcctcccgtgttgctcctcctcgcgcccgcgtccctattacttctccgcgtccgtgctggggcgcggcgcgcccaccgatcctgttctacctcgcgtctgcgctgcgacgttacctgctgctgtcgcccgtcggtggtggaattcgtcgcgcggatcgagccgcgggctcgattcgggcttggcgcctctgtatatatgtcggaattcgccgtagcgtgtgattaggttttgttgttcttctgtgtcggcctggtcttcgcgtgttgtgttttgttgtctggcggaggcgaatctagggtaacggtcagtcgggaatggagtcctccgacgacgggggctccgggccggcggcagggagtcccggccctccgtcggcccccgcagccgttggcggtgcgagtagcgctcctggcgcgtctggatccggcgggaagccgccggtgaagcgcgtcatgaagacgccctaccagctggaggtcctcgagaggacgtacgcagaggactcgtatcccaacgagacgaagcgggcggagctgtcggtgcagttgaacctcacagacaggcagcttcagatgtggttctgccaccgccggctcaaggaccggaaaccgccggccaagaggcagctaagggacgaggaggttagcgtcccagtcatagggccgccgccacctgtgcttccgcctccattgcctcccagcgagatgatggtggggactgtcggaacctatggtgagcagctgctgccctattccaggagagggtctggccggttatcggctgcacctaggttatctgtgccggagattgggaggaggtactatgaaccgccacaagtcatgctgcctcatatggcaccagtgcaccttatgcaagcagagcaccgggtgatcgattctgtggaagcacttataggggaacctttgagggacgatggaccagtgcttggtattgaatttgatccacttcctcctggtgcatttggagcacctatcgtccctgagcaaccgaggcagccctttcgatcatatgagaccaagatgttttctggtcccaaaaccatgaaggcttcggcaatcttgcctaccacagaccctttacttcaaaatacagggaaacggaaatccttcattggctcttctcatcttggctcacaggcagtacatgaataccagtttcttcctgagcagccaagtgatacatatgagagggcaagccagtcacacttctatgattcttcagcagaagcgtcaaacttgagggtagctccgctgtctacaggatcacgctttctccatggagttgagcaggcacctagctatacatttcacagtcaatcatctggttctagccatttgactcaacgtggcagtggcaggtcacctattgcatcggcattgacagatcatgagggggctttgtcaaatattaatgctagcacaactccaatccacggccaacttggcatccctcaagttgccggattcgaaagccccctggcatcccctgaaagattgggttatcatgatgaagatacatatcacatggacagaaagcgcaagcataatgaggaagctaagattgctagggaggttgaggctcatgaaaagagaatcagaaaggagcttgagaagcaagatctgctgaacagaaagagagaagaacaaatgcggagagaaatggagagacatgatcgtgagagacgtaaggaagaggagaggttgatgcgtgaaaggcagagggaagaagagaaattccaaagggaacaaagacgcgaacacaagcgcatggagaagtttatgcagaaacaatctatacgagctgaaaaactgagacaaagagaggagcttcgacgagagaaagaagctgcgaggcagaaggctgctaatgagagggctacagctcgtagaattgcgcgagagagtatggaactgatggaagatgagcgcttggaactattagagttggcctctcgtagtaaagggctgccctcaatggtttctcttgatagtgacacattacagcagcttgattcattcagaggaatgctggggaagttccctcctgaaactgtgagactgaaggtgcctttttcaataaaaccatgggcagcttccgaggatattattggaaaccttttgatggcttggaagttttttgttaccttcggtgatgttcttgggcttccgtcatttacgttggatgaatttgtgcaggctcttcatgattatgattcaaggcttttaggtgaattgcatgtttctctgctgaaatctgttataaaagatattgaggatgttgcccggactccttcagttgctttaggtgtaaatcagagcagttctgctaatcctggaggtggtcacccacaaattgttgaaggggcctatgcttggggcatcaacatactcaactggcagagacacttgaactttcttacatggcctgaaatattgcgccaatttggtttatgtgctggttttgggcctcagttaaagaaaagtgatgctgaaattgtccatcaccgcgatgataacgagggtcgtaatggtgtagatgtcatttccattctgcgaaatggttcagccgctgtgaaggctgctgctttaatgaaagaaagagggtatactaatcgtcgtaggtctcgacaccgtctgacacctggaacagtaaagtttgctgctttccatgtactgtcacttgaagggagcaaaggtctcacaatattggaagttgcagaaaagatccagaaatctggacttagagaccttacaacaagtaagacaccagaggcatctatatctgcggcattgtcgagagacactaagctttttgaaagaacggcaccttcgacatattgtgttaaaactccttacagaaaggacccagatgattctgaggctgtgttggcagcggcacgtgaaaaaatcagggcgtttcagaatgcgcttccggagtgtgaagaagtcgagaaggatgtggatgaggctgagagggatgatgattctgaatgtgatgatgccgatgatgatgctgatggtgatgatgtgaatattgaagacaaggatgccaagtcgccccttgttggagctcaatatggtgcacaaattacagtagttggtgacataaagaaagaatcaaacatcgtgatgaacacatcagtgccaccaagcattcagattaaatctagtgcaagtgtaccatttcatactttagacagtaaagcaagtagttcaactgatccagaggttggagatgatgctaaagacattgagatagacgaaagtaatcaaggggagtcctgggtacaggggctagctgagggtgactactgtgatcttagtgtagacgaacgcctcaatgctttggttgcacttattgccgttgctaacgagggaaattctatccgtgcaattctggagaagcagcgagtgctttgaaaaaacaattgtgggctgaggcacaacttgataagaggcgtataagggatgactttactagtaagatgcagtatgattcttatgtgagtatgaaggttgatacagatcaagaaaataatgctgctgaaattacccttacaccagtgcatgaccctattaaaaacaataacggaaatgccaatttgatgaacaatggtttgcttgttgataagcagaaccagcttactactggtgatgtatatcatcagcggaatggtgcaagccgagaatcgagtactaacgcagaaagcttgtctgttcagcaatatgcttcatctgagaaaactcgatctcagttgaaatccttcataggtcacaaggcagaacagctttatgtgtacaggtctctaccacttggacaagaccggagacggaaccggtattggcagttctctgcatcttcatcatcctatgaccctggttcgggaagaatcttttttgaatctagagatggatactggagggtcattgatacatcagaggcatttgaagctttggtagcttcccttgatactcgtggcatccgcgagtcacatttgcactcaattttgcaaagtatcgagccaaccttcaaggaagctgttgagaggaaaaggtgtgctaatttagaacacccaactggacggacttcggaaaatggaagtaatgaaagtccaaattgcaacaatgaatttggaagtccatgcagtaccctttctggtgttgcttctgataatcttatggcacattcagatattttcaagatagaggttgggcgcaatgaagctgagaagaattctatctcgaaaagggcttccgtgtttctgaaatggatctggagagagtgctacagtcaccaatctacatacgccatgagatatggaaagaagcggtgtcctgagttgattcactcttgtgattattgctaccagatatacttagctgaagaaaggcactgttcttgccacaaaacattcaaacacattcacaatttcttggaacactcatcacaatgtgaagaaaaacaaagaacagatcccaattggaagatgcaaactgtggacctttctgtacccgtaggattgagattgctaaggctgctcttagctaccattgaggccttagtaccggcagaagctcttctacctttttggacggatgggtatcggaaatcttggggtgcgaagttgtattctgcatcatctgccgaagaagtcttgcagatgcttagtgtgctggaaagtgcaataaagcgagactacttatcatctaactttgaaacgacaactgagttgcttaattcaagcacacaagattttgctactcagaattcggctggaggttctggatctgccactgcacttccatgggttcctgacactactgctgctgtagccttgagattgttagacttggatgcttccatctcatacacccttcatccaaagttgggttcaaataaggagcaagaatctggagatttcatgaaacttccaccgagatatccttctatgaataagggcaaacaagaaatagaacagttcaggcctattggttttgatcaacaggatggaacgttgctacctaacagcaatggtcgtagaggtcggggaaggggaggtagaggaggcagcaggggaggtagatctcgtggtcatggtggtagggttcccagaggtattggcagctcttccaggattcagttcagggatgacaatagtatgctctatgggagagccccacgaaagaatgcacgtggtggccgcggccgtggacgtggacgtggacgtggacttcgaactgttagacctcggcaaccatccgagctcagtgccagatcaattccaaaggcaaacctattgggcagttttagcatgttaagtaagacaaatcacactggcactacgcattctcccgagagctcaggtgcagaagagtgggcctttgagaggagggaatatgtgaaggatgatgagaacaatttggtctctcaatccgatgagtctgaggaaaatgtcgaacctatgaatgaggaatatggtgagcatatttcaggctatccaagagacaattccgactccagacccgtacagatgatgggtgatgggagcgacgataatgatgaggatgctgaaggagatgagggtgaggaagatggagaggactatgaagctgaagatcctggtgatgaggatgatgacgttgagatggatggggatgatgatgtcgaggtggatgaggatgatgacattgagatggatggggatgatgacattgaagatgatgatgacgacgacggtggagatggagcagccaacggagatgaggatggaggtggtacatcatcatattcttcagagtatagtgaatgatgagtgattgaagttgtgcaggcttgtggtaaatgatgtaacagaggctttggtgggctcaccaacgctaatgctgacttgaaaaactatttaggaggttgccagttctaaactgtcttgtgtggcttgttattagatagaagccactcaacattagaagatcggccttgtgtgtatacatacataccaattatcaaaagttgaaaatgagggtcgatcagctgtctgttttatgttcagctacttttttcattgttatatattgggagcgttctctttaagacggttgacatatttctaaactcactctcaattttgattttgtagcaagcttgaaaaaaattgctt

SEQ ID NO: 72611 - DNA, 5144 bp, Zea Mays
ggcactgagacagagcagcggcactgagagtctgagactgggtccctgagcaaccgaggcagccctttcgatcatatgagaccaagatgttttctggtcccaaaaccatgaaggcagtacatgaataccagtttcttcctgagcagccaagtgatacatatgagagggcaagccagtcacacttctatgattcttcagcagaagcgtcaaacttgagggtagctccgctgtctacaggatcacgctttctccatggagttgagcaggcacctagctatacatttcacagtcaatcatctggttctagccatttgactcaacgtggcagtggcaggtcacctattgcatcggcattgacagatcatgagggggctttgtcaaatattaatgctagcacaactccaatccacggccaacttggcatccctcaagttgccggattcgaaagccccctggcatcccctgaaagattgggttatcatgatgaagatacatatcacatggacagaaagcgcaagcataatgaggaagctaagattgctagggaggttgaggctcatgaaaagagaatcagaaaggagcttgagaagcaagatctgctgaacagaaagagagaagaacaaatgcggagagaaatggagagacatgatcgtgagagacgtaaggaagaggagaggttgatgcgtgaaaggcagagggaagaagagaaattccaaagggaacaaagacgcgaacacaagcgcatggagaagtttatgcagaaacaatctatacgagctgaaaaactgagacaaagagaggagcttcgacgagagaaagaagctgcgaggcagaaggctgctaatgagagggctacagctcgtagaattgcgcgagagagtatggaactgatggaagatgagcgcttggaactattagagttggcctctcgtagtaaagggctgccctcaatggtttctcttgatagtgacacattacagcagcttgattcattcagaggaatgctggggaagttccctcctgaaactgtgagactgaaggtgcctttttcaataaaaccatgggcagcttccgaggatattattggaaaccttttgatggcttggaagttttttgttaccttcggtgatgttcttgggcttccgtcatttacgttggatgaatttgtgcaggctcttcatgattatgattcaaggcttttaggtgaattgcatgtttctctgctgaaatctgttataaaagatattgaggatgttgcccggactccttcagttgctttaggtgtaaatcagagcagttctgctaatcctggaggtggtcacccacaaattgttgaaggggcctatgcttggggcatcaacatactcaactggcagagacacttgaactttcttacatggcctgaaatattgcgccaatttggtttatgtgctggttttgggcctcagttaaagaaaagtgatgctgaaattgtccatcaccgcgatgataacgagggtcgtaatggtgtagatgtcatttccattctgcgaaatggttcagccgctgtgaaggctgctgctttaatgaaagaaagagggtatactaatcgtcgtaggtctcgacaccgtctgacacctggaacagtaaagtttgctgctttccatgtactgtcacttgaagggagcaaaggtctcacaatattggaagttgcagaaaagatccagaaatctggacttagagaccttacaacaagtaagacaccagaggcatctatatctgcggcattgtcgagagacactaagctttttgaaagaacggcaccttcgacatattgtgttaaaactccttacagaaaggacccagatgattctgaggctgtgttggcagcggcacgtgaaaaaatcagggcgtttcagaatgcgcttccggagtgtgaagaagtcgagaaggatgtggatgaggctgagagggatgatgattctgaatgtgatgatgccgatgatgatgctgatggtgatgatgtgaatattgaagacaaggatgccaagtcgccccttgttggagctcaatatggtgcacaaattacagtagttggtgacataaagaaagaatcaaacatcgtgatgaacacatcagtgccaccaagcattcagattaaatctagtgcaagtgtaccatttcatactttagacagtaaagcaagtagttcaactgatccagaggttggagatgatgctaaagacattgagatagacgaaagtaatcaaggggagtcctgggtacaggggctagctgagggtgactactgtgatcttagtgtagacgaacgcctcaatgctttggttgcacttattgccgttgctaacgagggaaattctatccgtgcaattctggaggaacgcctagaagcagcgagtgctttgaaaaaacaattgtgggctgaggcacaacttgataagaggcgtataagggatgactttactagtaagatgcagtatgattcttatgtgagtatgaaggttgatacagatcaagaaaataatgctgctgaaattacccttacaccagtgcatgaccctattaaaaacaataacggaaatgccaatttgatgaacaatggtttgcttgttgataagcagaaccagcttactactggtgatgtatatcatcagcggaatggtgcaagccgagaatcgagtactaacgcagaaagcttgtctgttcagcaatatgcttcatctgagaaaactcgatctcagttgaaatccttcataggtcacaaggcagaacagctttatgtgtacaggtctctaccacttggacaagaccggagacggaaccggtattggcagttctctgcatcttcatcatcctatgaccctggttcgggaagaatcttttttgaatctagagatggatactggagggtcattgatacatcagaggcatttgaagctttggtagcttcccttgatactcgtggcatccgcgagtcacatttgcactcaattttgcaaagtatcgagccaaccttcaaggaagctgttgagaggaaaaggtgtgctaatttagaacacccaactggacggacttcggaaaatggaagtaatgaaagtccaaattgcaacaatgaatttggaagtccatgcagtaccctttctggtgttgcttctgataatcttatggcacattcagatattttcaagatagaggttgggcgcaatgaagctgagaagaattctatctcgaaaagggcttccgtgtttctgaaatggatctggagagagtgctacagtcaccaatctacatacgccatgagatatggaaagaagcggtgtcctgagttgattcactcttgtgattattgctaccagatatacttagctgaagaaaggcactgttcttgccacaaaacattcaaacacattcacaatttcttggaacactcatcacaatgtgaagaaaaacaaagaacagatcccaattggaagatgcaaactgtggacctttctgtacccgtaggattgagattgctaaggctgctcttagctaccattgaggccttagtaccggcagaagctcttctacctttttggacggatgggtatcggaaatcttggggtgcgaagttgtattctgcatcatctgccgaagaagtcttgcagatgcttagtgtgctggaaagtgcaataaagcgagactacttatcatctaactttgaaacgacaactgagttgcttaattcaagcacacaagattttgctactcagaattcggctggaggttctggatctgccactgcacttccatgggttcctgacactactgctgctgtagccttgagattgttagacttggatgcttccatctcatacacccttcatccaaagttgggttcaaataaggagcaagaatctggagatttcatgaaacttccaccgagatatccttctatgaataagggcaaacaagaaatagaacagttcaggcctattggttttgatcaacaggatggaacgttgctacctaacagcaatggtcgtagaggtcggggaaggggaggtagaggaggcagcaggggaggtagatctcgtggtcatggtggtagggttcccagaggtattggcagctcttccaggattcagttcagggatgacaatagtatgctctatgggagagccccacgaaagaatgcacgtggtggccgcggccgtggacgtggacgtggacgtggacttcgaactgttagacctcggcaaccatccgagctcagtgccagatcaattccaaaggcaaacctattgggcagttttagcatgttaagtaagacaaatcacactggcactacgcattctcccgagagctcaggtgcagaagagtgggcctttgagaggagggaatatgtgaaggatgatgagaacaatttggtctctcaatccgatgagtctgaggaaaatgtcgaacctatgaatgaggaatatggtgagcatatttcaggctatccaagagacaattccgactccagacccgtacagatgatgggtgatgggagcgacgataatgatgaggatgctgaaggagatgagggtgaggaagatggagaggactatgaagctgaagatcctggtgatgaggatgatgacgttgagatggatggggatgatgatgtcgaggtggatgaggatgatgacattgagatggatggggatgatgacattgaagatgatgatgacgacgacggtggagatggagcagccaacggagatgaggatggaggtggtacatcatcatattcttcagagtatagtgaatgatgagtgattgaagttgtgcaggcttgtggtaaatgatgtaacagaggctttggtgggctcaccaacgctaatgctgacttgaaaaactatttaggaggttgccagttctaaactgtcttgtgtggcttgttattagatagaagccactcaacattagaagatcggccttgtgtgtatacatacataccaattatcaaaagttgaaaatgagggtcgatcagctgtctgttttatgttcagctacttttttcattgttatatattgggagcgttctctttaagacggttgacatatttctaaactcactctcaattttgattttgtagcaagcttgaaaaaaattgctt

SEQ ID NO: 72612 - DNA, 1861 bp, Zea Mays
cttgctgatcggcggtccttctccggccgctgccgcatcgccgtcgccgacgcaaatacgcactggcgtagccaccgcccaccaatttccgcggcggttggttcagggaaacccagcagatctgcacagcagcgttcaataagattttcactgcaggcagagcagggcaggcagtgtaggctccatcagatccaacgccaccagctagcagcagcagcagcagcatggccaccaccagcacgcctcgcctcgccaccctcctggtgctcctggcggcggcgtcaccgctgctgagcgcagctcaaaaggccgccccgaaggctccggcggcggcgaaggcggcgccagggccggcggcgtcgtcgtcgtccggcgcgggcgcggcggacgcggcccctcccacagacgtgaacaaggcgctcaaggacgaccagttcagcgagttcaagcagctgctgcacgacacgcgcgtggacacgcagatcaacgcgcagctgacggacagctacaacgggctgaccatcatggcgcccaccaacgccgccttcgacaagatgaaggccggcgtgctcaacgggctgtcgccgcaggaccagatccagctcgtcctctactgcgtgctgccccgcttctacagcctctccatgctcggcaccctcgacggcaaggtcaacacgcagggctccggccacgacgggccctacaggtacgacatcaagcggtcgggcaacaacgtcaacgtgtccacgggcgtcaactggatgctgctgggcagccccgtcagcaaggacttcccgctcgccatctaccccgtcgacaaggtgccgctcccctacgagctgttcgggcccaagccgcccaccccggcgcccgcgccggccccggcacccgccaagtccaagaccaagaagaagaagaaggccgccggcatcgccgagccgcccacggccgacgacgacacctccgcctccgacgaccagaaggcggccgccacgcccggcgccgccggcagctgggccgccgccgcgctctcggcgctcgccgctgctgccctcggcgccggcctcttctgatggggagagggaggatagagtcagtcaccatcgttcagatttgagatcacacggcgcggcgctactgcggtggcgatcgatcgctcctgcgccgcgcgccgtgcattgccatacaatgtcgcacggtcgatacgatcatagagttggtgtgccccatccatccatgtacccatccatgcatttgtggctttattaattctttcttccccttcctttctctccccttttcctttcggcggatttctattggtgatttgtatttgtaacctaatgtgatgtacacaagtagtgcttcctctttcactggatggatctttggcctccgagatctggacctgcttttgtttgtttaatccgagcgtactatacgcttaacatactagctggttgcttgctgtagccgtgtcgcagtcgcttgtgttccaagcattttcttgcagtgaaaagagaacagggaagtgcagacagtgcaagagatcggacagacatgtgtggtagcagtgcgttggacaccacacatcttcccttttgctgcatcatgtcttttgcctgaaacacgcacatagcaatagcagcagttccctcctttgagatggctggctgggtctgtcagccagcgaggtaaaccgtgctcatcagcagagacgcattatattattggtggttgcaacgtgatcctggacccttttgcgctgcctcaccacagtcacgtgcagcctaccaactctggatctggtagccgtggcctcccgttgttctcgcggtggattcaaaccggccggtcggtg

SEQ ID NO: 72613 - DNA, 2836 bp, Zea Mays
gtccttctccggccgctgccgcatcgccgtcgccgacgcaaatacgcactggcgtagccaccgcccaccaatttccgcggcggttggttcagggaaacccagcagatctgcacagcagcgttcaataagattttcactgtaagaattcagacctctagtaagaattcagtgtaattcaggagggggctgctgtttgcatcgtatatacacgccggacgggttttcagtgcgcacgtcgtcgtggccgcgttgcgcagacgctgtcactgcatttacagctgtggtctgaagctgacacgcagcttgcattagaagaagaaagcaggggcgtagactgtcggtgggattcgtctttgcccagttgcctctcaaacacagcatgattaccatattattcttttcttttctttttattattagtacagacaaatcagcatacgtacatgatgcagcactgcatagctgtcaagcagccactttgtttgtctttccccgcgctagctgatgaatatacagaaactcccagtcccagccgacagaactgtcgcggccaccatatgcacggcatacatacagatgagaggccaggccaggctgtacacagatccaaagaaacatcttgcactgtatcgatgtagagaaaggaaaaacgaaaaaaagaagggaaaaggagatatttggggctccctttttgcgttgcagttgcagtgccattgcaggtaggacatcactctctggcaagttggcaagcctgactcgacgccacatgcggcagcccgcaagtacgtacgtgcaatcgtgcatacgcatacgagcagagtacaggcacgcctacctgtatggcgctaccaacgtgctgtcatggtagcttgctgagctgaagctccggtccggtggttggaggatcacatcgcggcgcacgtaaagagagaagagcgctggttggggtgccgtgacacctgacttgccacggtcgcaaagttcgccctataagggccagccaggctcgaacgtgccggtgccggtgctccccgcgcaaacacgcacgcacactctggacgcgcgctggctggctgcaactgcaaggcgtcgccaccaaccgcagctataataggtgtattgaacaggcaggcagagcagggcaggcagtgtaggctccatcagatccaacgccaccagctagcagcagcagcagcagcatggccaccaccagcacgcctcgcctcgccaccctcctggtgctcctggcggcggcgtcaccgctgctgagcgcagctcaaaaggccgccccgaaggctccggcggcggcgaaggcggcgccagggccggcggcgtcgtcgtcgtccggcgcgggcgcggcggacgcggcccctcccacagacgtgaacaaggcgctcaaggacgaccagttcagcgagttcaagcagctgctgcacgacacgcgcgtggacacgcagatcaacgcgcagctgacggacagctacaacgggctgaccatcatggcgcccaccaacgccgccttcgacaagatgaaggccggcgtgctcaacgggctgtcgccgcaggaccagatccagctcgtcctctactgcgtgctgccccgcttctacagcctctccatgctcggcaccctcgacggcaaggtcaacacgcagggctccggccacgacgggccctacaggtacgacatcaagcggtcgggcaacaacgtcaacgtgtccacgggcgtcaactggatgctgctgggcagccccgtcagcaaggacttcccgctcgccatctaccccgtcgacaaggtgccgctcccctacgagctgttcgggcccaagccgcccaccccggcgcccgcgccggccccggcacccgccaagtccaagaccaagaagaagaagaaggccgccggcatcgccgagccgcccacggccgacgacgacacctccgcctccgacgaccagaaggcggccgccacgcccggcgccgccggcagctgggccgccgccgcgctctcggcgctcgccgctgctgccctcggcgccggcctcttctgatggggagagggaggatagagtcagtcaccatcgttcagatttgagatcacacggcgcggcgctactgcggtggcgatcgatcgctcctgcgccgcgcgccgtgcattgccatacaatgtcgcacggtcgatacgatcatagagttggtgtgccccatccatccatgtacccatccatgcatttgtggctttattaattctttcttccccttcctttctctccccttttcctttcggcggatttctattggtgatttgtatttgtaacctaatgtgatgtacacaagtagtgcttcctctttcactggatggatctttggcctccgagatctggacctgcttttgtttgtttaatccgagcgtactatacgcttaacatactagctggttgcttgctgtagccgtgtcgcagtcgcttgtgttccaagcattttcttgcagtgaaaagagaacagggaagtgcagacagtgcaagagatcggacagacatgtgtggtagcagtgcgttggacaccacacatcttcccttttgctgcatcatgtcttttgcctgaaacacgcacatagcaatagcagcagttccctcctttgagatggctggctgggtctgtcagccagcgaggtaaaccgtgctcatcagcagagacgcattatattattggtggttgcaacgtgatcctggacccttttgcgctgcctcaccacagtcacgtgcagcctaccaactctggatctggtagccgtggcctcccgttgttctcgcggtggattcaaaccggccggtcggtg

SEQ ID NO: 72614 - DNA, 1927 bp, Zea Mays
tctctcctggcggcgacgatagggcgactaccgccgccaccgccttacgccaggtgcccaggtcgtctggcccttcggcgaagagcgccgaacagcttaggttaaaatcaaataatattttgtcggacggataattcaaggcctacaccagaaggaataacctaccccttgtgcggcaggccaacagctctctccatctctctctgcagtgttatttggtttactatatgcaattgcaggggagaaaactaaagaaccgttcactgcagttagaagcagcaactgctgtagccgcagcaggcttcttctacagtattttcggtttggaagttgcatgcggagagagacttttgtgtttacatctagttgacctttaaatctgcagctatgttataggtcaaaaaatcatcagttaacaggggcaaggacttgccttgatgacacaattattttggtctatctttcacttctcctgatatttaacttttttgagtaagtgtgcagattaggtcttaaaaagggattgggattaatattttattgccagagcttgagctgtataattatccatttacacagtgggctgtacagggggtaaattgacaggaatattacttggtgatcctataagataatgtgctgtgaaccctgatttgttttagctgcttgtgttcgttttgtctacttagtcttgcacactgaggacctttatcgaggttgtcagtctgcaagttgaatcatggcggagcacttggcttcgatctttggtaccgagaaggacagggtcaactgccctttttacttcaagattggggcttgtcgtcatggggatcgctgttctcgtctgcacaacaggccaactatatcgccaactcttgtgcttgctaacatgtatcagcgccctgatatgataactcctggagttgatgctcaaggccaacctattgatcctgagaagatgcaggagcattttgaggacttctatgaggacatctatgaggagttgggcaagtttggtgagattgagaatctgaatgtttgtgataaccttgctgaccacatgattgggaatgtctatgttcagttcagagaggaagaacaggcagctgcagcatacaatgctcttcaggggcgcttttactctgggcgccctataattgttgagtattctcctgtgaccgacttccgtgaagcaacctgtaggcagtttgaggagaacagctgcaaccgtggtggctactgtaatttcatgcatgtgaagcaaattggcagggatctcaggaggaagctgtatgggcgttctgcttccaggaggtaccatgcgagaagccgaagccctccaccgcaaaggaggggctatcgtgaggactatcaccaccgtgatcgtgacgagtaccgtggcggcggcggcggcggtggacggggaagaggtagcaggcatgacaggtatgatgatggagcaggtagaggcggcaggcatgacaggtacgatgatggagcgggtagaggcggcaggtatgagaggtatgatgatggaggaaggcgtaggcatggtagccccccgaggcgtggaaggagcccggtcagggaaagcagcgaggagcgaagggccaagattgagcagtggaaccgtgagcgggagtcaaaacagtgagctctctgtggcaactgttctgagacgtgttattcggtggacttgttgcttagctcgtctttcactgctatattctaagtatgcttgtgtggctgatatgcttgagtgcaggactcagttcaattttgtggttaaatcggacatgtaaactctatttatttccttgtggattgtgttgaatcatttgccattatgttatgctgacaattggtatcaaatcttttgtgatgagctattaagttatgatgatgatgtcagttgcagttggtcatt

SEQ ID NO: 72615 - DNA, 2012 bp, Zea Mays
ccctgtccgtccccgaaaagctcatcgtgcttataaatacaggacccacccgtatcgtcgtccgcttccgaatttccgatcgagctccagcccccaccggataccaccgcctccaccaaccgattccgttccgtccccccggccccgacctcgtcaccaccggtcacgctcgagcgggaggcttctctcgccacccaccagcggattcctacagctcccgcgccgatcgcgtcgcggacccgtccggagggagaggtgatgataaaggatatttgctgaccaaacttgcagtatttctccttaaggaaatagaaattggcgtcatgtcatatagaaatatgctctggacacatcagtccgttaatcctgaatgggagcaaggacatgtccaagtccaaccaagaagttcctattatgcaggcacttgttacatcgagatttgtcctcccaactagtatgtacaacccttgcatgccagcagcagctgtcaacatatatattcctcagactcaaagctttggactgggcaatgtgctaccaccatctttacatagtcaagtttccacaggaactattgatgagaataacagcagtttcaattttggtgatagtgccattggatccatgaaaaggaaaaccgcagtagttgccggaaaccatcacattcttcatggatttgctggctcaagttcatctgttcatgtccctcagaatcctgtgtatgggccatggaatgcttcatctcaatcaaattgtttacccagttctgcagcttcaaacctaccagaataccacaatagtaatgggtggccgttcttagaagaatcttctgcaaatgcttcaaacagtttcacttcagtggatgcttgtccagagttggtacctcatggtaacaatttatatccagcttgtcacataatacagtgcaatacatgggttccacagactgcaagtcatggagtaccacagtggggatatggtaatgtcatggtcaatcctccaggaaccgtagacatgccgaatggaaatattcaggattatcaagctgggcattcttctattcatgggccactacctcatttctgccagattcctttgcgtaccgcaggccttccgttagatccaagaatgctggctttcccattcaatgatgagcacacttttgggcatcaagtgcatccacctctgataaaccaagccaacaatggggctttaagaattctgccatatcagaatgctacagtgatggatcattcaaggatttatgaagcaggacatgttattgatgaacatagagatatgcgtttagatgtggataacatgacttatgaggagcttgtagcattgcaagagcagataggtgatgtcaatactggtttgacagaaagctatatccaagaaaacttgaggtccacttttcatgttccaggagcagctagcatttctgatcagttctgtgagctttcgttagagaacgatgcttgcataatatgccaggaggagtatgaagctagagaacttataggagcccttgaatgtggtcacaagtaccatgaggattgcataaagcaatggttgatggtgaaaaacgtgtgccccatctgcaagacaacagctttgtcatcagatagaaggaatggatgatcttcgccagtaacattattggttatttaccgcgtggcaagttagcgcgattttgtatatagacagggttgcctttatttgccgtcccccttcgctgtggacataaactgtacagatattattttgtaggatattttagacgttaaatggcaccatggtgtgtaaggctcccatggttgccttggtagatcctcccttcctttacattgtatttatctttactcttcaaaaaagaagcccgaaaacatgtatattttggaagtgaaagaaccgattttttttcttcaattctggagcttttttgctagagctgcatgagatttgccgctgaaatagggacttggttatgtttttttttcgctttctac

SEQ ID NO: 72616 - DNA, 2458 bp, Zea Mays
cgaaaagctcatcgtgcttataaatacaggacccacccgtatcgtcgtccgcttccgaatttccgatcgagctccagcccccaccggataccaccgcctccaccaaccgattccgttccgtccccccggccccgacctcgtcaccaccggtcacgctcgagcgggaggcttctctcgccacccaccagcggattcctacagctcccgcgccgatcgcgtcgcggacccgtccggagggagaggtgatgataaaggatatttgctgaccaaacttgcagtatttctccttaaggaaatagaaattggcgtcatgtcatatagaaatatgctctggacacatcagtccgttaatcctgaatgggagcaaggacatgtccaagtccaaccaagaagttcctattatgcaggcactgtaagtgattcatccaacctgggcatgcaagttgctgttggtgttccagtaaatactgttaatgttggtatatgtgatctgtggaatcatgagcgcctgcctgttcataattcatacccacatgccagtgttacatcgagatttgtcctcccaactagtatgtacaacccttgcatgccagcagcagctgtcaacatatatattcctcagactcaaagctttggactgggcaatgtgctaccaccatctttacatagtcaagtttccacaggaactattgatgagaataacagcagtttcaattttggtgatagtgccattggatccatgaaaaggaaaaccgcagtagttgccggaaaccatcacattcttcatggatttgctggctcaagttcatctgttcatgtccctcagaatcctgtgtatgggccatggaatgcttcatctcaatcaaattgtttacccagttctgcagcttcaaacctaccagaataccacaatagtaatgggtggccgttcttagaagaatcttctgcaaatgcttcaaacagtttcacttcagtggatgcttgtccagagttggtacctcatggtaacaatttatatccagcttgtcacataatacagtgcaatacatgggttccacagactgcaagtcatggagtaccacagtggggatatggtaatgtcatggtcaatcctccaggttagtaccttctgaataaagatatattcactcatctgatgttttgctcaatgatgaattaagaaatcatctcacagttcacagtttatttggattgataaaatatatttctatttttatttgcttcgctaataatattagcagtaaatttatgctatcatggattgactggccattgaatggaaatctctgagtgtgagatttagtgatgtacttggaaactcttgcttttaactttcttgttgttcatcaggaaccgtagacatgccgaatggaaatattcaggattatcaagctgggcattcttctattcatgggccactacctcatttctgccagattcctttgcgtagtatgcaagtacctcaaatacaagtaccccatcaacagttcatcggtaacaatgtggtgcatggtttaaatccttcagccgcaggccttccgttagatccaagaatgctggctttcccattcaatgatgagcacacttttgggcatcaagtgcatccacctctgataaaccaagccaacaatggggctttaagaattctgccatatcagaatgctacagtgatggatcattcaaggatttatgaagcaggacatgttattgatgaacatagagatatgcgtttagatgtggataacatgacttatgaggagcttgtagcattgcaagagcagataggtgatgtcaatactggtttgacagaaagctatatccaagaaaacttgaggtccacttttcatgttccaggagcagctagcatttctgatcagttctgtgagctttcgttagagaacgatgcttgcataatatgccaggaggagtatgaagctagagaacttataggagcccttgaatgtggtcacaagtaccatgaggattgcataaagcaatggttgatggtgaaaaacgtgtgccccatctgcaagacaacagctttgtcatcagatagaaggaatggatgatcttcgccagtaacattattggttatttaccgcgtggcaagttagcgcgattttgtatatagacagggttgcctttatttgccgtcccccttcgctgtggacataaactgtacagatattattttgtaggatattttagacgttaaatggcaccatggtgtgtaaggctcccatggttgccttggtagatcctcccttcctttacattgtatttatctttactcttcaaaaaagaagcccgaaaacatgtatattttggaagtgaaagaaccgattttttttcttcaattctggagcttttttgctagagctgcatgagatttgccgctgaaatagggacttggttatgtttttttttcgctttctac

SEQ ID NO: 72617 - DNA, 2929 bp, Zea Mays
ctcatcgtgcttataaatacaggacccacccgtatcgtcgtccgcttccgaatttccgatcgagctccagcccccaccggataccaccgcctccaccaaccgattccgttccgtccccccggccccgacctcgtcaccaccggtcacgctcgagcgggaggcttctctcgccacccaccagcggattcctacagctcccgcgccgatcgcgtcgcggacccgtccggaggataatgcatatgggctaatctgataagctggtgccttgcatgggaacccggttgtagctactacaccactacagtattgtgctatagtagttactgtctggctgctgctgatcagtcttgcacgcatgactgttactggaattttagttgcaattttgtaattgatgatgtgatgcttcgaaagatttatcttgtataaatatatgaacaattaaatgtgcatatagatcacaaattaagggacaatcttgttctgacaaacaaacaataaaagatcagtcatttttgtggtgcaagatataatggccctatggacagccaatgctactgaaacttgaatcgcagattatatatatattgcaaaatgttgtatgatacaaagtgtatgcgcctttagtaaacacagtcctcttcatataactgattaacatttttgttacctataaggttgtgagatcaagttatcaggacatctgcatatcagcaagaatgaaactattttaccttttccccctaaatatggactattcaatatcttctgctagctaggcccactcatgtgcaagtttcttttgtcaatattttgctcccacttacaaacttcagcatgtactgggaattatcttgtctgctaacatcatttacttaaacgtgacttgctttacattttacatctctgttatccatattagattgaatgctgatcgtgtttggtctatctcgtatgcagggagaggtgatgataaaggatatttgctgaccaaacttgcagtatttctccttaaggaaatagaaattggcgtcatgtcatatagaaatatgctctggacacatcagtccgttaatcctgaatgggagcaaggacatgtccaagtccaaccaagaagttcctattatgcaggcactgtaagtgattcatccaacctgggcatgcaagttgctgttggtgttccagtaaatactgttaatgttggtatatgtgatctgtggaatcatgagcgcctgcctgttcataattcatacccacatgccagtgttacatcgagatttgtcctcccaactagtatgtacaacccttgcatgccagcagcagctgtcaacatatatattcctcagactcaaagctttggactgggcaatgtgctaccaccatctttacatagtcaagtttccacaggaactattgatgagaataacagcagtttcaattttggtgatagtgccattggatccatgaaaaggaaaaccgcagtagttgccggaaaccatcacattcttcatggatttgctggctcaagttcatctgttcatgtccctcagaatcctgtgtatgggccatggaatgcttcatctcaatcaaattgtttacccagttctgcagcttcaaacctaccagaataccacaatagtaatgggtggccgttcttagaagaatcttctgcaaatgcttcaaacagtttcacttcagtggatgcttgtccagagttggtacctcatggtaacaatttatatccagcttgtcacataatacagtgcaatacatgggttccacagactgcaagtcatggagtaccacagtggggatatggtaatgtcatggtcaatcctccaggaaccgtagacatgccgaatggaaatattcaggattatcaagctgggcattcttctattcatgggccactacctcatttctgccagattcctttgcgtagtatgcaagtacctcaaatacaagtaccccatcaacagttcatcggtaacaatgtggtgcatggtttaaatccttcagccgcaggccttccgttagatccaagaatgctggctttcccattcaatgatgagcacacttttgggcatcaagtgcatccacctctgataaaccaagccaacaatggggctttaagaattctgccatatcagaatgctacagtgatggatcattcaaggatttatgaagcaggacatgttattgatgaacatagagatatgcgtttagatgtggataacatgacttatgaggagcttgtagcattgcaagagcagataggtgatgtcaatactggtttgacagaaagctatatccaagaaaacttgaggtccacttttcatgttccaggagcagctagcatttctgatcagttctgtgagctttcgttagagaacgatgcttgcataatatgccaggaggagtatgaagctagagaacttataggagcccttgaatgtggtcacaagtaccatgaggattgcataaagcaatggttgatggtgaaaaacgtgtgccccatctgcaagacaacagctttgtcatcagatagaaggaatggatgatcttcgccagtaacattattggttatttaccgcgtggcaagttagcgcgattttgtatatagacagggttgcctttatttgccgtcccccttcgctgtggacataaactgtacagatattattttgtaggatattttagacgttaaatggcaccatggtgtgtaaggctcccatggttgccttggtagatcctcccttcctttacattgtatttatctttactcttcaaaaaagaagcccgaaaacatgtatattttggaagtgaaagaaccgattttttttcttcaattctggagcttttttgctagagctgcatgagatttgccgctgaaatagggacttggttatgtttttttttcgctttctac

SEQ ID NO: 72618 - DNA, 2064 bp, Zea Mays
ggttgatgcagctaacctaatttcagaactcggaatgtgggccgtgagcttggagtcaacattttcggtgatggagcggcggaattggacttgcgggagaggtgatgataaaggatatttgctgaccaaacttgcagtatttctccttaaggaaatagaaattggcgtcatgtcatatagaaatatgctctggacacatcagtccgttaatcctgaatgggagcaaggacatgtccaagtccaaccaagaagttcctattatgcaggcactgtaagtgattcatccaacctgggcatgcaagttgctgttggtgttccagtaaatactgttaatgttggtatatgtgatctgtggaatcatgagcgcctgcctgttcataattcatacccacatgccagtgttacatcgagatttgtcctcccaactagtatgtacaacccttgcatgccagcagcagctgtcaacatatatattcctcagactcaaagctttggactgggcaatgtgctaccaccatctttacatagtcaagtttccacaggaactattgatgagaataacagcagtttcaattttggtgatagtgccattggatccatgaaaaggaaaaccgcagtagttgccggaaaccatcacattcttcatggatttgctggctcaagttcatctgttcatgtccctcagaatcctgtgtatgggccatggaatgcttcatctcaatcaaattgtttacccagttctgcagcttcaaacctaccagaataccacaatagtaatgggtggccgttcttagaagaatcttctgcaaatgcttcaaacagtttcacttcagtggatgcttgtccagagttggtacctcatggtaacaatttatatccagcttgtcacataatacagtgcaatacatgggttccacagactgcaagtcatggagtaccacagtggggatatggtaatgtcatggtcaatcctccaggaaccgtagacatgccgaatggaaatattcaggattatcaagctgggcattcttctattcatgggccactacctcatttctgccagattcctttgcgtagtatgcaagtacctcaaatacaagtaccccatcaacagttcatcggtaacaatgtggtgcatggtttaaatccttcagccgcaggccttccgttagatccaagaatgctggctttcccattcaatgatgagcacacttttgggcatcaagtgcatccacctctgataaaccaagccaacaatggggctttaagaattctgccatatcagaatgctacagtgatggatcattcaaggatttatgaagcaggacatgttattgatgaacatagagatatgcgtttagatgtggataacatgacttatgaggagcttgtagcattgcaagagcagataggtgatgtcaatactggtttgacagaaagctatatccaagaaaacttgaggtccacttttcatgttccaggagcagctagcatttctgatcagttctgtgagctttcgttagagaacgatgcttgcataatatgccaggaggagtatgaagctagagaacttataggagcccttgaatgtggtcacaagtaccatgaggattgcataaagcaatggttgatggtgaaaaacgtgtgccccatctgcaagacaacagctttgtcatcagatagaaggaatggatgatcttcgccagtaacattattggttatttaccgcgtggcaagttagcgcgattttgtatatagacagggttgcctttatttgccgtcccccttcgctgtggacataaactgtacagatattattttgtaggatattttagacgttaaatggcaccatggtgtgtaaggctcccatggttgccttggtagatcctcccttcctttacattgtatttatctttactcttcaaaaaagaagcccgaaaacatgtatattttggaagtgaaagaaccgattttttttcttcaattctggagcttttttgctagagctgcatgagatttgccgctgaaatagggacttggttatgtttttttttcgctttctac

SEQ ID NO: 72619 - DNA, 1991 bp, Zea Mays
accactacagtattgtgctataggagaggtgatgataaaggatatttgctgaccaaacttgcagtatttctccttaaggaaatagaaattggcgtcatgtcatatagaaatatgctctggacacatcagtccgttaatcctgaatgggagcaaggacatgtccaagtccaaccaagaagttcctattatgcaggcactgtaagtgattcatccaacctgggcatgcaagttgctgttggtgttccagtaaatactgttaatgttggtatatgtgatctgtggaatcatgagcgcctgcctgttcataattcatacccacatgccagtgttacatcgagatttgtcctcccaactagtatgtacaacccttgcatgccagcagcagctgtcaacatatatattcctcagactcaaagctttggactgggcaatgtgctaccaccatctttacatagtcaagtttccacaggaactattgatgagaataacagcagtttcaattttggtgatagtgccattggatccatgaaaaggaaaaccgcagtagttgccggaaaccatcacattcttcatggatttgctggctcaagttcatctgttcatgtccctcagaatcctgtgtatgggccatggaatgcttcatctcaatcaaattgtttacccagttctgcagcttcaaacctaccagaataccacaatagtaatgggtggccgttcttagaagaatcttctgcaaatgcttcaaacagtttcacttcagtggatgcttgtccagagttggtacctcatggtaacaatttatatccagcttgtcacataatacagtgcaatacatgggttccacagactgcaagtcatggagtaccacagtggggatatggtaatgtcatggtcaatcctccaggaaccgtagacatgccgaatggaaatattcaggattatcaagctgggcattcttctattcatgggccactacctcatttctgccagattcctttgcgtagtatgcaagtacctcaaatacaagtaccccatcaacagttcatcggtaacaatgtggtgcatggtttaaatccttcagccgcaggccttccgttagatccaagaatgctggctttcccattcaatgatgagcacacttttgggcatcaagtgcatccacctctgataaaccaagccaacaatggggctttaagaattctgccatatcagaatgctacagtgatggatcattcaaggatttatgaagcaggacatgttattgatgaacatagagatatgcgtttagatgtggataacatgacttatgaggagcttgtagcattgcaagagcagataggtgatgtcaatactggtttgacagaaagctatatccaagaaaacttgaggtccacttttcatgttccaggagcagctagcatttctgatcagttctgtgagctttcgttagagaacgatgcttgcataatatgccaggaggagtatgaagctagagaacttataggagcccttgaatgtggtcacaagtaccatgaggattgcataaagcaatggttgatggtgaaaaacgtgtgccccatctgcaagacaacagctttgtcatcagatagaaggaatggatgatcttcgccagtaacattattggttatttaccgcgtggcaagttagcgcgattttgtatatagacagggttgcctttatttgccgtcccccttcgctgtggacataaactgtacagatattattttgtaggatattttagacgttaaatggcaccatggtgtgtaaggctcccatggttgccttggtagatcctcccttcctttacattgtatttatctttactcttcaaaaaagaagcccgaaaacatgtatattttggaagtgaaagaaccgattttttttcttcaattctggagcttttttgctagagctgcatgagatttgccgctgaaatagggacttggttatgtttttttttcgctttctac

SEQ ID NO: 72620 - DNA, 1302 bp, Zea Mays
gaaagtaatcaagcattcaggcccacgatacacggcccgctagggtttctctccccagcacataaatactcctcggcctccaaattctccatagtcagccgccatcaccgctgttaggttctaccaggagaccttcggcgtccctccggccacgcgagctcgccgaaatggtcgcccacaggttccatcagtaccaggtggtgggtcgcgcgctgccgaccccaaccgatgagcaccccaagatctaccgcatgaagctctgggccaccaacgaggttcgcgccaagtccaagttctggtacttcctgagaaagctcaagaaggtgaagaagagcaatggccagatgcttgccatcaacgagatctttgagcgcaacccgaccaccatcaagaactatggcatctggctgcgctaccagagcaggactggttaccacaacatgtacaaggagtaccgcgacaccaccctgaacggcgcagtggagcagatgtacaacgagatggcctcccgccaccgcgtgaggtccccctgcatacagatcatcaagacagcgacggcccaaccttttcatgtgagaggtatatcgtacccgtgttctgtgtcttgagcgcccgagagataaggattcttcctgtgcaagtttttggtgccctgttcattgagcactttgtttgattccagttaaggatttgaatgatgctgtgtaaaacaatgacttgtctgcaattagttatcaactactgctatttacctgccctgacttttggtggtggcactgctggttctcgaggtgcttactctgtctaaattgcaggatagttgttggggggaaaaaattttgtgctgcggcctgctgattgcctgtagtattttcgtctaagacacaggattgtatgccgcgggtttggaacccttgctatatcacccagaagaaacagcagtaaggggccttgacaagagttggcggggggcaaaatttactgctgtgatggtttcatgttgcttgcacatcgccaatgcattcacagcacatggacgggtggggaggacacagcgcacgctcgcggctgccttgctggatctagatgtcactagctccctccaaggatcgaggtgatggtatctgtagcccttgcactaccagcccgctgttcaagctgtctcgactgagatcctgggctgttctcaaagtatttgcagccacggctgttcaggagctctgttttagctgttgcttgccaccttttgacattcgtgtctgccgaggagtaatgttcaagagaagaagaaaaaaaaaagaa

SEQ ID NO: 72621 - DNA, 1587 bp, Zea Mays
cacttcttccgccacacccgaaatcaacgagcatcttcagactagtctagcaagctagctcctcacggaacctgcgctccgatccgccacctctcttatctgaaaacctccagagtccagcctcccttccgattccacctccaagctcccagtcccagccatggcgtctcatgatcatcaccactcccactcccacgacgaccaccaccaccattcccacggggacggcggtggccatgcggctgggggatcgtgggtaggggaggacggacgcgtgtggcactcccacgacggcctcgcgccccactcccacgagcccatctactcccccggcgacttcaccaagcgcgcgccgccgctcgcctcgcgcgacttcgctgaccgcgccttcaccgtcggcattggcggccccgtaggcaccggcttaatctggggttaggtttgttcttgatggaggcttctggacatcgatgggatctttgtcgataaagcgcttgcttgtgctgattcataccctttcgttggttttgttcctgaagctccgtcctgacatttggagtggaaaactgccctcatgctagcattgtgcagatttctacgcgacaagtatagtcttgcagctgtcacaaatgatatattcacaaaagaagatggagaattcttaattaaacatggagcgctccctgaagaacgtatacgtgcagtggaaactggaggctgccctcatgcggctattcgcgaagacatcagcataaatcttggtcctctggaggagctatcgaacttgtacaaagctgatttgctactctgtgaatctggaggagataacttggcagctaacttcagcagagaattagcagactacataatctacattatcgatgtctctggtggggacaagataccaagaaaaggtggccctgggataacccaggccgatctgttggtaataaacaagacagacctagcacctgctgttggagctgatctgtctgtaatggagcgagacgcacttcgcatgcgcgaaggagggccctttgtgtttgcacaggtgaaacatggagtgggcgtggaggggatcgtgaaccatattctgcaggcgtgggagatcgcgactggtaataagcggcgataagatctcacgacttggggccatatgttggatgcagatttgattcagtcggcacttccacatgcatgtgtcatctgttcgtttctcaataaattctgcgtcatttgctgctgattgtacttgacaagtagagacatggatggactcttaaaattccatccatgtgttaaatgacatattcgagacatccttttctcaataaactctgcatcatttggtgaattgcacttgagaagtaaagacatggagccttaaaattccatacttgagtttaatggcacatttgagatatcctttttctccttaaaattccatagcttcgtggattcggtattaacgctctggactacgagtgggaggttaatagtctgcaagcccgctcagtgaatgcatgaacgctggcatgttgtgaagccgttcagtgaaagttctgaatatggaaaagaaaaaaaaaa

SEQ ID NO: 72622 - DNA, 2366 bp, Zea Mays
cttccgccacacccgaaatcaacgagcatcttcagactagtctagcaagctagctcctcacggaacctgcgctccgatccgccacctctcttatctgaaaacctccagagtccagcctcccttccgattccacctccaagctcccagtcccagccatggcgtctcatgatcatcaccactcccactcccacgacgaccaccaccaccattcccacggggacggcggtggccatgcggctgggggatcgtgggtaggggaggacggacgcgtgtggcactcccacgacggcctcgcgccccactcccacgagcccatctactcccccggcgacttcaccaagcgcgcgccgccgctcgcctcgcgcgacttcgctgaccgcgccttcaccgtcggcattggcggccccgtaggcaccggcttaatctggggttaggtttgttcttgatggaggcttctggacatcgatgggatctttgtcgataaagcgcttgcttgtgctgattcataccctttcgttggttttgttcctgaagctccgtcctgacatttggagtggaaaactgccctcatgctagcattgtgcagatttctacgcgacaagtatagtcttgcagctgtcacaaatgatatattcacaaaagaagatggagaattcttaattaaacatggagcgctccctgaagaacgtatacgtgcagtggaaactggaggctgccctcatgcggctattcgcgaagacatcagcataaatcttggtcctctggaggagctatcgaacttgtacaaagctgatttgctactctgtgaatctggaggaggtatatttttttacttgatccaaaataaatgtaggtcatttctattgttatgcatgttagaatctacgccggagagacaaccctgcaggttgccggcgagctcctacctcccaggtaagtttctccaggtatgagaaacctcactggtactcacacgcacgcgaacactttagagagaaacacagcagatttggtggcgtcctattgacgccttttcttagcctctaaggccatatatttatagactatcataaggaaacaaactagctattacaagggaataatccagactgctatcagtcctgatcttgctgattggatccgtcaatataagactgatccactaccatacttgctatttcctaaaacagaataagtaaactagcaccaatcaaggattactttcctaacaatgcatatatccgtatcaacctacagaatgtttttactggatctaaactcaatctaggtcattcctattgtcattgatatatctgtgcaaagtgcaaacctacatacccatctaaacattatttcagagtaatagtttctacatggatcatgttgcttctatggctgtctcatgtttgatactggacattagaatatgctcctttcaagttcttgcgtaaaagaaaattttgcattctgattctactgttttttttggagcatcatgttagctgaaacctcaggtgtcctgaatatgtcaagcatccctctggttctgaaaaatttcaacaatccagcattaaagagtgccatttgtgccttttccatgcagataacttggcagctaacttcagcagagaattagcagactacataatctacattatcgatgtctctggtggggacaagataccaagaaaaggtggccctgggataacccaggccgatctgttggtaataaacaagacagacctagcacctgctgttggagctgatctgtctgtaatggagcgagacgcacttcgcatgcgcgaaggagggccctttgtgtttgcacaggtgaaacatggagtgggcgtggaggggatcgtgaaccatattctgcaggcgtgggagatcgcgactggtaataagcggcgataagatctcacgacttggggccatatgttggatgcagatttgattcagtcggcacttccacatgcatgtgtcatctgttcgtttctcaataaattctgcgtcatttgctgctgattgtacttgacaagtagagacatggatggactcttaaaattccatccatgtgttaaatgacatattcgagacatccttttctcaataaactctgcatcatttggtgaattgcacttgagaagtaaagacatggagccttaaaattccatacttgagtttaatggcacatttgagatatcctttttctccttaaaattccatagcttcgtggattcggtattaacgctctggactacgagtgggaggttaatagtctgcaagcccgctcagtgaatgcatgaacgctggcatgttgtgaagccgttcagtgaaagttctgaatatggaaaagaaaaaaaaaa

SEQ ID NO: 72623 - DNA, 2171 bp, Zea Mays
atcttcagactagtctagcaagctagctcctcacggaacctgcgctccgatccgccacctctcttatctgaaaacctccagagtccagcctcccttccgattccacctccaagctcccagtcccagccatggcgtctcatgatcatcaccactcccactcccacgacgaccaccaccaccattcccacggggacggcggtggccatgcggctgggggatcgtgggtaggggaggacggacgcgtgtggcactcccacgacggcctcgcgccccactcccacgagcccatctactcccccggcgacttcaccaagcgcgcgccgccgctcgcctcgcgcgacttcgctgaccgcgccttcaccgtcggcattggcggccccgtaggcaccggatttctacgcgacaagtatagtcttgcagctgtcacaaatgatatattcacaaaagaagatggagaattcttaattaaacatggagcgctccctgaagaacgtatacgtgcagtggaaactggaggctgccctcatgcggctattcgcgaagacatcagcataaatcttggtcctctggaggagctatcgaacttgtacaaagctgatttgctactctgtgaatctggaggaggtatatttttttacttgatccaaaataaatgtaggtcatttctattgttatgcatgttagaatctacgccggagagacaaccctgcaggttgccggcgagctcctacctcccaggtaagtttctccaggtatgagaaacctcactggtactcacacgcacgcgaacactttagagagaaacacagcagatttggtggcgtcctattgacgccttttcttagcctctaaggccatatatttatagactatcataaggaaacaaactagctattacaagggaataatccagactgctatcagtcctgatcttgctgattggatccgtcaatataagactgatccactaccatacttgctatttcctaaaacagaataagtaaactagcaccaatcaaggattactttcctaacaatgcatatatccgtatcaacctacagaatgtttttactggatctaaactcaatctaggtcattcctattgtcattgatatatctgtgcaaagtgcaaacctacatacccatctaaacattatttcagagtaatagtttctacatggatcatgttgcttctatggctgtctcatgtttgatactggacattagaatatgctcctttcaagttcttgcgtaaaagaaaattttgcattctgattctactgttttttttggagcatcatgttagctgaaacctcaggtgtcctgaatatgtcaagcatccctctggttctgaaaaatttcaacaatccagcattaaagagtgccatttgtgccttttccatgcagataacttggcagctaacttcagcagagaattagcagactacataatctacattatcgatgtctctggtggggacaagataccaagaaaaggtggccctgggataacccaggccgatctgttggtaataaacaagacagacctagcacctgctgttggagctgatctgtctgtaatggagcgagacgcacttcgcatgcgcgaaggagggccctttgtgtttgcacaggtgaaacatggagtgggcgtggaggggatcgtgaaccatattctgcaggcgtgggagatcgcgactggtaataagcggcgataagatctcacgacttggggccatatgttggatgcagatttgattcagtcggcacttccacatgcatgtgtcatctgttcgtttctcaataaattctgcgtcatttgctgctgattgtacttgacaagtagagacatggatggactcttaaaattccatccatgtgttaaatgacatattcgagacatccttttctcaataaactctgcatcatttggtgaattgcacttgagaagtaaagacatggagccttaaaattccatacttgagtttaatggcacatttgagatatcctttttctccttaaaattccatagcttcgtggattcggtattaacgctctggactacgagtgggaggttaatagtctgcaagcccgctcagtgaatgcatgaacgctggcatgttgtgaagccgttcagtgaaagttctgaatatggaaaagaaaaaaaaaa

SEQ ID NO: 72624 - DNA, 1356 bp, Zea Mays
atcttcagactagtctagcaagctagctcctcacggaacctgcgctccgatccgccacctctcttatctgaaaacctccagagtccagcctcccttccgattccacctccaagctcccagtcccagccatggcgtctcatgatcatcaccactcccactcccacgacgaccaccaccaccattcccacggggacggcggtggccatgcggctgggggatcgtgggtaggggaggacggacgcgtgtggcactcccacgacggcctcgcgccccactcccacgagcccatctactcccccggcgacttcaccaagcgcgcgccgccgctcgcctcgcgcgacttcgctgaccgcgccttcaccgtcggcattggcggccccgtaggcaccgggtcacaaatgatatattcacaaaagaagatggagaattcttaattaaacatggagcgctccctgaagaacgtatacgtgcagtggaaactggaggctgccctcatgcggctattcgcgaagacatcagcataaatcttggtcctctggaggagctatcgaacttgtacaaagctgatttgctactctgtgaatctggaggagataacttggcagctaacttcagcagagaattagcagactacataatctacattatcgatgtctctggtggggacaagataccaagaaaaggtggccctgggataacccaggccgatctgttggtaataaacaagacagacctagcacctgctgttggagctgatctgtctgtaatggagcgagacgcacttcgcatgcgcgaaggagggccctttgtgtttgcacaggtgaaacatggagtgggcgtggaggggatcgtgaaccatattctgcaggcgtgggagatcgcgactggtaataagcggcgataagatctcacgacttggggccatatgttggatgcagatttgattcagtcggcacttccacatgcatgtgtcatctgttcgtttctcaataaattctgcgtcatttgctgctgattgtacttgacaagtagagacatggatggactcttaaaattccatccatgtgttaaatgacatattcgagacatccttttctcaataaactctgcatcatttggtgaattgcacttgagaagtaaagacatggagccttaaaattccatacttgagtttaatggcacatttgagatatcctttttctccttaaaattccatagcttcgtggattcggtattaacgctctggactacgagtgggaggttaatagtctgcaagcccgctcagtgaatgcatgaacgctggcatgttgtgaagccgttcagtgaaagttctgaatatggaaaagaaaaaaaaaa

SEQ ID NO: 72625 - DNA, 2474 bp, Zea Mays
atcttcagactagtctagcaagctagctcctcacggaacctgcgctccgatccgccacctctcttatctgaaaacctccagagtccagcctcccttccgattccacctccaagctcccagtcccagccatggcgtctcatgatcatcaccactcccactcccacgacgaccaccaccaccattcccacggggacggcggtggccatgcggctgggggatcgtgggtaggggaggacggacgcgtgtggcactcccacgacggcctcgcgccccactcccacgagcccatctactcccccggcgacttcaccaagcgcgcgccgccgctcgcctcgcgcgacttcgctgaccgcgccttcaccgtcggcattggcggccccgtaggcaccgggtgagctcggatgctttctactacttgcttttactccttccaaattccaatctctggtaggctggtagcctacatttacatctcataattccggtgcggttacttggcggaagatgtgaaattgtggcggccggagagagacgcgcctccacgacatctgtgtgaagtttctttcgtaattcctacttgcaccggtgcaaattgcagcttaatctggggttaggtttgttcttgatggaggcttctggacatcgatgggatctttgtcgataaagcgcttgcttgtgctgattcataccctttcgttggttttgttcctgaagctccgtcctgacatttggagtggaaaactgccctcatgctagcattgtgcagatttctacgcgacaagtatagtcttgcagctgtcacaaatgatatattcacaaaagaagatggagaattcttaattaaacatggagcgctccctgaagaacgtatacgtgcagtggaaactggaggctgccctcatgcggctattcgcgaagacatcagcataaatcttggtcctctggaggagctatcgaacttgtcatttctattgttatgcatgttagaatctacgccggagagacaaccctgcaggttgccggcgagctcctacctcccaggtaagtttctccaggtatgagaaacctcactggtactcacacgcacgcgaacactttagagagaaacacagcagatttggtggcgtcctattgacgccttttcttagcctctaaggccatatatttatagactatcataaggaaacaaactagctattacaagggaataatccagactgctatcagtcctgatcttgctgattggatccgtcaatataagactgatccactaccatacttgctatttcctaaaacagaataagtaaactagcaccaatcaaggattactttcctaacaatgcatatatccgtatcaacctacagaatgtttttactggatctaaactcaatctaggtcattcctattgtcattgatatatctgtgcaaagtgcaaacctacatacccatctaaacattatttcagagtaatagtttctacatggatcatgttgcttctatggctgtctcatgtttgatactggacattagaatatgctcctttcaagttcttgcgtaaaagaaaattttgcattctgattctactgttttttttggagcatcatgttagctgaaacctcaggtgtcctgaatatgtcaagcatccctctggttctgaaaaatttcaacaatccagcattaaagagtgccatttgtgccttttccatgcagataacttggcagctaacttcagcagagaattagcagactacataatctacattatcgatgtctctggtggggacaagataccaagaaaaggtggccctgggataacccaggccgatctgttggtaataaacaagacagacctagcacctgctgttggagctgatctgtctgtaatggagcgagacgcacttcgcatgcgcgaaggagggccctttgtgtttgcacaggtgaaacatggagtgggcgtggaggggatcgtgaaccatattctgcaggcgtgggagatcgcgactggtaataagcggcgataagatctcacgacttggggccatatgttggatgcagatttgattcagtcggcacttccacatgcatgtgtcatctgttcgtttctcaataaattctgcgtcatttgctgctgattgtacttgacaagtagagacatggatggactcttaaaattccatccatgtgttaaatgacatattcgagacatccttttctcaataaactctgcatcatttggtgaattgcacttgagaagtaaagacatggagccttaaaattccatacttgagtttaatggcacatttgagatatcctttttctccttaaaattccatagcttcgtggattcggtattaacgctctggactacgagtgggaggttaatagtctgcaagcccgctcagtgaatgcatgaacgctggcatgttgtgaagccgttcagtgaaagttctgaatatggaaaagaaaaaaaaaa

SEQ ID NO: 72626 - DNA, 2664 bp, Zea Mays
cttccccaccccgcgtgagccgccgcctccccgcctcccccttcagtccgccgctctcccgcggatcgttcaccttcactccattctgaggatctcatcagcacgctctccggcgcggcggcggcccttccttcgagactaggagctcgccgtcggagtcatccccttccccaatccctgcgacgcgttcggccggtccgtgcgggaggaggacgacgatgaggcgctgcgctgggcggccatcgagcagctgcccatctacgaccgcatgcgcaagggcatcctcacgggggccgcggccggcgtcgaggaggtggacatccaggggctcggcatgcaggagcgcaagaacctcatcgagcgcctcgtgcgcaccgccgaggaggacaacgagcgcttcctgctcaagctccgcgaccgcatggagcgggttgggatcgataatccgacgatagaggtgcgttttgagaacctgaacatcgacgccgaggcctacgtcggcaaccgaggtgtccccacgatgaccaacttcttctccaacaaagtcatggatgtactaagtgctatgcacatcgtctctagcgggaagaggcctgtctccatcgttcacgatatcagtggggtcataagacccggcagtctacttctggctttggcagggaaacttgactccaatctgaaggtgtcaggaagagtgacttacaatggtcatgacatggatgaatttgtccctcagaggacatcggcatacatcaggcggcacgatgttcacgtcggcgaaatgacgacatgcttactgagctttcaagaagggagaaagaagccaacattaaaaccagatcctgatgtcgatgtttacatgaaggctatctccgtggaaggtcaggagagcgtggttacagattacatcctcaagattgcagattctgggtctggagatctgtgcggatacaatggttggagactctatgatcagaggtatctcaggaggacaaaagaagcgtgtcacaaccgaacgatggcacagcaacagcttctttcttgctaaccattgctagacataacttgacgaaaagaatagagcacatagaaaacgttctcaatgatttgaagaaatcacatctgttgaaccagcaaagcagcagcagcagcagtaagaaagaaaggagtagcaggcatgaggatattgagtacctgtacagaagcattgagcggaaggtaattggtcgagataaggagcgtgagaagcttatcaggtctgggaagagtaccctggcacaatatgtctgtgattatgagaaggccgaaggccaacattttgaccctgtcatgttcattcatgtgtctcagacatttagggtggataagatatttcgtgacatgctgagggagatcaggaaggacaggcaatctgacagcaacagtgttaaatgcctacacgatgagctgaaggaaaatgcttcttgttggtactggatgatctctgggtcactcagtggaagtcgggttctggtgacagctcagaagaaagatgtagctgcagcgataggcgctgaggagcagatcccgattccggatatggaagagaagcagtacttttcgatgttcatgcactacgccctagaaggcaagcgtgttggtgacggaaggtttatagcaatagggagaaaaatcgcgaaaaagctcggcagatcacccattgcagcagtcacagtggcagcacggcttcggagcaacagcagcatcgatttctgggagacaacagcgaaccttgacatgttggacgaaacaatgggagctctgtggtggagctatcagcagataggtgtagacgtccggcgatgctttgcatactgcagcacttttcccagaggatacaggttagtacgaggcgagttggttcacatctggatagtgcaagggttcataaacaccagggttaatgcaactgagcaaccagaagatataggcctgcactacattaacgaactgcggaccttctcatttctgcagatagaaagaacagtttttggcactgaaacggaggcgttcacgattcatgacctgctacacgagttggcagagagggtcagcggaagcgaatgcttcagagttgtttcaaatagctcaccaaaacatattccgcaggaggttcgccatctctttgttggcactgggactgacagtagagcagctatcgcaaagaaaattctaggtctggtaaatctacgcactctcatcatcgtcgaagagtacagcgaaaacaagaggaaaacatttgcagctgaagatgatgaggaacgtgtggagcttattttcccaagcacatttagcaaactttaccatatgcagagcatatatagtgagaaaatttcctgcgccaaagacgtgacacaaaatctcacttccttgcggcacagctcttcgtcgtggatgggatttgcaaacgttggcaggctgacgtcgctccaatcgctacggtacttccaagtgaagagagaacaggggcacgaactgaagcagctgaagcacctgaacaaccttcgaggcactctggcgattgacggtctgggggtcgtcagaagcaaagaggaagctcttgaagcacacctagccagcaaggaacaactaaggaaactggagctgacattctctgtccgttag

SEQ ID NO: 72627 - DNA, 3078 bp, Zea Mays
ggggaagggttttggaattaggccgccggacgccgttgcgtgggagagagcaaagtgaaccaggccgaaaccgaagctaccgccacgaccaccacccgcgcccactgcagcaacgccggaccctcgtctccctgtccccgactaccaggaggagatcccggcggcgaggatgagcggcggcggtgccggagggaagggggcggcggcgcccgtcccggccgggtcgaggaaactggtgcagtgtctcaaggagatcgtgaaccgacccgaggcggagatctactccgcactgcgcgagtgcggcatggaccccgacgaggcggtcagccgcctcctctcccaagatactttccaagaggtaaagagcaagcgcgacaagaagaaagagattaaagaggttcctgagacaagatatcgatcggcaaatagttctactaatcgaagccttagaagtggtgcagatcgtggtggacgtagcaattctgtgcactccagctctactgataacatgacctcaaggccaccagtctcagggtcttgtacggcatcagttaattccaatcaaatgcagacaattgcaagttcctctgcaaacaaacatatggttactgatggactagctgtatcattgcaatcatcgtgtgggtttcagcatggtggttggtctgggacacctggtcagttgtcgatggttgacattgtgaaaatgggccgccctcagggaaaggcttctagcaaacctgtggtcacagctgacagaggttatgctggacagtacccatctttgccaagcacaaaccagaacctcaaacaatctggaagcatggtttccccagcagagcttgacaaggggttacaacctgcccacaatttggttcaggttaagaatcatggtcattttactgctgatagcaagctcccatatggtactgattggtctccacaagacgacccaacatctgagaaccaatcttcccagcctgagacgtctggtgatccatctttgtatgaatcatcatttcagtcatctacattggttactgatgtagttaattcacatgaaaattcacacttggagttggatgaaaacagcacctttgcaatgagatcaacacctgcctctgagagacacttggaacctagtgacagtattcctgaatacaatgatggaatattaaacaactcaagttcatatcagcctcataattactcttacacagaacaagatgttgaggattccagtgctgatgtatcagcagcagcagaaaatttccagagtttaagcctacataatgatgagttagctgcaaaaaagactgctgaagataaccctgcagtgataattcctgatcatttgcaagttaccaatacagaatgtgttagtttgagctttggcagttttggatctggtgcattttctgggctactcccacaaaagaccactgatagcaatgtggaattccttgttcaagaggattctgcaacagtagatccaatagatgccaggaatcaagattactatgaaagtggtgcagtaacttcaccagcagaagaaaatcttgaggccatgctaggaactaacatggagaatgtcgatgcaccttctgtttcacaggctaatgagctcagtcaggacgtacttgatccttctgtacttaaatatgacgtgtcatcagtttcaagtcatgcttattcgaacatgaacactccacaacctagcacaatagaggacccacaaggaaacaaccaagcacatacgctttcccatttgtcaaacatgatggccctgaaagcaggggttttctccaacgctcggtctacgcagtctcttccaagtactagcattccgacggggcatcctctccctcagcaattagcacatcacccttactctcagccgactttagcacccatcacacatttcccaaatatcgttggctatccgccgtatttgccacaaaactatgctgcttacctatcttcgggcaccttccagcaagcatacccgagcaatggagcattccatcagtctgctgccgctttgctcggatctggtatgaagtactcggcccccgagtataagaacaacctgtctgccacaggcttacaacagcaacatcagccacaaccgcaaccaccttcatcagtcatctctggttatggaggccttggaagctcaagcaatatacaaggaaattttacccttaatcagagtactggcactggatcaactcttgtgtttgatgatgcattgggcagacagtacaaagacaccagtcaacacatagctctccagcagcccgacaactctggaatgtggcttcatggctctggttcaagagcggcggcgcttccgcctaaccacttttatggttaccagggacagagtcagctgggtggctttggtcaggcgcagcagcaacagccttcccaattcggaggccacgggtacccgactttctaccagtctcagggtgggctgacacaggagcaccacccccagaaccttgctgagggcagcctgaatggcttccaggtcgcaccgtctcagccgtctcatccgagctggcagcatcagcacacctactgagcattgttctcccttgttatggtctgtctctttcgccgtcacaagccaagtttcgcgtgcttgtgcccttactcgatgcagagtaagctgctcggattttagctgagcttgtaccttcagcgctgagaagggtcccaggacccaggcatacaacagttagagcgttttaacatgctgcgtgcgtgcgtgtgtgtgtgttgccagaccgatgccttgtggtttttcgatagcgagttatatgtgcggaggcgcagtcatgtataactgagacatgataacataacaaccaatcgtttcgcttgcatttttttggtcatgcacacatgcggttatcgcttcaggaagaaaaaaaggagcacctctgactcagcttatggattataaatattttcaatctcaccattgcatagcctgtggttagcacatactccgtttcatcatctgacatgctgcatgtactttcttgataataattatgagtgtgttac

SEQ ID NO: 72628 - DNA, 3149 bp, Zea Mays
ggggaagggttttggaattaggccgccggacgccgttgcgtgggagagagcaaagtgaaccaggccgaaaccgaagctaccgccacgaccaccacccgcgcccactgcagcaacgccggaccctcgtctccctgtccccgactaccaggaggagatcccggcggcgaggatgagcggcggcggtgccggagggaagggggcggcggcgcccgtcccggccgggtcgaggaaactggtgcagtgtctcaaggagatcgtgaaccgacccgaggcggagatctactccgcactgcgcgagtgcggcatggaccccgacgaggcggtcagccgcctcctctcccaagatactttccaagaggtaaagagcaagcgcgacaagaagaaagagattaaagaggttcctgagacaagatatcgatcggcaaatagttctactaatcgaagccttagaagtggtgcagatcgtggtggacgtagcaattctgtgcactccagctctactgttcctctgcaaacaaacatatggttactgatggactagctgtatcattgcaatcatcgtgtgggtttcagcatggtggttggtctgggacacctggtcagttgtcgatggttgacattgtgaaaatgggccgccctcagggaaaggcttctagcaaacctgtggtcacagctgacagaggttatgctggacagtacccatctttgccaagcacaaaccagaacctcaaacaatctggaagcatggtttccccagcagagcttgacaaggggttacaacctgcccacaatttggttcaggttaagaatcatggtcattttactgctgatagcaagctcccatatggtactgattggtctccacaagacgacccaacatctgagaaccaatcttcccagcctgagacgtctggtgatccatctttgtatgaatcatcatttcagtcatctacattggttactgatgtagttaattcacatgaaaattcacacttggagttggatgaaaacagcacctttgcaatgagatcaacacctgcctctgagagacacttggaacctagtgacagtattcctgaatacaatgatggaatattaaacaactcaagttcatatcagcctcataattactcttacacagaacaagatgttgaggattccagtgctgatgtatcagcagcagcagaaaatttccagagtttaagcctacataatgatgagttagctgcaaaaaagactgctgaagataaccctgcagtgataattcctgatcatttgcaagttaccaatacagaatgtgttagtttgagctttggcagttttggatctggtgcattttctgggctactcccacaaaagaccactgatagcaatgtggaattccttgttcaagaggattctgcaacagtagatccaatagatgccaggaatcaagattactatgaaagtggtgcagtaacttcaccagcagaagaaaatcttgaggccatgctaggaactaacatggagaatgtcgatgcaccttctgtttcacaggctaatgagctcagtcaggacgtacttgatccttctgtacttaaatatgacgtgtcatcagtttcaagtcatgcttattcgaacatgaacactccacaacctagcacaatagaggacccacaaggaaacaaccaagcacatacgctttcccatttgtcaaacatgatgcaagcaaatcctttgagcactagcagcctattggcgtcaaatcaaaatcatccatctcttcatggcttagagtttgatttgccttatcttgaagcaaaatataacgcaggcacgactacaaatcctagaccagccatatccatgcaggaggccctgaaagcaggggttttctccaacgctcggtctacgcagtctcttccaagtactagcattccgacggggcatcctctccctcagcaattagcacatcacccttactctcagccgactttagcacccatcacacatttcccaaatatcgttggctatccgccgtatttgccacaaaactatgctgcttacctatcttcgggcaccttccagcaagcatacccgagcaatggagcattccatcagtctgctgccgctttgctcggatctggtatgaagtactcggcccccgagtataagaacaacctgtctgccacaggcttacaacagcaacatcagccacaaccgcaaccaccttcatcagtcatctctggttatggaggccttggaagctcaagcaatatacaaggaaattttacccttaatcagagtactggcactggatcaactcttgtgtttgatgatgcattgggcagacagtacaaagacaccagtcaacacatagctctccagcagcccgacaactctggaatgtggcttcatggctctggttcaagagcggcggcgcttccgcctaaccacttttatggttaccagggacagagtcagctgggtggctttggtcaggcgcagcagcaacagccttcccaattcggaggccacgggtacccgactttctaccagtctcagggtgggctgacacaggagcaccacccccagaaccttgctgagggcagcctgaatggcttccaggtcgcaccgtctcagccgtctcatccgagctggcagcatcagcacacctactgagcattgttctcccttgttatggtctgtctctttcgccgtcacaagccaagtttcgcgtgcttgtgcccttactcgatgcagagtaagctgctcggattttagctgagcttgtaccttcagcgctgagaagggtcccaggacccaggcatacaacagttagagcgttttaacatgctgcgtgcgtgcgtgtgtgtgtgttgccagaccgatgccttgtggtttttcgatagcgagttatatgtgcggaggcgcagtcatgtataactgagacatgataacataacaaccaatcgtttcgcttgcatttttttggtcatgcacacatgcggttatcgcttcaggaagaaaaaaaggagcacctctgactcagcttatggattataaatattttcaatctcaccattgcatagcctgtggttagcacatactccgtttcatcatctgacatgctgcatgtactttcttgataataattatgagtgtgttac

SEQ ID NO: 72629 - DNA, 3147 bp, Zea Mays
ggggaagggttttggaattaggccgccggacgccgttgcgtgggagagagcaaagtgaaccaggccgaaaccgaagctaccgccacgaccaccacccgcgcccactgcagcaacgccggaccctcgtctccctgtccccgactaccaggaggagatcccggcggcgaggatgagcggcggcggtgccggagggaagggggcggcggcgcccgtcccggccgggtcgaggaaactggtgcagtgtctcaaggagatcgtgaaccgacccgaggcggagatctactccgcactgcgcgagtgcggcatggaccccgacgaggcggtcagccgcctcctctcccaagatactttccaagaggtaaagagcaagcgcgacaagaagaaagagattaaagaggttcctgagacaagatatcgatcggcaaatagttctactaatcgaagccttagaagtggtgcagatcgtggtggacgtagcaattctgtgcactccagctctactgataacatgacctcaaggccaccagtctcagggtcttgtacggcatcagttaattccaatcaaatgcagacaattgcaagttcctctgcaaacaaacatatggttactgatggactagctgtatcattgcaatcatcgtgtgggtttcagcatggtggttggtctgggacacctggtcagttgtcgatggttgacattgtgaaaatgggccgccctcagggaaaggcttctagcaaacctgtggtcacagctgacagaggttatgctggacagtacccatctttgccaagcacaaaccagaacctcaaacaatctggaagcatggtttccccagcagagcttgacaaggggttacaacctgcccacaatttggttcaggttaagaatcatggtcattttactgctgatagcaagctcccatatggtactgattggtctccacaagacgacccaacatctgagaaccaatcttcccagcctgagacgtctggtgatccatctttgtatgaatcatcatttcagtcatctacattggttactgatgtagttaattcacatgaaaattcacacttggagttggatgaaaacagcacctttgcaatgagatcaacacctgcctctgagagacacttggaacctagtgacagtattcctgaatacaatgatggaatattaaacaactcaagttcatatcagcctcataattactcttacacagaacaagatgttgaggattccagtgctgatgtatcagcagcagcagaaaatttccagagtttaagcctacataatgatgagttagctgcaaaaaagactgctgaagataaccctgcagtgataattcctgatcatttgcaagttaccaatacagaatgtgttagtttgagctttggcagttttggatctggtgcattttctgggctactcccacaaaagaccactgatagcaatgtggaattccttgttcaagaggattctgcaacagtagatccaatagatgccaggaatcaagattactatgaaagtggtgcagtaacttcaccagcagaagaaaatcttgaggccatgctaggaactaacatggagaatgtcgatgcaccttctgtttcacaggctaatgagctcagtcaggacgtacttgatccttctgtacttaaatatgacgtgtcatcagtttcaagtcatgcttattcgaacatgaacactccacaacctagcacaatagaggacccacaaggaaacaaccaagcacatacgctttcccatttgtcaaacatgatgcaagcaaatcctttgagcactagcagcctattggcgtcaaatcaaaatcatccatctcttcatggcttagagtttgatttgccttatcttgaagcaaaatataacgcaggcacgactacaaatcctagaccagccatatccatgcaggaggccctgaaagcaggggttttctccaacgctcggtctacgcagtctcttccaagtactagcattccgacggggcatcctctccctcagcaattagcacatcacccttactctcagccgactttagcacccatcacacatttcccaaatatcgttggctatccgccgtatttgccacaaaactatgctgcttacctatcttcgggcaccttccagcaagcatacccgagcaatggagcattccatcagtctgctgccgctttgctcggatctggtatgaagtactcggcccccgagtataagaacaacctgtctgccacaggcttacaacagcaacatcagccacaaccgcaaccaccttcatcagtcatctctggttatggaggccttggaagctcaagcaatatacaaggaaattttacccttaatcagagtactggcactggatcaactcttgtgtttgatgatgcattgggcagacagtacaaagacaccagtcaacacatagctctccagcagggacagagtcagctgggtggctttggtcaggcgcagcagcaacagccttcccaattcggaggccacgggtacccgactttctaccagtctcagggtgggctgacacaggagcaccacccccagaaccttgctgagggcagcctgaatggcttccaggtcgcaccgtctcagccgtctcatccgagctggcagcatcagcacacctactgagcattgttctcccttgttatggtctgtctctttcgccgtcacaagccaagtttcgcgtgcttgtgcccttactcgatgcagagtaagctgctcggattttagctgagcttgtaccttcagcgctgagaagggtcccaggacccaggcatacaacagttagagcgttttaacatgctgcgtgcgtgcgtgtgtgtgtgttgccagaccgatgccttgtggtttttcgatagcgagttatatgtgcggaggcgcagtcatgtataactgagacatgataacataacaaccaatcgtttcgcttgcatttttttggtcatgcacacatgcggttatcgcttcaggaagaaaaaaaggagcacctctgactcagcttatggattataaatattttcaatctcaccattgcatagcctgtggttagcacatactccgtttcatcatctgacatgctgcatgtactttcttgataataattatgagtgtgttac

SEQ ID NO: 72630 - DNA, 1516 bp, Zea Mays
ctaaccaaggtccctagacccccgcgtcgacggcgcgcgcagcgacgcgacgggggtccttgttgcgggtcgcgctggaaggaagcagcccgtcgaaccagaacgcccgcgtcgccgcgcgcctctccgctgaggagaggcagcgcctcctcctccgcggcgccaacgccctgggctcggccggcggcgacgacgactccgacgtcatcgcgctcaataactacatgaacgcgcagtactttggggagatcggcgtcgggacgccgccgcagaagttcaccgtcatcttcgacaccggcagctccaacctctgggtgccgtcctccaagtgctatttctcgatcgcttgctacttccactcgcgctacaagtcagggcagtcaagtacttataagaagaacggtttgactcttcctttttcttgataccgtattttctctatttgctcactgtggattgagatctgccattctgcctgacttattctcatatgttttttttttctttcccatctatagtgctcccatgttatatgatcatgccatattaaaattcgtgttcttgtgaagggaacacacacaaatgacaatatatgttgaaagcatgacaagatgtgaaaaaactaaacttatatatcgggcatcattctatgaccatacatagaatgacgcatggtcatgaattgaatgctaaatttactccgtttgagcagagacacattttcttcccagttctaacatcacaaattccctttttattttttgctcatgtaatgctgacagtttacaaaatcctactttctttggtctgcctgctgcatgccctactttgtatttctagaatatttacggtaaaacagaaatttcatcattcatggttggcaacatcaaaacaaaatctgtggtagcttggtaatcggaacatctatgaaaaggacattaaaagcacctgatgtagatgcagtgcaaatttgtgtagatgtagcgatgtggagccagcattcaggaatgatgacgacattttgcagtagctttcttttttgggcttgattatgactccttgaattcaatggaaacactagaagttggtataataataacttcagcgtgtgactctagcacaccttactctggaaatagtcagccttatttttcttgtagcatggatattgaaaggtttgccccttcttggaatgtatatgaccttgttttatcatactagttatttttttaaaaataatctttttagtccaagcaaattgaggtatgctatgtttcaaaggcgtctcctaggtgtccaggagtacccagctcgccttgggaaaccgtggcgccttgtctcctaggcatccaggtggacacaacactcgcctggatgcctaattaccttttaaacactatgctagatatgaaacccaacacgagccaccaggaatgtacaataaaaaagaagataaaaatcataaaacctccagctcttcgtattgggctttatgtatgatatttgtttgttctga

SEQ ID NO: 72631 - DNA, 1207 bp, Zea Mays
  misc_feature (1)..(2): n is a, c, g, or t
nntatgggtgatgtcctggttgatggaaagtccactgggttttgtgctggtggttgtgcagcaatagcagattctggaacttccttgcttgctggccccacaatcggtgctgctggtgtagtcagccaggagtgcaagactgttgtttctcaatacggacaacagatcctagatcttctgctagctgagacgcaaccagcgaagatctgttctcaggttggcctgtgcacttttgatggcactcacggtgttagcactggaattcgtagcgtagtggatgacaaagctgggaaatcaaatggtggtctcaagagtgatccaatgtgcaatgcctgtgagatggctgtggtatggatgcagaaccaactggcccagaacaagacacaggagctcatcctgacctacattaatcagctttgtgagcgtcttccttctcccatgggagaatcagccgtggactgtgccagtcttgggtccatgcccgacattgcgttcaccattggaggcaagaagttcaagctgaaaccggagcagtacattctgaaggtcggtgaaggacaagctgcccagtgcatcagtggattcacagctatggacatcccaccacctcgtggccccctctggatcctgggcgatgttttcatgggagtctaccacaccgtcttcgattacggcaagctgagggttggcttcgcggagtcggcctaaggaacgtatggtttggcgcctcctccagaggaggcaaaacgcatgcgccgagagaaaagcttcgcttgtttttaacttgtgtatttatgcggccggcggtgtgtgtatatatgctacatgtttagtgatgctttccgagacctgagacaatgcccgtctgttttaacctggcacaaggaaatttctcgatgtgtttgccaagccaatcttgtacccaattgtcaccgtgcatcctggcaacgtgtactcaaagtatttttccttgtgttatgcgtgagatctggctgatcttcctctagtccatatcgacgggaaggtgtcggctcttcgccatctagattcacgtcaggtctccgtttcggcctgatccggccgttccaggagtcttttcggctggaaaaaatattcagtttggaatccactcctttttggctggaaaaaatattcagtttggaattcgctttgagctgttcgtttcaactcgaaataaaaatgaaaa

SEQ ID NO: 72632 - DNA, 1222 bp, Zea Mays
  misc_feature (1)..(2): n is a, c, g, or t
nntatgggtgatgtcctggttgatggaaagtccactgggttttgtgctggtggttgtgcagcaatagcagattctggaacttccttgcttgctggccccacagccattattactgaaatcaacgaaaagatcggtgctgctggtgtagtcagccaggagtgcaagactgttgtttctcaatacggacaacagatcctagatcttctgctagctgagacgcaaccagcgaagatctgttctcaggttggcctgtgcacttttgatggcactcacggtgttagcactggaattcgtagcgtagtggatgacaaagctgggaaatcaaatggtggtctcaagagtgatccaatgtgcaatgcctgtgagatggctgtggtatggatgcagaaccaactggcccagaacaagacacaggagctcatcctgacctacattaatcagctttgtgagcgtcttccttctcccatgggagaatcagccgtggactgtgccagtcttgggtccatgcccgacattgcgttcaccattggaggcaagaagttcaagctgaaaccggagcaggtcggtgaaggacaagctgcccagtgcatcagtggattcacagctatggacatcccaccacctcgtggccccctctggatcctgggcgatgttttcatgggagtctaccacaccgtcttcgattacggcaagctgagggttggcttcgcggagtcggcctaaggaacgtatggtttggcgcctcctccagaggaggcaaaacgcatgcgccgagagaaaagcttcgcttgtttttaacttgtgtatttatgcggccggcggtgtgtgtatatatgctacatgtttagtgatgctttccgagacctgagacaatgcccgtctgttttaacctggcacaaggaaatttctcgatgtgtttgccaagccaatcttgtacccaattgtcaccgtgcatcctggcaacgtgtactcaaagtatttttccttgtgttatgcgtgagatctggctgatcttcctctagtccatatcgacgggaaggtgtcggctcttcgccatctagattcacgtcaggtctccgtttcggcctgatccggccgttccaggagtcttttcggctggaaaaaatattcagtttggaatccactcctttttggctggaaaaaatattcagtttggaattcgctttgagctgttcgtttcaactcgaaataaaaatgaaaa

SEQ ID NO: 72633 - DNA, 1175 bp, Zea Mays
ctgcattttgtgttgaatcctgtggtgctcacaaaatgtctaggccattattactgaaatcaacgaaaagatcggtgctgctggtgtagtcagccaggagtgcaagactgttgtttctcaatacggacaacagatcctagatcttctgctagctgagacgcaaccagcgaagatctgttctcaggttggcctgtgcacttttgatggcactcacggtgttagcactggaattcgtagcgtagtggatgacaaagctgggaaatcaaatggtggtctcaagagtgatccaatgtgcaatgcctgtgagatggctgtggtatggatgcagaaccaactggcccagaacaagacacaggagctcatcctgacctacattaatcagctttgtgagcgtcttccttctcccatgggagaatcagccgtggactgtgccagtcttgggtccatgcccgacattgcgttcaccattggaggcaagaagttcaagctgaaaccggagcagtacattctgaaggtcggtgaaggacaagctgcccagtgcatcagtggattcacagctatggacatcccaccacctcgtggccccctctggatcctgggcgatgttttcatgggagtctaccacaccgtcttcgattacggcaagctgagggttggcttcgcggagtcggcctaaggaacgtatggtttggcgcctcctccagaggaggcaaaacgcatgcgccgagagaaaagcttcgcttgtttttaacttgtgtatttatgcggccggcggtgtgtgtatatatgctacatgtttagtgatgctttccgagacctgagacaatgcccgtctgttttaacctggcacaaggaaatttctcgatgtgtttgccaagccaatcttgtacccaattgtcaccgtgcatcctggcaacgtgtactcaaagtatttttccttgtgttatgcgtgagatctggctgatcttcctctagtccatatcgacgggaaggtgtcggctcttcgccatctagattcacgtcaggtctccgtttcggcctgatccggccgttccaggagtcttttcggctggaaaaaatattcagtttggaatccactcctttttggctggaaaaaatattcagtttggaattcgctttgagctgttcgtttcaactcgaaataaaaatgaaaa

SEQ ID NO: 72634 - DNA, 3211 bp, Zea Mays
aaaaccatctccaaaaccctagcccccatcccctcgctggaaagtctcgtcggcggccgcggagatgggcaaggcgaaggggaagcagcgtcaggacaagttctaccacctagccaaggagcaagggtatcggagtcgcgcggcgttcaagctgctccagctcgacgcgcggttccgcttcctcctgacggcgcactcggtgctcgacctctgcgccgcgccgggagggtgggttcaggtggccgtcaaccatgccccagtcggagccttcgtcgtcggcgtcgacctcgttcccatccgccccattcgcggggcccactcgctcaccgaggacatcaccaccaccaagtgccgcgccgcggtgcggaggctcatggactccaatggcgtctccgccttcgacgtcgtgctccacgatgggtcgcccaacgtcggtggtgcctgggcgcaggaggccacatcgcagtcggcgctagttattgacgcactgcgcctcgctaccatgttcctcgcccccaagggcgccttcatcacgaaggtttttaggtctcaagattacaacgctattatgtactgtcttaaacagttgtttgagaaggttgaggcaactaaacctacggcaagtcggtctacatctgctgaaatttatatcatctgtctgaaatataaggctcccgcaaagattcaaccagaacttcttgatataaagcacttgttcagtgtggttccagaacagaccaaaggatgttatggatggtaggaaaaagagacaccgtgatgggtatgaagaagggaatacgacattacggaaagttggtttggcatctgattttatatggtctgatgcccaggcgccactggagtttttgggctcttacaatgcaatttcatttgataatccagaatccctgcccataaagaatcatgagcttacaacagatgatataaaaaatttctgtgaggacttacttctgttggataaaaatagtttcaagcatatcttgaaatggcgtattcgcttacgaaaagcactgtcagtgtcttcacaagtcaccctaaaggccaatgatgctgtggagaacacaaaggtcatggatgatgatgtacttctacaggaaatggaagaattgaccagtgttattgatagaaagaaaaaaagagagaaaaagcgtttgtcaaagcgtcgagcaaaggataaagcacgcaaggccacaggaatgcagattgatgctacaggagatgattatggtgatcctgacttgttttctattagtgtaatcaagggtggaaaagaacttgaagctgttgaatcagcagaggttgatgtgcaaaatgaaattggagacagtgagaatgaggatactcaagctcgtgaacactctgatgaggaaatggattctgatgaggaacagcagaggtatgatgcccagcttgaggagatgcttgatgaagcttatgagcgctttgtaactagaaagggtggtgaaattaaacaagaacgcaagcgtgcgaaacgaatcaatcctgacgctgatgcagacttgttagagggaggtgaagatgatggtgttgctgaaatggatcaagattttgatgaagaccaagatcttgatgaacatcaagatcaggagaccaatccccttctgttagctctagatgaacagaggccaactaaagagcagattgtaaagcaaatggtatagtcaggacgtgttcacagaagcagcaactggcattactgagcagagtgacactgaagatgaaagggagagtttgcaaaggaatatgaagaagatggttactggcaaaacggaaaaagtggctaaagcacagcgtttgcaacgagatgatattgagattgtaccagcagaacctgtccgagatgaagaggatacgtcttcatcttctggtgaatcagatgtttcggaggatgaactcgatgattacagaaaggctgaagtactagcctatgctaagaagatgctgaggaagaaacagagagagcagatacttgatgatgcttacaacaagtacatgtttgatgatgaagggttacccaactggtttgttgaggatgaaaaaaggcataggcagcccatgaagcctgttacacgtgaggaagtagctgcaatgagggctcagtttaaggagatcgatgcccgcccatccaagaaggttgcagaggccaaggcccggaagaagcgtgttgccatgaagaaactggacaaggctcgccaaaaggcagatgctatagctgaccagaatgacataaacgagctatcgaagaggaagatgattgaccggatttacaggaaggcgatgccaacgaagcctcagaaggagtatgtcgttgcaaagaagggggttcagttgaggactggcaaagggaaggtgttggtggatccacgtatgaagaaggacaagcgggccagcggaacttgtaagaaagggaagaagggcggcaaaggcggcaaggggaagggtggtcagaaaggcatgagagggaaaactgggaagaaggccgggaaagccccgagttaaggaagatgaggagctaagcacggctgggatgctggatgccttcctcccagctaattttttgtctcgtcctactacagctactctcagtaggcagatgctttgaagtcgtgtgatgataaaatttatgtgttaagttttgtagcgtgagttatcatggctacaatttgttctgaaactagtggtcactaatcttaatttacacagttcagtcaattatcaaaactttttaacccctttggcgacaccagagtataagaaatacagatgcctgcatttctactaatatttgtgtggcgcacccttgtggagacttcttttttacaggtgaggaatccgcttgcatttccttatcagatgaaatgaaggcagcactttgagggcgtgttcggctggctacaagccgacactgttgcagctgtttggactgctgcagctgcaatccatagagagaaaaatactgtagaagccgcagccgcagccggattgcagccgcagcaagccgcagcgaacaagctggaatccgaaacattgagatgcagagaccgtcatggattcgcatttccccaacttgtcgatcagagcagaatctgatccaagcttttgtgcgttcaagatttggaatcagggtggtgcagagcagaggcggccactgaatccgagctacttggcg

SEQ ID NO: 72635 - DNA, 2180 bp, Zea Mays
cccactcgaagttttgggaatgagatggcgtattcgcttacgaaaagcactgtcagtgtcttcacaagtcaccctaaaggccaatgatgctgtggagaacacaaaggtcatggatgatgatgtacttctacaggaaatggaagaattgaccagtgttattgatagaaagaaaaaaagagagaaaaagcgtttgtcaaagcgtcgagcaaaggataaagcacgcaaggccacaggaatgcagattgatgctacaggagatgattatggtgatcctgacttgttttctattagtgtaatcaagggtggaaaagaacttgaagctgttgaatcagcagaggttgatgtgcaaaatgaaattggagacagtgagaatgaggatactcaagctcgtgaacactctgatgaggaaatggattctgatgaggaacagcagaggtatgatgcccagcttgaggagatgcttgatgaagcttatgagcgctttgtaactagaaagggtggtgaaattaaacaagaacgcaagcgtgcgaaacgaatcaatcctgacgctgatgcagacttgttagagggaggtgaagatgatggtgttgctgaaatggatcaagattttgatgaagaccaagatcttgatgaacatcaagatcaggagaccaatccccttctgttagctctagatgaacagaggccaactaaagagcagattgtaaagcaaatgagtgacactgaagatgaaagggagagtttgcaaaggaatatgaagaagatggttactggcaaaacggaaaaagtggctaaagcacagcgtttgcaacgagatgatattgagattgtaccagcagaacctgtccgagatgaagaggatacgtcttcatcttctggtgaatcagatgtttcggaggatgaactcgatgattacagaaaggctgaagtactagcctatgctaagaagatgctgaggaagaaacagagagagcagatacttgatgatgcttacaacaagtacatgtttgatgatgaagggttacccaactggtttgttgaggatgaaaaaaggcataggcagcccatgaagcctgttacacgtgaggaagtagctgcaatgagggctcagtttaaggagatcgatgcccgcccatccaagaaggttgcagaggccaaggcccggaagaagcgtgttgccatgaagaaactggacaaggctcgccaaaaggcagatgctatagctgaccagaatgacataaacgagctatcgaagaggaagatgattgaccggatttacaggaaggcgatgccaacgaagcctcagaaggagtatgtcgttgcaaagaagggggttcagttgaggactggcaaagggaaggtgttggtggatccacgtatgaagaaggacaagcgggccagcggaacttgtaagaaagggaagaagggcggcaaaggcggcaaggggaagggtggtcagaaaggcatgagagggaaaactgggaagaaggccgggaaagccccgagttaaggaagatgaggagctaagcacggctgggatgctggatgccttcctcccagctaattttttgtctcgtcctactacagctactctcagtaggcagatgctttgaagtcgtgtgatgataaaatttatgtgttaagttttgtagcgtgagttatcatggctacaatttgttctgaaactagtggtcactaatcttaatttacacagttcagtcaattatcaaaactttttaacccctttggcgacaccagagtataagaaatacagatgcctgcatttctactaatatttgtgtggcgcacccttgtggagacttcttttttacaggtgaggaatccgcttgcatttccttatcagatgaaatgaaggcagcactttgagggcgtgttcggctggctacaagccgacactgttgcagctgtttggactgctgcagctgcaatccatagagagaaaaatactgtagaagccgcagccgcagccggattgcagccgcagcaagccgcagcgaacaagctggaatccgaaacattgagatgcagagaccgtcatggattcgcatttccccaacttgtcgatcagagcagaatctgatccaagcttttgtgcgttcaagatttggaatcagggtggtgcagagcagaggcggccactgaatccgagctacttggcg

SEQ ID NO: 72636 - DNA, 1207 bp, Zea Mays
ggcgactcggcttgcccattcaatggaggtggtgggtctcccccgtttcgtctcctgccattcgtcctcctcctcccctgtctctctctccatccatccaatcccacctggagaaaaacgagacaaatcaaatctcgccgcgagttgggcgctgagcgcgggcgccatggcgagcaacagcgcgcccggcgccggctacgagtgcggcagcgacaacgacggcgggctgcacaagccgctgctgcccaacagcgggagctgccaacggacggggtcgcgccagcccagcctcaacgccgccggcacctcctccagggccgtcctgcgcgagtcccacgtctccgccttcctctgcacgctcatcgtcgcgctcggccccatccagtgcggcttcacaagcggctactcctcgccgacgcaggacggcatcatccgggacctcaacctctccatctccgagttctcggcgttcggttcgctgtccaacgtgggcgccatggtcggggcgatcgccagcggccagatggccaagtacattggccggagagggtcattgattattgcagcggttccgaacatcatgggctggcttgcaatctccttcgcgaaacacacttcgtttctgtacatgggacgattgcttgaaggatttggtgtcggtgtcatttcctatgtggtaccggtatacatagcagagatatctcctcagaacatgagaggagctcttggcgctgtgaacccgttgtctgcaacatttggtgtcatgtttgtctatgtgcttggcttgttttttccttggaggcttcttgcattaataggaacgttgccctgcttatttttgatacctggcctattcttcattccggaatctccaagatggctggcaaggatgaataggatggatgattgcgagacttctctacaagttctcaggggattcaatgctgacatcactgcagaagctaatgatataaagatagctgtgacatcagcaaacaaaagtggtacaataagttttcaagagttgaaccaaaagaaaaaccgcacgcccctaattctaggaattggcctacttgtgttgcaacagctaagtggaataaactgtatagtattttattcaggtagcatcttcaaagctgcagatgaaggaatattgttcaatggagggaatgagagttctacaatagaattggacgaaccattcgat

SEQ ID NO: 72637 - DNA, 2207 bp, Zea Mays
ctcggcttgcccattcaatggaggtggtgggtctcccccgtttcgtctcctgccattcgtcctcctcctcccctgtctctctctccatccatccaatcccacctggagaaaaacgagacaaatcaaatctcgccgcgagttgggcgctgagcgcgggcgccatggcgagcaacagcgcgcccggcgccggctacgagtgcggcagcgacaacgacggcgggctgcacaagccgctgctgcccaacagcgggagctgccaacggacggggtcgcgccagcccagcctcaacgccgccggcacctcctccagggccgtcctgcgcgagtcccacgtctccgccttcctctgcacgctcatcgtcgcgctcggccccatccagtgcggcttcacaagcggctactcctcgccgacgcaggacggcatcatccgggacctcaacctctccatctccgagttctcggcgttcggttcgctgtccaacgtgggcgccatggtcggggcgatcgccagcggccagatggccaagtacattggccggagagggtcattgattattgcagcggttccgaacatcatgggctggcttgcaatctccttcgcgaaacacacttcgtttctgtacatgggacgattgcttgaaggatttggtgtcggtgtcatttcctatgtggtaccggtatacatagcagagatatctcctcagaacatgagaggagctcttggcgctgtgaacccgttgtctgcaacatttggtgtcatgtttgtctatgtgcttggcttgttttttccttggaggcttcttgcattaataggaacgttgccctgcttatttttgatacctggcctattcttcattccggaatctccaagatggctggcaaggatgaataggatggatgattgcgagacttctctacaagttctcaggggattcaatgctgacatcactgcagaagctaatgatataaagatagctgtgacatcagcaaacaaaagtggtacaataagttttcaagagttgaaccaaaagaaaaaccgcacgcccctaattctaggaattggcctacttgtgttgcaacagctaagtggaataaactgtatagtattttattcaggtagcatcttcaaagctgcagggctcaagaacagcaacttggacgcatgtgtacttggagctctcgaggttcttgccactggtgttacaatcacgttcttggacagagctggccggagaatcctccttattatatcttcttgtgggatgaccctaagccttcttgcggttgctgttgtattttacatcaaggataatatttcacatgattctgacatgcataacatcttaagtatggtgtcgttggttggtgtcgtggcttatgtcattgccttctgcttcggcatgggtgccattccatggatcattatgtctgagatccttccggttagcatcaagagtgtggcaggaagctttgcgaccctagccaactggttgacatcctttgggataacaatgacagcaaatttgctcttgagctggagtgctgcaggcacatttgcctcctacatggtcgtgagtgcgttcactctaatgttcgtcatcctctgggtgccagagacgaagggaagaacccttgaggagatacagtggtccttccagtagtgagctgcagcagcattcatcagtaaatgcagtcatcagcaaggaagcaaagtctacctcaacccgcaccaaaggcagcctcggtcggagaactagcgaaggcttggtagcgaagggaccggtcggcctaaacgggggctcttcaagacttagcttgccacgactacaagcaccggccttggcaagactcaaagacctggcgtcccgagcgaagaccacagtttcctgcctgcgtggtttggcggagtggacacacatggcgcactgctggcttacttgggtccatgtgtaagaaccaccccaaggtagggttgatggtgtgtttgttcagattgtacataacttcactgtaatgacctgtaatgacacccaagggaggaatattctagggataatgtagataaccaggggcatgatcgtacttatgtgggcatgtccacttacctggttacttataaataccccacattgtatattgatgggacacgcttaacaacaccgttgccccaacccgttgtgttgctgagtatcacagctttcctacct

SEQ ID NO: 72638 - DNA, 1193 bp, Zea Mays
ttcaatggaggtggtgggtctcccccgtttcgtctcctgccattcgtcctcctcctcccctgtctctctctccatccatccaatcccacctggagaaaaacgagacaaatcaaatctcgccgcgagttgggcgctgagcgcgggcgccatggcgagcaacagcgcgcccggcgccggctacgagtgcggcagcgacaacgacggcgggctgcacaagccgctgctgcccaacagcgggagctgccaacggacggggtcgcgccagcccagcctcaacgccgccggcacctcctccagggccgtcctgcgcgagtcccacgtctccgccttcctctgcacgctcatcgtcgcgctcggccccatccagtgcggcttcacaagcggctactcctcgccgacgcaggacggcatcatccgggacctcaacctctccatctccgagtcattgattattgcagcggttccgaacatcatgggctggcttgcaatctccttcgcgaaagtatggtgctaagtgtgtcagtttattcccactcattgcttcacaaatgacaacatcggccttgatggctgtcgatgtatggtctgctctgcagcacacttcgtttctgtacatgggacgattgcttgaaggatttggtgtcggtgtcatttcctatgtggtaccggtatacatagcagagatatctcctcagaacatgagaggagctcttggcgctgtgaacccgttgtctgcaacatttggtgtcatgtttgtctatgtgcttggcttgttttttccttggaggcttcttgcattaataggaacgttgccctgcttatttttgatacctggcctattcttcattccggaatctccaagatggctggcaaggatgaataggatggatgattgcgagacttctctacaagttctcaggggattcaatgctgacatcactgcagaagctaatgatataaagatagctgtgacatcagcaaacaaaagtggtacaataagttttcaagagttgaaccaaaagaaaaaccgcacgcccctaattctaggaattggcctacttgtgttgcaacagctaagtggaataaactgtatagtattttattcaggtagcatcttcaaagctgcagatgaaggaatattgttcaatggagggaatgagagttctacaatagaattggacgaaccattcgat

SEQ ID NO: 72639 - DNA, 1185 bp, Zea Mays
ttcaatggaggtggtgggtctcccccgtttcgtctcctgccattcgtcctcctcctcccctgtctctctctccatccatccaatcccacctggagaaaaacgagacaaatcaaatctcgccgcgagttgggcgctgagcgcgggcgccatggcgagcaacagcgcgcccggcgccggctacgagtgcggcagcgacaacgacggcgggctgcacaagccgctgctgcccaacagcgggagctgccaacggacggggtcgcgccagcccagcctcaacgccgccggcacctcctccagggccgtcctgcgcgagtcccacgtctccgccttcctctgcacgctcatcgtcgcgctcggccccatccagtgcggcttcacaagcggctactcctcgccgacgcaggacggcatcatccgggacctcaacctctccatctccgagttctcggcgttcggttcgctgtccaacgtgggcgccatggtcggggcgatcgccagcggccagatggccaagtacattggccggagagggtcattgattattgcagcggttccgaacatcatgggctggcttgcaatctccttcgcgaaacacacttcgtttctgtacatgggacgattgcttgaaggatttggtgtcggtgtcatttcctatgtggtaccggtatacatagcagagatatctcctcagaacatgagaggagctcttggcgctgtgaacccgttgtctgcaacatttggtgtcatgtttgtctatgtgcttggcttgttttttccttggaggcttcttgcattaataggaacgttgccctgcttatttttgatacctggcctattcttcattccggaatctccaagatggctggcaaggatgaataggatggatgattgcgagacttctctacaagttctcaggggattcaatgctgacatcactgcagaagctaatgatataaagatagctgtgacatcagcaaacaaaagtggtacaataagttttcaagagttgaaccaaaagaaaaaccgcacgcccctaattgaattggcctacttgtgttgcaacagctaagtggaataaactgtatagtattttattcaggtagcatcttcaaagctgcagatgaaggaatattgttcaatggagggaatgagagttctacaatagaattggacgaaccattcgat

SEQ ID NO: 72640 - DNA, 2136 bp, Zea Mays
ttcaatggaggtggtgggtctcccccgtttcgtctcctgccattcgtcctcctcctcccctgtctctctctccatccatccaatcccacctggagaaaaacgagacaaatcaaatctcgccgcgagttgggcgctgagcgcgggcgccatggcgagcaacagcgcgcccggcgccggctacgagtgcggcagcgacaacgacggcgggctgcacaagccgctgctgcccaacagcgggagctgccaacggacggggtcgcgccagcccagcctcaacgccgccggcacctcctccagggccgtcctgcgcgagtcccacgtctccgccttcctctgcacgctcatcgtcgcgctcggccccatccagtgcggcttcacaagcggctactcctcgccgacgcaggacggcatcatccgggacctcaacctctccatctccgagttctcggcgttcggttcgctgtccaacgtgggcgccatggtcggggcgatcgccagcggccagatggccaagtacattggccggagagggtcattgattattgcagcggttccgaacatcatgggctggcttgcaatctccttcgcgaaacacacttcgtttctgtacatgggacgattgcttgaaggatttggtgtcggtgtcatttcctatgtggtaccggtatacatagcagagatatctcctcagaacatgagaggagctcttggcgctgtgaacccgttgtctgcaacatttggtgtcatgtttgtctatgtgcttggcttgttttttccttggaggcttcttgcattaataggaacgttgccctgcttatttttgatacctggcctattcttcattccggaatctccaagatggctggcaaggatgaataggatggatgattgcgagacttctctacaagttctcaggggattcaatgctgacatcactgcagaagctaatgatataaagctctatgcagatagctgtgacatcagcaaacaaaagtggtacaataagttttcaagagttgaaccaaaagaaaaaccgcacgcccctaattctaggaattggcctacttgtgttgcaacagctaagtggaataaactgtatagtattttattcaggtagcatcttcaaagctgcagggctcaagaacagcaacttggacgcatgtgtacttggagctctcgaggttcttgccactggtgttacaatcacgttcttggacagagctggccggagaatcctccttattatatcttcttgtgggatgaccctaagccttcttgcggttgctgttgtattttacatcaaggataatatttcacatgattctgacatgcataacatcttaagtatggtgtcgttggttggtgtcgtggcttatgtcattgccttctgcttcggcatgggtgccattccatggatcattatgtctgagatccttccggttagcatcaagagtgtggcaggaagctttgcgaccctagccaactggttgacatcctttgggataacaatgacagcaaatttgctcttgagctggagtgctgcaggcacatttgcctcctacatggtcgtgagtgcgttcactctaatgttcgtcatcctctgggtgccagagacgaagggaagaacccttgaggagatacagtggtccttccagtagtgagctgcagcagcattcatcagtaaatgcagtcatcagcaaggtctggtctgagctgctgtatgtggtgtggcggcatttcttcttctttttgtactgcaatctcttctgtggcatcatttggtgtgtaagtttcctgcatgacattgatagtagggattaacttgcatttgtgacaaattagttgatagtgataggatccctttttgacgtccccatatcctccgtgtggcggcatgggatgtcaaaaggaaagggatggagttttctcgcttttggtgtagcaggcctccctttggtcaagtagtcacagacccattttttttttgtcattggattggatacgttacagggttcgctcaccacccacactcgagactgttcattaagtttactcttatggagatgatcgagtggaagttggataaggattggagtcggatgtatcaggtgccaaggaatccttgtattcggtaaa

SEQ ID NO: 72641 - DNA, 2122 bp, Zea Mays
ttcaatggaggtggtgggtctcccccgtttcgtctcctgccattcgtcctcctcctcccctgtctctctctccatccatccaatcccacctggagaaaaacgagacaaatcaaatctcgccgcgagttgggcgctgagcgcgggcgccatggcgagcaacagcgcgcccggcgccggctacgagtgcggcagcgacaacgacggcgggctgcacaagccgctgctgcccaacagcgggagctgccaacggacggggtcgcgccagcccagcctcaacgccgccggcacctcctccagggccgtcctgcgcgagtcccacgtctccgccttcctctgcacgctcatcgtcgcgctcggccccatccagtgcggcttcacaagcggctactcctcgccgacgcaggacggcatcatccgggacctcaacctctccatctccgagttctcggcgttcggttcgctgtccaacgtgggcgccatggtcggggcgatcgccagcggccagatggccaagtacattggccggagagggtcattgattattgcagcggttccgaacatcatgggctggcttgcaatctccttcgcgaaacacacttcgtttctgtacatgggacgattgcttgaaggatttggtgtcggtgtcatttcctatgtggtaccggtatacatagcagagatatctcctcagaacatgagaggagctcttggcgctgtgaacccgttgtctgcaacatttggtgtcatgtttgtctatgtgcttggcttgttttttccttggaggcttcttgcattaataggaacgttgccctgcttatttttgatacctggcctattcttcattccggaatctccaagatggctggcaaggatgaataggatggatgattgcgagacttctctacaagttctcaggggattcaatgctgacatcactgcagaagctaatgatataaagatagctgtgacatcagcaaacaaaagtggtacaataagttttcaagagttgaaccaaaagaaaaaccgcacgcccctaattgaattggcctacttgtgttgcaacagctaagtggaataaactgtatagtattttattcaggtagcatcttcaaagctgcagggctcaagaacagcaacttggacgcatgtgtacttggagctctcgaggttcttgccactggtgttacaatcacgttcttggacagagctggccggagaatcctccttattatatcttcttgtgggatgaccctaagccttcttgcggttgctgttgtattttacatcaaggataatatttcacatgattctgacatgcataacatcttaagtatggtgtcgttggttggtgtcgtggcttatgtcattgccttctgcttcggcatgggtgccattccatggatcattatgtctgagatccttccggttagcatcaagagtgtggcaggaagctttgcgaccctagccaactggttgacatcctttgggataacaatgacagcaaatttgctcttgagctggagtgctgcaggcacatttgcctcctacatggtcgtgagtgcgttcactctaatgttcgtcatcctctgggtgccagagacgaagggaagaacccttgaggagatacagtggtccttccagtagtgagctgcagcagcattcatcagtaaatgcagtcatcagcaaggtctggtctgagctgctgtatgtggtgtggcggcatttcttcttctttttgtactgcaatctcttctgtggcatcatttggtgtgtaagtttcctgcatgacattgatagtagggattaacttgcatttgtgacaaattagttgatagtgataggatccctttttgacgtccccatatcctccgtgtggcggcatgggatgtcaaaaggaaagggatggagttttctcgcttttggtgtagcaggcctccctttggtcaagtagtcacagacccattttttttttgtcattggattggatacgttacagggttcgctcaccacccacactcgagactgttcattaagtttactcttatggagatgatcgagtggaagttggataaggattggagtcggatgtatcaggtgccaaggaatccttgtattcggtaaa

SEQ ID NO: 72642 - DNA, 2123 bp, Zea Mays
ggcggttctgcgctctgacattcgcctcggcctctctcggccggcctcttcgtttcctcctcccagccgaccggccagccagccagacccacccaccgccgatccccacgcaaggggaacaggagaggaaacaaacccagcctcgtacgcggaaggcctgcctggtgatcgacgatcgtcgtgctcgtggtggcgggtccggcgtgcgagcgagcgagcgcggcgcgcatggcgagcgacggcgaccacggcggcgcgctgcagaagccgctcttgccgaaggcgcccaggagcgggggctggttccggaaaggtacgagcacggcgcgcctcggcgccgccgctgccggcacctcgtccaaggccgcagcgctgcggccgccgcaccacgtgcccgcgctactctgcacgctcgtcgtcgcgctcggcaccgtccagttcggcttcaccagcgggtactcgtcgccggcgcaggacggcgtcacgcgggacctcgacctctccatctccgagtcactgatgattgcggcggttccgaacgtcatgggctggctcgcgatctccctggcaagggacacttcgtttctgtacgtggggaggttgctggaaggattcggtgtcggcgtcatctcctacgtggtgccggtatacgtagcagagatatctcctcagaacatgagaggagctcttggcgccgtgaacccgttgtctgcaacctttggtgtcgtgtttgccgatgtgcttggcttgttttttccttggaggcttcttgcgttaataggaaccttgccctgcctactgttgatacctggactgttcttcattccggaatctccaagatggctggcaaggatgaatatgatggatgagtgcgaggcttctctacaagttctgaggggggtggacgctgacatcactgtagaagcgaatgatataaagatagctgtagcatcggcaaacaaaagtggtgcaatgagctttcaagagttgaaccagaagaaataccgcacgcccctaattctaggaatgggcctacttgtgttgcagcagctgagtggaataaacggtataatcttttatgcaggtagcatcttcaaagctgcagggctcaagaacagtaacctggacacatgtatacttggagtgattgcggttcttgccactgctgttacgaccaagatcttggacagggctggacggagaatcctccttatcatttcttcttttgggatgaccctaagccttcttgtggttgctgttgtattttacatcaaggacaatatttcacatgactctgacttgggtaacaccttaagtatggtgtccttggttggtgtcttggcttatgtcactgcctactcctttggtatgggtgccattccatggatcataatggctgagatccttccagttagcatcaagagtgtggcaggaagctttgcgaccctagccaactggttgacatcctttggaataacaatgacagcaaatttgcttctgtcctggagtgctgcaggtacatttgccttctacatgatggtgagtgctttcactctcgtctttgtcatcctttgggtgccggagacaaagggaagaactctcgaggagatacaatggtccttccagtgagctccagtatttcatctatatatatgcaaatagcgtggcaaatcctccaggatctataaaaagatatagtgaaatatagcagaagctatttcatttagcaattttatagtttaaatgaaattggctattgattctgcatgaaaacatgtaaacaaggaaatttgatgaacataatactcaaatatatgtacagggatgtaaatgaagatgtctctcgatccattacttgacattcgttaaatcaatcgacataccgaagaaccaaaacatgtgaccatagaaggtgaataagagtcaataaaaaaatctttacacaagacaatcagcttgctttctaaatcttcacacaatctcccaaaacacaaaaacttacaaactgtatgctctcaaaccaacaagtgattagatatactcggtgatgaccgacaaacacagcaaaataatagaaccaaccaaaaccaagtacatgggtgaaacttaataaaaataaaaaa

SEQ ID NO: 72643 - DNA, 2153 bp, Zea Mays
ggcggttctgcgctctgacattcgcctcggcctctctcggccggcctcttcgtttcctcctcccagccgaccggccagccagccagacccacccaccgccgatccccacgcaaggggaacaggagaggaaacaaacccagcctcgtacgcggaaggcctgcctggtgatcgacgatcgtcgtgctcgtggtggcgggtccggcgtgcgagcgagcgagcgcggcgcgcatggcgagcgacggcgaccacggcggcgcgctgcagaagccgctcttgccgaaggcgcccaggagcgggggctggttccggaaaggtacgagcacggcgcgcctcggcgccgccgctgccggcacctcgtccaaggccgcagcgctgcggccgccgcaccacgtgcccgcgctactctgcacgctcgtcgtcgcgctcggcaccgtccagttcggcttcaccagcgggtactcgtcgccggcgcaggacggcgtcacgcgggacctcgacctctccatctccgagttctcggtgttcggctcgctgtccaacgtgggcgccatggtcggggcgatcgccagcggccagatggccaagtacgttggccgcagagggtcactgatgattgcggcggttccgaacgtcatgggctggctcgcgatctccctggcaagggacacttcgtttctgtacgtggggaggttgctggaaggattcggtgtcggcgtcatctcctacgtggtgccggtatacgtagcagagatatctcctcagaacatgagaggagctcttggcgccgtgaacccgttgtctgcaacctttggtgtcgtgtttgccgatgtgcttggcttgttttttccttggaggcttcttgcgttaataggaaccttgccctgcctactgttgatacctggactgttcttcattccggaatctccaagatggctggcaaggatgaatatgatggatgagtgcgaggcttctctacaagttctgaggggggtggacgctgacatcactgtagaagcgaatgatataaagatagctgtagcatcggcaaacaaaagtggtgcaatgagctttcaagagttgaaccagaagaaataccgcacgcccctaattctaggaatgggcctacttgtgttgcagcagctgagtggaataaacggtataatcttttatgcaggtagcatcttcaaagctgcagggctcaagaacagtaacctggacacatgtatacttggagtgattgcggttcttgccactgctgttacgaccaagatcttggacagggctggacggagaatcctccttatcgacaatatttcacatgactctgacttgggtaacaccttaagtatggtgtccttggttggtgtcttggcttatgtcactgcctactcctttggtatgggtgccattccatggatcataatggctgagatccttccagttagcatcaagagtgtggcaggaagctttgcgaccctagccaactggttgacatcctttggaataacaatgacagcaaatttgcttctgtcctggagtgctgcaggtacatttgccttctacatgatggtgagtgctttcactctcgtctttgtcatcctttgggtgccggagacaaagggaagaactctcgaggagatacaatggtccttccagtgagctccagtatttcatctatatatatgcaaatagcgtggcaaatcctccaggatctataaaaagatatagtgaaatatagcagaagctatttcatttagcaattttatagtttaaatgaaattggctattgattctgcatgaaaacatgtaaacaaggaaatttgatgaacataatactcaaatatatgtacagggatgtaaatgaagatgtctctcgatccattacttgacattcgttaaatcaatcgacataccgaagaaccaaaacatgtgaccatagaaggtgaataagagtcaataaaaaaatctttacacaagacaatcagcttgctttctaaatcttcacacaatctcccaaaacacaaaaacttacaaactgtatgctctcaaaccaacaagtgattagatatactcggtgatgaccgacaaacacagcaaaataatagaaccaaccaaaaccaagtacatgggtgaaacttaataaaaataaaaaa

SEQ ID NO: 72644 - DNA, 2266 bp, Zea Mays
tctgcgctctgacattcgcctcggcctctctcggccggcctcttcgtttcctcctcccagccgaccggccagccagccagacccacccaccgccgatccccacgcaaggggaacaggagaggaaacaaacccagcctcgtacgcggaaggcctgcctggtgatcgacgatcgtcgtgctcgtggtggcgggtccggcgtgcgagcgagcgagcgcggcgcgcatggcgagcgacggcgaccacggcggcgcgctgcagaagccgctcttgccgaaggcgcccaggagcgggggctggttccggaaaggtacgagcacggcgcgcctcggcgccgccgctgccggcacctcgtccaaggccgcagcgctgcggccgccgcaccacgtgcccgcgctactctgcacgctcgtcgtcgcgctcggcaccgtccagttcggcttcaccagcgggtactcgtcgccggcgcaggacggcgtcacgcgggacctcgacctctccatctccgagttctcggtgttcggctcgctgtccaacgtgggcgccatggtcggggcgatcgccagcggccagatggccaagtacgttggccgcagagggtcactgatgattgcggcggttccgaacgtcatgggctggctcgcgatctccctggcaagggacacttcgtttctgtacgtggggaggttgctggaaggattcggtgtcggcgtcatctcctacgtggtgccggtatacgtagcagagatatctcctcagaacatgagaggagctcttggcgccgtgaacccgttgtctgcaacctttggtgtcgtgtttgccgatgtgcttggcttgttttttccttggaggcttcttgcgttaataggaaccttgccctgcctactgttgatacctggactgttcttcattccggaatctccaagatggctggcaaggatgaatatgatggatgagtgcgaggcttctctacaagttctgaggggggtggacgctgacatcactgtagaagcgaatgatataaagatagctgtagcatcggcaaacaaaagtggtgcaatgagctttcaagagttgaaccagaagaaataccgcacgcccctaattctaggaatgggcctacttgtgttgcagcagctgagtggaataaacggtataatcttttatgcaggtagcatcttcaaagctgcagggctcaagaacagtaacctggacacatgtatacttggagtgattgcggttcttgccactgctgttacgaccaagatcttggacagggctggacggagaatcctccttatcatttcttcttttgggatgaccctaagccttcttgtggttgctgttgtattttacatcaagggtctcacaacacatttcactgaatattcttcttttttgtcatgggctattcgtttcaggacaatatttcacatgactctgacttgggtaacaccttaagtatggtgtccttggttggtgtcttggcttatgtcactgcctactcctttggtatgggtgccattccatggatcataatggctgagatccttccagttagcatcaagagtgtggcaggaagctttgcgaccctagccaactggttgacatcctttggaataacaatgacagcaaatttgcttctgtcctggagtgctgcaggtacatttgccttctacatgatggtgagtgctttcactctcgtctttgtcatcctttgggtgccggagacaaagggaagaactctcgaggagatacaatggtccttccagtgagctccagtatttcatctatatatatgcaaatagcgtggcaaatcctccaggatctataaaaagatatagtgaaatatagcagaagctatttcatttagcaattttatagtttaaatgaaattggctattgattctgcatgaaaacatgtaaacaaggaaatttgatgaacataatactcaaatatatgtacagggatgtaaatgaagatgtctctcgatccattacttgacattcgttaaatcaatcgacataccgaagaaccaaaacatgtgaccatagaaggtgaataagagtcaataaaaaaatctttacacaagacaatcagcttgctttctaaatcttcacacaatctcccaaaacacaaaaacttacaaactgtatgctctcaaaccaacaagtgattagatatactcggtgatgaccgacaaacacagcaaaataatagaaccaaccaaaaccaagtacatgggtgaaacttaataaaaataaaaaa

SEQ ID NO: 72645 - DNA, 2658 bp, Zea Mays
tctgcgctctgacattcgcctcggcctctctcggccggcctcttcgtttcctcctcccagccgaccggccagccagccagacccacccaccgccgatccccacgcaaggggaacaggagaggaaacaaacccagcctcgtacgcggaaggcctgcctggtgatcgacgatcgtcgtgctcgtggtggcgggtccggcgtgcgagcgagcgagcgcggcgcgcatggcgagcgacggcgaccacggcggcgcgctgcagaagccgctcttgccgaaggcgcccaggagcgggggctggttccggaaaggtacgagcacggcgcgcctcggcgccgccgctgccggcacctcgtccaaggccgcagcgctgcggccgccgcaccacgtgcccgcgctactctgcacgctcgtcgtcgcgctcggcaccgtccagttcggcttcaccagcgggtactcgtcgccggcgcaggacggcgtcacgcgggacctcgacctctccatctccgagttctcggtgttcggctcgctgtccaacgtgggcgccatggtcggggcgatcgccagcggccagatggccaagtacgttggccgcagagggtcactgatgattgcggcggttccgaacgtcatgggctggctcgcgatctccctggcaagggacacttcgtttctgtacgtggggaggttgctggaaggattcggtgtcggcgtcatctcctacgtggtgccggtatacgtagcagagatatctcctcagaacatgagaggagctcttggcgccgtgaacccgttgtctgcaacctttggtgtcgtgtttgccgatgtgcttggcttgttttttccttggaggcttcttgcgttaataggaaccttgccctgcctactgttgatacctggactgttcttcattccggaatctccaagatggctggcaaggatgaatatgatggatgagtgcgaggcttctctacaagttctgaggggggtggacgctgacatcactgtagaagcgaatgatataaagatagctgtagcatcggcaaacaaaagtggtgcaatgagctttcaagagttgaaccagaagaaataccgcacgcccctaattctaggaatgggcctacttgtgttgcagcagctgagtggaataaacggtataatcttttatgcaggtagcatcttcaaagctgcaggtaagctgtgcacttgtttactggcttgtggttttcgtctactagttgagcatcataactttagcaatggattttttactccttccaaatttgactggagcagtagggtattacggaactgtttagctgtttactgaataaaaagcgtcagtctctgtttggcaatatgcattttttacacatataggaatagtgtagtagattacaaatatcaaaagagttaaaatggagtaaagtgatcttacttttctcaaggcctagcgcattatagtatgtttttttaaaaaactaatgtattagtccccttgtaagttgtaacatggtttatcattctctgctttgatgaatgttgccattttattgtttgttccaagttctcctctgcatttgtctacaacagtgccggttaaccttgttttgactgtgagttctaacaatcaaagctctccagggctcaagaacagtaacctggacacatgtatacttggagtgattgcggttcttgccactgctgttacgaccaagatcttggacagggctggacggagaatcctccttatcatttcttcttttgggatgaccctaagccttcttgtggttgctgttgtattttacatcaaggacaatatttcacatgactctgacttgggtaacaccttaagtatggtgtccttggttggtgtcttggcttatgtcactgcctactcctttggtatgggtgccattccatggatcataatggctgagatccttccagttagcatcaagagtgtggcaggaagctttgcgaccctagccaactggttgacatcctttggaataacaatgacagcaaatttgcttctgtcctggagtgctgcaggtacatttgccttctacatgatggtgagtgctttcactctcgtctttgtcatcctttgggtgccggagacaaagggaagaactctcgaggagatacaatggtccttccagtgagctccagtatttcatctatatatatgcaaatagcgtggcaaatcctccaggatctataaaaagatatagtgaaatatagcagaagctatttcatttagcaattttatagtttaaatgaaattggctattgattctgcatgaaaacatgtaaacaaggaaatttgatgaacataatactcaaatatatgtacagggatgtaaatgaagatgtctctcgatccattacttgacattcgttaaatcaatcgacataccgaagaaccaaaacatgtgaccatagaaggtgaataagagtcaataaaaaaatctttacacaagacaatcagcttgctttctaaatcttcacacaatctcccaaaacacaaaaacttacaaactgtatgctctcaaaccaacaagtgattagatatactcggtgatgaccgacaaacacagcaaaataatagaaccaaccaaaaccaagtacatgggtgaaacttaataaaaataaaaaa

SEQ ID NO: 72646 - DNA, 2122 bp, Zea Mays
tctgcgctctgacattcgcctcggcctctctcggccggcctcttcgtttcctcctcccagccgaccggccagccagccagacccacccaccgccgatccccacgcaaggggaacaggagaggaaacaaacccagcctcgtacgcggaaggcctgcctggtgatcgacgatcgtcgtgctcgtggtggcgggtccggcgtgcgagcgagcgagcgcggcgcgcatggcgagcgacggcgaccacggcggcgcgctgcagaagccgctcttgccgaaggcgcccaggagcgggggctggttccggaaaggtacgagcacggcgcgcctcggcgccgccgctgccggcacctcgtccaaggccgcagcgctgcggccgccgcaccacgtgcccgcgctactctgcacgctcgtcgtcgcgctcggcaccgtccagttcggcttcaccagcgggtactcgtcgccggcgcaggacggcgtcacgcgggacctcgacctctccatctccgagtcactgatgattgcggcggttccgaacgtcatgggctggctcgcgatctccctggcaagggacacttcgtttctgtacgtggggaggttgctggaaggattcggtgtcggcgtcatctcctacgtggtgccggtatacgtagcagagatatctcctcagaacatgagaggagctcttggcgccgtgaacccgttgtctgcaacctttggtgtcgtgtttgccgatgtgcttggcttgttttttccttggaggcttcttgcgttaataggaaccttgccctgcctactgttgatacctggactgttcttcattccggaatctccaagatggctggcaaggatgaatatgatggatgagtgcgaggcttctctacaagttctgaggggggtggacgctgacatcactgtagaagcgaatgatataaagatagctgtagcatcggcaaacaaaagtggtgcaatgagctttcaagagttgaaccagaagaaataccgcacgcccctaattctaggaatgggcctacttgtgttgcagcagctgagtggaataaacggtataatcttttatgcaggtagcatcttcaaagctgcagggctcaagaacagtaacctggacacatgtatacttggagtgattgcggttcttgccactgctgttacgaccaagatcttggacagggctggacggagaatcctccttatcgtaacatttcttcttttgggatgaccctaagccttcttgtggttgctgttgtattttacatcaaggacaatatttcacatgactctgacttgggtaacaccttaagtatggtgtccttggttggtgtcttggcttatgtcactgcctactcctttggtatgggtgccattccatggatcataatggctgagatccttccagttagcatcaagagtgtggcaggaagctttgcgaccctagccaactggttgacatcctttggaataacaatgacagcaaatttgcttctgtcctggagtgctgcaggtacatttgccttctacatgatggtgagtgctttcactctcgtctttgtcatcctttgggtgccggagacaaagggaagaactctcgaggagatacaatggtccttccagtgagctccagtatttcatctatatatatgcaaatagcgtggcaaatcctccaggatctataaaaagatatagtgaaatatagcagaagctatttcatttagcaattttatagtttaaatgaaattggctattgattctgcatgaaaacatgtaaacaaggaaatttgatgaacataatactcaaatatatgtacagggatgtaaatgaagatgtctctcgatccattacttgacattcgttaaatcaatcgacataccgaagaaccaaaacatgtgaccatagaaggtgaataagagtcaataaaaaaatctttacacaagacaatcagcttgctttctaaatcttcacacaatctcccaaaacacaaaaacttacaaactgtatgctctcaaaccaacaagtgattagatatactcggtgatgaccgacaaacacagcaaaataatagaaccaaccaaaaccaagtacatgggtgaaacttaataaaaataaaaaa

SEQ ID NO: 72647 - DNA, 1757 bp, Zea Mays
  misc_feature (1757)..(1757): n is a, c, g, or t
tctgcgctctgacattcgcctcggcctctctcggccggcctcttcgtttcctcctcccagccgaccggccagccagccagacccacccaccgccgatccccacgcaaggggaacaggagaggaaacaaacccagcctcgtacgcggaaggcctgcctggtgatcgacgatcgtcgtgctcgtggtggcgggtccggcgtgcgagcgagcgagcgcggcgcgcatggcgagcgacggcgaccacggcggcgcgctgcagaagccgctcttgccgaaggcgcccaggagcgggggctggttccggaaaggtacgagcacggcgcgcctcggcgccgccgctgccggcacctcgtccaaggccgcagcgctgcggccgccgcaccacgtgcccgcgctactctgcacgctcgtcgtcgcgctcggcaccgtccagttcggcttcaccagcgggtactcgtcgccggcgcaggacggcgtcacgcgggacctcgacctctccatctccgagttctcggtgttcggctcgctgtccaacgtgggcgccatggtcggggcgatcgccagcggccagatggccaagtacgttggccgcagagggtcactgatgattgcggcggttccgaacgtcatgggctggctcgcgatctccctggcaagggacacttcgtttctgtacgtggggaggttgctggaaggattcggtgtcggcgtcatctcctacgtggtgccggtatacgtagcagagatatctcctcagaacatgagaggagctcttggcgccgtgaacccgttgtctgcaacctttggtgtcgtgtttgccgatgtgcttggcttgttttttccttggaggcttcttgcgttaataggaaccttgccctgcctactgttgatacctggactgttcttcattccggaatctccaagatggctggcaaggatgaatatgatggatgagtgcgaggcttctctacaagttctgaggggggtggacgctgacatcactgtagaagcgaatgatataaagatagctgtagcatcggcaaacaaaagtggtgcaatgagctttcaagagttgaaccagaagaaataccgcacgcccctaattctaggaatgggcctacttgtgttgcagcagctgagtggaataaacggtataatcttttatgcaggtagcatcttcaaagctgcagggctcaagaacagtaacttggacacatgtgtacttggagctattggggttcttgctagtgttgttacaaccaagatcttggacagagctggacggagaatccttcttattatttcttcgtctgggatgactctaagcttgctcacggttgctgttgtattttacatcaagggcaacatttcacatgactctgacttgggtaacaccttaagtatggtgtctttgattggtgtcttggcttgtgtcactgcttactcctttggtatgggtgccattccatggatcataatggctgagatccttcctgttagcatcaatagcgtggcaggaagctttgccacccttgccaactggctgacatcctttggaataacaatgacagcaaatttgcttctaagttggagtgctgcaggtacatttgccttgtacatgatggtgagtgctttcacggtcgtcttcgtcatcctttgggtgccagagacaaagggaaaaaccctcgaggagatacaatggttcttccatcctggaactcctcaaagtcctccacgttgcctgcatctcctcctgan

SEQ ID NO: 72648 - DNA, 1056 bp, Zea Mays
aaaaacttctcggcggggtttctgcgctcgcctctagctcagccggccggcctctccgattcctcttcctccgtgcctcccactcagccggccggccagacccacccactgcctggtgatcgtcgtgctcgtggtggcgggtccggcgagcgagcgcggcgcccatggcgagcgacggcgaccacggcggcgcgctgcagaagccgctgctgccgaaggcggccaggggcgggggctggttccggaaaggtacgagcacggcgcacccgtccggcctcagcgccgccgctgccggcacctcgtccaaggccgccgcgctgcggccgacccaccacgtgcccgcgctgctctgcacgctggtcgtcgcgctcggccccatccagttcggcttcaccaccgggtactcctcgccagcgcaggacggcgtcacccgggaccttaacctctccatctccgagttctcggcgttcggctcgctgtccaacgtgggcgccatggtcggggcgatcgccagcggccagatggccaagtacgtcggccgcagaggggtaccagtatacatagcagagatatctccacaaaacatgagaggagctcttggcgtcgtaaacccgatttcttcgtctgggatgactctaagcttgctcacggttgctgttgtattttacatcaagggcaacatttcacatgactctgacttgggtaacaccttaagtatggtgtctttgattggtgtcttggcttgtgtcactgcttactcctttggtatgggtgccattccatggatcataatggctgagatccttcctgttagcatcaatagcgtggcaggaagctttgccacccttgccaactggctgacatcctttggaataacaatgacagcaaatttgcttctaagttggagtgctgcaggtacatttgccttgtacatgatggtgagtgctttcacggtcgtcttcgtcatcctttgggtgccagagacaaagggaaaaaccctcgaggagatacaatggttcttccactgggccgtccgacgcgcagagggaagcctgg

SEQ ID NO: 72649 - DNA, 1113 bp, Zea Mays
aaaaacttctcggcggggtttctgcgctcgcctctagctcagccggccggcctctccgattcctcttcctccgtgcctcccactcagccggccggccagacccacccactgcctggtgatcgtcgtgctcgtggtggcgggtccggcgagcgagcgcggcgcccatggcgagcgacggcgaccacggcggcgcgctgcagaagccgctgctgccgaaggcggccaggggcgggggctggttccggaaaggtacgagcacggcgcacccgtccggcctcagcgccgccgctgccggcacctcgtccaaggccgccgcgctgcggccgacccaccacgtgcccgcgctgctctgcacgctggtcgtcgcgctcggccccatccagttcggcttcaccaccgggtactcctcgccagcgcaggacggcgtcacccgggaccttaacctctccatctccgagttctcggcgttcggctcgctgtccaacgtgggcgccatggtcggggcgatcgccagcggccagatggccaagtacgtcggccgcagaggggacacttcgtttctgtacatggggaggctgctggaaggattcggtgtcggtgtcatttcctatgtggtaccagtatacatagcagagatatctccacaaaacatgagaggagctcttggcgtcgtaaacccgatttcttcgtctgggatgactctaagcttgctcacggttgctgttgtattttacatcaagggcaacatttcacatgactctgacttgggtaacaccttaagtatggtgtctttgattggtgtcttggcttgtgtcactgcttactcctttggtatgggtgccattccatggatcataatggctgagatccttcctgttagcatcaatagcgtggcaggaagctttgccacccttgccaactggctgacatcctttggaataacaatgacagcaaatttgcttctaagttggagtgctgcaggtacatttgccttgtacatgatggtgagtgctttcacggtcgtcttcgtcatcctttgggtgccagagacaaagggaaaaaccctcgaggagatacaatgctgggccgtccgacgcgcagagggaagcctgg

SEQ ID NO: 72650 - DNA, 1750 bp, Zea Mays
atggagacatacttccataaggaccatgaccaagaagtcgtggaactcattccagctctgcgcaaacatatcgccagccgtcacccaggcatccaatctcttcgtcagagattatacagcactggaaaacctaggcgtactgttcattcgagcagtttctaccagccgtcgtttcttgcgtctagaacatacgccgacgttctcaagatgggcgttatttctggggacaatacatcgtcctcaagtcggtccggcattatggctaatgatggtttcaatgctgctggctggcgagtggtggatcatcggcgtcaacaagttcatggacgtccctcgggtcctagcagtgggtctttctgtggacgaggtagctgggagatacgtggtcgcgatgcatggtggggacgtggtggatgttttcttgagcccactatgtcacttggttcagtggacagggcggttatgaataatagtagaggcgttcagtctgagaaggctagaaaacaggttgtcatggtagcacccggtgttttagacatggggaagaaaagatgggaagatctttgttgcgaaatttgtgaagataatcatgtccctcaggtgtgcctggtgtttaatgttccaaagccacaggcagccctatgcggttttgcgggcggtgagtctggtttcttccaaattctaacttggggatctaagggtgcaattccgaggtcggatggtgttacgacattcattacattgaaggaaggtattgtttctgctgatctcattaagtcagagctctcaagacttataccgttgaagtggaattggtcggttcagaagcatccagatggctttctagtaccatttacgtgtagtgttgagcttcagcgcatgattgctatgaaatatgttcatacgttgggaggagaaggcactattttgggtgcaactcagaaagttgatatgcgctacaccaggaaaatgggggtggttcatattttggtggcagtgaccaatgtgaatcatatttcggagtccgcagaaatagtagttgatgaagggttatatgagattttcttcaaagttgataaggttctcatagaggggaagtggatggataacgataacatgagtaatcgagacaaagatgatttctctgagaaacatgaaaatgattcttttcagttgaaggagctagctaaagatactgtcatggaagataactctttgcatggtgattctaagaagcctgaagatgggacttgtgccatggggatggtgtctcagctagagaatcagattgttaatgggtcagtggcaagaacgggtattgaaccagaaggtctatctctaggcatgccgacagacttgatggcacttacttctccttttgttgatcagtatgttgtcactcacacacatggtgctcttgatcagtcaccaggctgtggtagcggtgatgggaagtccaattcctggctcgagcagtatcctagttgctcttcccttgcgggcatgtcacagggtgaggttgggtggaccttgtcagggcctgccaccggtcatttgttcctgaatgagactgcatctcttgctggagcggcagccggtatggttgttgaagatgtctatgctcagccaaaggttgtgatcgaattggatgatggtcatattaaatctgttgatactcaggagagagacagtcatctaggacatgttaattcctttgtaggggtccctcgctcagttctcagcattgcag

SEQ ID NO: 72651 - DNA, 2141 bp, Zea Mays
atggagacatacttccataaggaccatgaccaagaagtcgtggaactcattccagctctgcgcaaacatatcgccagccgtcacccaggcatccaatctcttcgtcagagattatacagcactggaaaacctaggcgtactgttcattcgagcagtttctaccagccgtcgtttcttgcgtctagaacatacgccgacgttctcaagatgggcgttatttctggggacaatacatcgtcctcaagtcggtccggcattatggctaatgatggtttcaatgctgctggctggcgagtggtggatcatcggcgtcaacaagttcatggacgtccctcgggtcctagcagtgggtctttctgtggacgaggtagctgggagatacgtggtcgcgatgcatggtggggacgtggtggatgttttcttgagcccactatgtcacttggttcagtggacagggcggttatgaataatagtagaggcgttcagtctgagaaggctagaaaacaggttgtcatggtagcacccggtgttttagacatggggaagaaaagatgggaagatctttgttgcgaaatttgtgaagataatcatgtccctcaggtgtgcctggtgtttaatgttccaaagccacaggcagccctatgcggttttgcgggcggtgagtctggtttcttccaaattctaacttggggatctaagggtgcaattccgaggtcggatggtgttacgacattcattacattgaaggaaggtattgtttctgctgatctcattaagtcagagctctcaagacttataccgttgaagtggaattggtcggttcagaagcatccagatggctttctagtaccatttacgtgtagtgttgagcttcagcgcatgattgctatgaaatatgttcatacgttgggaggagaaggcactattttgggtgcaactcagaaagttgatatgcgctacaccaggaaaatgggggtggttcatattttggtggcagtgaccaatgtgaatcatatttcggagtccgcagaaatagtagttgatgaagggttatatgagattttcttcaaagttgataaggttctcatagaggggaagtggatggataacgataacatgagtaatcgagacaaagatgatttctctgagaaacatgaaaatgattcttttcagttgaaggagctagctaaagatactgtcatggaagataactctttgcatggtgattctaagaagcctgaagatgggacttgtgccatggggatggtgtctcagctagagaatcagattgttaatgggtcagtggcaagaacgggtattgaaccagaaggtctatctctaggcatgccgacagacttgatggcacttacttctccttttgttgatcagtatgttgtcactcacacacatggtgctcttgatcagtcaccaggctgtggtagcggtgatgggaagtccaattcctggctcgagcagtatcctagttgctcttcccttgcgggcatgtcacagggtgaggttgggtggaccttgtcagggcctgccaccggtcatttgttcctgaatgagactgcatctcttgctggagcggcagccggtatggttgttgaagatgtctatgctcagccaaaggttgtgatcgaattggatgatggtcatattaaatctgttgatactcaggagagagacagtcatctaggacatgttaattcctttgtaggggtccctcgctcagttctcaggacgcactggtggctaattctcttactaagagagtgaagactgaaaagattaatcatggtgatctcataataagtgcgaagaggactaatactgttgaagatattttgaccaaagcacaacgattggcagcaaagcgtaatctggaattaagtgagtcttccttcatctccttttacccggaagtaatcacttctaattgcgaaaatattgggattactcttggcagtatggaaaatcaagtgttacaattggtggttgctattaaaaatattgagatcgataggctcgtggtagctccatcttcctatagcagaaatcctttaattgatgatgaggaagcggagttagatgctgaattatcctacatttcgataggtgggatgatgggtcggatttga

SEQ ID NO: 72652 - DNA, 422 bp, Zea Mays
tccctcacaagcacttcattctttctgtcacacgctcagggattaccatgacctttgctcgttcgttaccagcacctcttcttcctccctctcaccgtgctcctcagccgaggtggcgaggaccctccctgtacatcgtctcctccatgtcgacatcttccctcatctctccaacgtcgtccagccattgagcagctcatcggagcagcaacgctcgacactgagtagcccaccgtggagtcacctcatcagcgtctcctcgctcctcgtccgttcgtcgagctcggcaagcccctcctcagccgtgccgagtctccaagccggctgtcgacgctcgcctttgtttctgtgttactggaaagattataatgtctttggcttaattagttacttcatgtggaggtcttgaagcttagattact

SEQ ID NO: 72653 - DNA, 1466 bp, Zea Mays
tttttttttttttagcgacgacatgcgggagcccaggagcgctacgatgttggacgacggcgacgacgacttcaccttcgccgccgcccatccgcctccccgtctactacctgcaggcgccggcggcggattcgtggggccgccgctgctgtacccagtcttcgggcgcccgaggtccccgccgcgggttgctgatccagcggagccggagccggagccggacacggccaccgcgcgggtgccgctaggacggcatctggcggtggacaggaggagggatccggcaccggcaccgctgccagctcccgcggacgacgacgacgactcggtgccggcggagacgttctgcccgtggtcgcccgggtggtcggcggcggcggcgtcgccggcgcggtgcaagaagagcggctccacggggtccgtgctccggtggcggccccggctcgccgtcgggcggagccagagcgacggcaaggagaagttcgtcttcttgagtgccggcggtggctcttctgggcgccggagccagaatgggcgaggcgtcgccgcgcccggaggtggtgccactgccggtgccccccacgcctggagctgctacgtcaacgacaataagtccggtggcggcgcgcgccgcaggtcgttcctgccgtacaagcgggacctcgtcgggctgttcgccaacgccgccgtgttccgccggagctacctcccgttctgatatgatatatgcactattgtactgtacacccagaggtaatggtttgaccatcatcagtttactggcgtactgcagtgggctcgatggcagcttatacttgtcatagccggtcagccgtgcagtccatccattacccagcacatttccctcctaggttttgcttcatgcatgttttgcttgtagaggaaggtgtggtacatgcatatgtgtgtatatacatttggattatgcatgccagtaggctgttcagaaggaatggaaaaggccgtgtcagacaatgctcttggacttgtttgttttgattgatccgagttggtagctagctgctagcgtagcgatgctctctacctgtctgctccatgactacatacatactcgtcgtgtgtcctagcttgacctgctgttagttgcctgacgacgtattgcagtacgaaaatctcagaggtgactagactgcttaaccaccactgagaaaaatggcgcataaatagccgacggcgccccaacttataagcgactctatccggtctcagtttcctcggcatactactctctttgtttttttttttaatatgaagctagttggagtcgttttccatggtggcccgtgcagcgtgctacaccaaacaagcaattaaccctcgttggtcgctcatgtcgcaagctggttagccggcgatgccgatgagtcgatcgtctccggccggccgtccctcgatcggtggcctcagctacgctacgcaggcgg

SEQ ID NO: 72654 - DNA, 351 bp, Zea Mays
gttcaccatgacgtctgtcggcttctgagcatatcatggccgccgctaacatagcctaatcgtgacctggtcgcttggaacttgccacacggggttaagcaaggaagagtcgaagacggtgctgcgtgctgggccaactgtgtgtgctgcagatgggcgaagaaggagcactcgggaactaaagatgaatcctgtgattcagatctagagtggagggcctgaccaatgtgaagaagattagttttctcaatagtaggcgagtgggtaaaggcatcatgtaacagcatagctacaagcttgttcttccacaagtttctccccttcctgttcttccttccttcgaagttttcc

SEQ ID NO: 72655 - DNA, 3603 bp, Zea Mays
cacaacataatacagtggtcgtgtctaaaacgtgtgtcttaccatattcattgtaccaatcagagcattcaataaattaaagtgaccaatcagctagcctcctatctcgaacatagagctaagacactgtgtcttcgtcaagatacatgtcttgagtttttttacattcacccccctagacacactctaaaacacaacttaagacactcattgtacatgcccttagcagacacgagagggaaaccagcaaccggtccggcccataacatggacctcaaggaaggcccaagtacttcaaaggccgagcccacatcctcaacgaaatatcgccaatcgccacccagaactgaacccaccaaaaaaaaaaacaaaaatatccaaacccatcaagcggagcagcagaggtttatccctaccagcctaccactcccccccaacgcggcgacggcggaaatggacgccaagctgctgctccccttccccttcgcgccggccgcggccaccaggtcccccaagtcgctcttccttggcgccccgctcccgccgccgccgcggccgccgccgttcccgctgcgcctccgcccgcggcccgcggcggtggtggcgcaggccgccgtgaagcgccgcaaggaggcccccttcgacaccgtgatccagcgggacaagaagctcaagctggtgctcaagctgcgcaacatcctggtggcgcagcccgaccgcgtgatgagcctccgcgagctcggccgcttccgccgcgacctcggcctcacccgcaagcgccgcctcatcgcgctcctcaggcgcttcccgggcgtcttcgacgtcgtcgaggagggcgtctactccctccgcttccgcctcacgccggccgccgagcgcctctacctcgacgagctccgcctcaggaacgagtccgagggcctcgccgtcgccaagctccgcaagctgctcatgatgtcgcaggagaagcgcatcctcatcgagaaggtcgcgcacctcaagcacgacctcggcctcccgcccgagttccgcgacaccgtctgcctcaggtacccgcagtacttccgcgtcgtccggatggaccggggcccggcgctggagctcacgcactgggaccccgagctcgccgtctccgcggcggagctcgccgaggaggagagccgggcgagggaagctgaggagaggaacctcatcatcgaccgcccactcaagttcaaccgtgtcaggctccccaagggcctcaaattgacgcggggggaggccaggaggattgcgcggttcaaggagatgccctacatttccccatatgccgacttctcgcacctgcgctccggatcagacgagaaggaaaagcacgcttgtggagtggttcatgaaattcttagcttaacggtggagaagcgcacgttggtggaccacctcacgcacttcagggaggagttcaggttctcgcagtccctgcgcggcatgatcattcgtcacccggacatgttttacgtatcgttcaaaggggatagggactcggtcttcctccgtgaggcgtacaaggactcgcagctggtcgagaagaaccagctggtgctacttaaggagaaaatgagggctcttgtggccgtaccacgcttccccagaagggccgcagttgggactggcgaggaggctgagggaatgaatggatcattgcagtcgcgggaccaagtgagtgacgaggaatacgacgatgaagatgaggggctctctgatatggaagatctgattagtgagctttctggtggcaaatcggatgctgactacgagtggggtgatggctggtttggtgagaacgatgactcaccgccagactttggagacgacgaagtcaaggtcgccatgaaaattgctgatggttctgccaacggcagcgcacctgttcctgtatttcctgatggcagaccaagggaacggtggtaaattgaggtgtttttgaacttctgattgatagaatcgttaatctataatcttagttcttttatcatagtatctagttgcaaagccctttgtcttttgagtcgccctgctgattcctgtcaccaagcacatcacccttcgaggaacccacatggcaatgctaaaaagtcactatacaagcacaatcctctagtgaatgttaaaggcatacagattcgtaagcctatatttcatataaatgtgcataatcaacgcggttggtgtttcttagttttgaattgtagtaacagttatctagtttagttctcatatttggcaatttatagactaaaatggaataaaatagagggactaaaaattagtccctataaaccaaacaccccgaagtatgcactgaactatatgtcaggatagtgtatcagtaggctatgcatgaatatctagcatctttgttggacatcttgacccgttttttcatgaaaaaaaaaatccagttgctatgaagtcatgcttttttagggaaaaaaaggaatagttctgacctctacagccagccagttcttacaaagttttcagctcagttgctattgctggtgatcataaaaaacgagggaaagaacacagaaacagaattattgtctctatccattcttggtgaagatgtccagaacgacagcctccaattatttattcccccaagcgtagtaatttgatttttttcccccagtggtctgcatggcaaataactttggaacagcacaaccatgcctatactttattttttgtttccgagacatacatttttcttagtaagtaacagccactggaaccaagagcattgtcattttttttctctctttccatttcaccccttgacctaatgatctgtcggttgtttaagttgagtgcacaacaagaaggtggaggcaggaaactgggaatgggatatccaaaatgaactcatagggatttaagtgacactgctgacactcaaggaagcattagtccagtttactcttgtcgtgcaatatctatgccattttttttttattttttttgccaaagctgatttctggcctttctcattcatataagttgagacatatcttccacttccatcacctgtctgtctgtctggacaggcaggcagccagaacattaggggcctacagtataccattgacacacagtttcgtttataagctgcagtgatggtctgaaatctgccattttttcagagatctgtgagaggtatgattggtccttactcctgatgtaaactgtgtgttctgacttgaagtatatactaaggactcccccccccggcagtcaaggaagagcggcaattgcttaccaggcaaggcatacaattcggggtcggagtcggtatcagtgcagcctccaaacacagtacagagcatacgcaaattgtcggcgatcgttttggaaattggaactcctcctgtgctgtgcagatgtgggctcctgctgcttggacaccatgccgcttggagctttccaagagcgatcgctcctctgcgatgcgaccgcctctcgctctcgtcgtcggcgacttctccgcacgcgtctcgtatctaccgtaggtaataaggcccacctgtcctggatgacgcaacgcgtgctcacgctcatgac

SEQ ID NO: 72656 - DNA, 2299 bp, Zea Mays
cacaacataatacagtggtcgtgtctaaaacgtgtgtcttaccatattcattgtaccaatcagagcattcaataaattaaagtgaccaatcagctagcctcctatctcgaacatagagctaagacactgtgtcttcgtcaagatacatgtcttgagtttttttacattcacccccctagacacactctaaaacacaacttaagacactcattgtacatgcccttagcagacacgagagggaaaccagcaaccggtccggcccataacatggacctcaaggaaggcccaagtacttcaaaggccgagcccacatcctcaacgaaatatcgccaatcgccacccagaactgaacccaccaaaaaaaaaaacaaaaatatccaaacccatcaagcggagcagcagaggtttatccctaccagcctaccactcccccccaacgcggcgacggcggaaatggacgccaagctgctgctccccttccccttcgcgccggccgcggccaccaggtcccccaagtcgctcttccttggcgccccgctcccgccgccgccgcggccgccgccgttcccgctgcgcctccgcccgcggcccgcggcggtggtggcgcaggccgccgtgaagcgccgcaaggaggcccccttcgacaccgtgatccagcgggacaagaagctcaagctggtgctcaagctgcgcaacatcctggtggcgcagcccgaccgcgtgatgagcctccgcgagctcggccgcttccgccgcgacctcggcctcacccgcaagcgccgcctcatcgcgctcctcaggcgcttcccgggcgtcttcgacgtcgtcgaggagggcgtctactccctccgcttccgcctcacgccggccgccgagcgcctctacctcgacgagctccgcctcaggaacgagtccgagggcctcgccgtcgccaagctccgcaagctgctcatgatgtcgcaggagaagcgcatcctcatcgagaaggtcgcgcacctcaagcacgacctcggcctcccgcccgagttccgcgacaccgtctgcctcaggtacccgcagtacttccgcgtcgtccggatggaccggggcccggcgctggagctcacgcactgggaccccgagctcgccgtctccgcggcggagctcgccgaggaggagagccgggcgagggaagctgaggagaggaacctcatcatcgaccgcccactcaagttcaaccgtgtcaggctccccaagggcctcaaattgacgcggggggaggccaggaggattgcgcggttcaaggagatgccctacatttccccatatgccgacttctcgcacctgcgctccggatcagacgagaaggaaaagcacgcttgtggagtggttcatgaaattcttagcttaacggtggagaagcgcacgttggtggaccacctcacgcacttcagggaggagttcaggttctcgcagtccctgcgcggcatgatcattcgtcacccggacatgttttacgtatcgttcaaaggggatagggactcggtcttcctccgtgaggcgtacaaggactcgcagctggtcgagaagaaccagctggtgctacttaaggagaaaatgagggctcttgtggccgtaccacgcttccccagaagggccgcagttgggactggcgaggaggctgagggaatgaatggatcattgcagtcgcgggaccaagtgagtgacgaggaatacgacgatgaagatgaggggctctctgatatggaagatctgattagtgagctttctggtggcaaatcggatgctgactacgagtggggtgatggctggtttggtgagaacgatgactcaccgccagactttggagacgacgaagtcaaggtcgccatgaaaattgctgatggttctgccaacggcagcgcacctgttcctgtatttcctgatggcagaccaagggaacggtggtaaattgagctcccccccccggcagtcaaggaagagcggcaattgcttaccaggcaaggcatacaattcggggtcggagtcggtatcagtgcagcctccaaacacagtacagagcatacgcaaattgtcggcgatcgttttggaaattggaactcctcctgtgctgtgcagatgtgggctcctgctgcttggacaccatgccgcttggagctttccaagagcgatcgctcctctgcgatgcgaccgcctctcgctctcgtcgtcggcgacttctccgcacgcgtctcgtatctaccgtaggtaataaggcccacctgtcctggatgacgcaacgcgtgctcacgctcatgac

SEQ ID NO: 72657 - DNA, 1369 bp, Zea Mays
ccacatctctactggtgcacggttctgccgtctgccatcgcgtgcatgccaatctcagtcgcctcccccaccgcacctctcccagaaaccgcgcctcccccaccgcgcgcattccatccatcgcgtgctccctccacgctagatctttcttcccaaccgcgcctcccccacatcgcccttccatggcagctgctccctcgcgcattccattcatggcgcgaaaccatcgcacccccaccgcgcctcccccagcattccatccatggcgctccctccgccccagaaatcgcgcgcatcccatccatggcgcacacgtcgcccacttccatccatggcagatcttccatccgcaaaccgtgcctcccccaggcattgcatctgatattgctgctaaatgtttccgcagctgatccacccaaggccgaggaagctattagatggttttatccatcagcatctgcaggcaatgctcgtgctcaatacaacctaggcctttgcttgcagaacgggaagggtgtcaaacagaatcagaaggaagctgcaaaatggtatttgcgagctgcagagggagggaatgtacgggccatgtataacatttccttgtgttacagctatggtgaagggcttggacaggatccagtgcgtgctaagaggtggcttcaactagctgctgattgtggtcacaagaaagctctttatgagtgtggtattaagctttgtgcggcaggagacaaggtcaagtgtttcatgtatctagagctggcgacacggcgtggagaagctgctgctgctcacatgagggatgtaatacttgaatcgctctctgttgtgaatgcgcaacgtgccatgtcggatgctgataaatggaagcctaggacactccatcctagacctagaaggtgaggaaatgaccacgccaaagtgcagaagaaccatatcatcaagatatttgctatggaatagggattatatttgggtgtatgctaacagcgtgaccatcaactcgaatgagctattctaagtccgggcagtgaccgcagctgaccatctactctgctagctagtccatgcaggtgttcgtcaacggccagtcctatgagttcttcaacaataggcgtcgtgtatggtggctatgatagtcccaagctaacatacaacgggcatgtgaagatgtggcaaggcaacaacaagaaattcagaaccatacggcctccgtgctcaagcatcacttaagcgggatgatgaggtatattcagatttatcctttacaatatgtaaaggcatttaatatagcctttttaactgtgctgcactcttgcctgtatgagtcttttttttcaaaagaaccttttgttttccagaaaataat

SEQ ID NO: 72658 - DNA, 1250 bp, Zea Mays
atggcgcacacgtcgcccacttccatccatggcagatcttccatccgcaaaccgtgcctcccccaggcattgcatctgatattgctgctaaatgtttccgcagctgatccacccaaggccgaggaagctattagatggttttatccatcagcatctgcaggcaatgctcgtgctcaatacaacctaggcctttgcttgcagaacgggaagggtgtcaaacagaatcagaaggaagctctatggtgaagggcttggacaggatccagtgcgtgctaagaggtggcttcaactagctgctgattgtggtcacaagaaagctctttatgagtgtggtattaagctttgtgcggcaggagacaaggtcaagtgtttcatgtatctagagctggcgacacggcgtggagaagctgctgctgctcacatgagggatgtaatacttgaatcgctctctgttgtgaatgcgcaacgtgccatgtcggatgctgataaatggaagcctaggacactccatcctagacctagaaggtgaggaaatgaccacgccaaagtgcagaagaaccatatcatcaagatatttgctatggaatagggattatatttgggtgtatgctaacagcgtgaccatcaactcgaatgagctattctaagtccgggcagtgaccgcagctgaccatctactctgctagctagtccatgcaggtgttcgtcaacggccagtcctatgagttcttcaacaataggcgtcgtgtatggtggctatgatagtcccaagctaacatacaacgggcatgtgaagatgtggcaaggcaacaacaagaaattcagaaccatacggcctccgtgtaagctcatagcactagaagttcagaacacttctttattagtaatatcccccctttgccctagagatgagcaagaaaggtttattatttttctacttgatttcactactgttcttccttttgtaagcacatttgacgtttgaaacaagaattagctaatagagatgtcatttgcagtagctcgctctttacaaattccaattggtttaatttgcatttgacaaggacaaatcactaaatgatggtttggtgtaggctcaagcatcacttaagcgggatgatgaggtatattcagatttatcctttacaatatgtaaaggcatttaatatagcctttttaactgtgctgcactcttgcctgtatgagtcttttttttcaaaagaaccttttgttttccagaaaataat

SEQ ID NO: 72659 - DNA, 1715 bp, Zea Mays
gcatggatgctcacaccactcacattgttgcaagaaagaacacttcgctttcattcacctcaaatgagctcatggatcattttcccttcgcttggttacccatggaccccttcacagccatggcgctcagcggtaccctctcaccctcattctctaccacatctaccaatgataccatgtacaaccttaacccagcgttgtatgcatccctcgtgccaccaataaggaaacctgcaaccccgaccacactagaggtagggaggcaatgcaaggaggaggaggatgcatccattcgtctggtgcacctgcttatcacttgcaccagtgccattgagactggtgactactcgatcgcacaaggaaacttgtctgaggcacgcaagattcttggggaaatcccaacttcgaccgggattggccgtgttgggaaacacttcatcgacgcactagttcaacgcctcttcccggcatatccgcacgcagcaccaccttctccatctccttctacatcgatcgatctgcacaacaatttttatgatgcaggtctccagtggccggcactcatggatgtcttctccgcccgtgagggtgggccaccaaagctccgaatcacaggcattggcccgaacccaataggtggccgtgacgagctccatgaagtgggaattcgcctcgccaagtatgcacactcggtgggtatcgacttcactttccagggagtctgtgtcgatcagcttgataggttgtgcgattggatgcttctcaaaccaatcaaaggagaggcagttgccataaactccatcctacagctccatcgcctcctcgttgacccagatgcaaacccagtggtgcccgcaccaatagatatcctcctcaaattggtcatcaagataaaccccatgatcttcacggtggttgagcatgaggcagatcacaacagaccaccactactagagaggttcactaatgccctcttccactatgcgaccatgtttgactctttggaggccatgcatcgttgtaccagtggtagagacatcaccgactcactcacagaggtgtaccttcgaggtgagatttttgacattgtctgcggcgagggcagtgcacgcaccgaacgtcatgagttgtttggtcactggagggagaggctcacctatgctgggctaactcaagtgtggttcgaccccgatgaggttgacacgctaaaagaccagttgatccatgtgacatccttatctggctctgggttcaacatcctagtgtgtgatggcagccttgcactagcgtggcataatcgcccgttatatgtggcaacagcttggtgtgtgacaggaggaaatgctgccagttccatggttggcaacatctgtaagggtacaaatgatagtagaagaaaggaaaaccgtaatggacccatggagtagcaggaagaataaccatgtcatgagcaaatcgatcaagtaataaaatgcactgatgacatgcatggtgatctaaagtttttttgcgtgaatgtgcaatgacgaattgttcaatttgaataacctaatcatgagactcaaaaggaaaatatttgtttgttgttaattcaatgagttttttttttaaatgtttgccctcactactataaaacatacatatgttgtttttaaggaagtattggtgcctaatatcatcctcaacaagtaccgctatttttacatgtgaacata

SEQ ID NO: 72660 - DNA, 1707 bp, Zea Mays
gcatggatgctcacaccactcacattgttgcaagaaagaacacttcgctttcattcacctcaaatgagctcatggatcattttcccttcgcttggttacccatggaccccttcacagccatggcgctcagcggtaccctctcaccctcattctctaccacatctaccaatgataccatgtacaaccttaacccagcgttgtatgcatccctcgtgccaccaataaggaaacctgcaaccccgaccacactagaggtagggaggcaatgcaaggaggaggaggatgcatccattcgtctggtgcacctgcttatcacttgcaccagtgccattgagactggtgactactcgatcgcacaaggaaacttgtctgaggcacgcaagattcttggggaaatcccaacttcgaccgggattggccgtgttgggaaacacttcatcgacgcactagttcaacgcctcttcccggcatatccgcacgcagcaccaccttctccatctccttctacatcgatcgatctgcacaacaatttttatgatgcagtggccggcactcatggatgtcttctccgcccgtgagggtgggccaccaaagctccgaatcacaggcattggcccgaacccaataggtggccgtgacgagctccatgaagtgggaattcgcctcgccaagtatgcacactcggtgggtatcgacttcactttccagggagtctgtgtcgatcagcttgataggttgtgcgattggatgcttctcaaaccaatcaaaggagaggcagttgccataaactccatcctacagctccatcgcctcctcgttgacccagatgcaaacccagtggtgcccgcaccaatagatatcctcctcaaattggtcatcaagataaaccccatgatcttcacggtggttgagcatgaggcagatcacaacagaccaccactactagagaggttcactaatgccctcttccactatgcgaccatgtttgactctttggaggccatgcatcgttgtaccagtggtagagacatcaccgactcactcacagaggtgtaccttcgaggtgagatttttgacattgtctgcggcgagggcagtgcacgcaccgaacgtcatgagttgtttggtcactggagggagaggctcacctatgctgggctaactcaagtgtggttcgaccccgatgaggttgacacgctaaaagaccagttgatccatgtgacatccttatctggctctgggttcaacatcctagtgtgtgatggcagccttgcactagcgtggcataatcgcccgttatatgtggcaacagcttggtgtgtgacaggaggaaatgctgccagttccatggttggcaacatctgtaagggtacaaatgatagtagaagaaaggaaaaccgtaatggacccatggagtagcaggaagaataaccatgtcatgagcaaatcgatcaagtaataaaatgcactgatgacatgcatggtgatctaaagtttttttgcgtgaatgtgcaatgacgaattgttcaatttgaataacctaatcatgagactcaaaaggaaaatatttgtttgttgttaattcaatgagttttttttttaaatgtttgccctcactactataaaacatacatatgttgtttttaaggaagtattggtgcctaatatcatcctcaacaagtaccgctatttttacatgtgaacata

SEQ ID NO: 72661 - DNA, 458 bp, Zea Mays
cacgattcacggtcacggcgaccccgtctgccgtttggattccccggcaagcggcggcggccggaaccggaacccacgcgacggcgacactggcaccgcgctcggaggcgctggagccagccccctccccggagactagtaggtggccagctcgccacggccaaccactggaactgttcggttccacttcggcgttcaggtggagctctccgccacaacctcgactgtctccgttcaggattcttgtgccaggtggtgccggcaaaaaatacttacagctaagaggaatgttgatctgttctcgatctctccaatcatgttacttctggcatcataaacattggatgacattgatcctaaagatgtctctctttttgcttcacgcttcatgagactttgatagaactccacaatctccggtgcacggtgtacctagaggtggtaacgggccatttaat

SEQ ID NO: 72662 - DNA, 437 bp, Zea Mays
cacggcgaccccgtctgccgtttggattccccggcaagcggcggcggccggaaccggaacccacgcgacggcgacactggcaccgcgctcggaggcgctggagccagccccctccccggagactagtaggtggccagctcgccacggccaaccactggaactgttcggttccacttcggcgttcaggtggagctctccgccacaacctcgactgtctccgttcaggtggacttttgtcttgatatatgcttcttcaagtcagatctgctgttctagcactgtatgtgcgtgggtggtaactggtaacgggtcaatttcttcaaagtatcgaatgcggtgaggcacaaagtaatttttttttcttttaacaaagacggcaaggttcattcagacgaattatctccatgggtaccggactaaccgaatggacgcttttg

SEQ ID NO: 72663 - DNA, 1562 bp, Zea Mays
ttaccatgtacgcgcggatttttctttacgggaggacgggaggttgctatttatagtggcctcacgcgcgaccctgcacccaccgatcacacaatcccgacttcccgaggccgcccggcccgagagcaccgagcacgcttctcccaaactgcactgctccgtccacggcacggcgaggcggggacgccaaagcaaaaaggcaataaagccagcggccagggccaggaccaggagccggcgtcggtggaggctgaggcagaggcgccgaagcggcggcggcatgggggtgctgcggagcacgcagagcctggaggccgaggtagaggagatgcgcggcgcgctgctgctccatggcgcgtgggcgtggaggcccggcgggggcgccgccaagcgcgcggcccgcgccgtggagccccgccgccgcggaggcgcgcaccgtgtgcgtcacggggggcacgtccttcctcggctttgccgtcgtcgaccgcctgctccgccacggctacaccgtccgcctcgccctcgagacgcaagaggaccttgacaagctgcgggagatggagatgtttggggagaatggcagggatggggtctggactgtgatcgcaaatgtgatggacccggagagtttgcatgaggctttcgacggctgtgttggtgtctttcacacttcgtcgcatgtggatccagcgggcatctccggttacacgaaacacatggcaggcttggaggccaaagcagcagagctggtggtggaagcatgtgtgaggacagaatccgtgaggaagtgcgtcctgacgtcgtcactgttggcatgcgtctggaggcagaactaccctcatgaccgccgccggttcccaactaccatcgatgagaactgttggagcgacgagagcttgtgccgcgacaacaagagtttgaagcctggagcctaaacatttgcagctgtggctgtcactcggcaagacgatggcggaaaaggcggcgtggagggccgcacggggaacagacctgaagctagtgaccatatgcccagcactggtaaccgggccggggttccggaggcggaaccctactccatccattgcatacctcaaaggagcgcacgccatgctcgtccaaggtctgctggcgactgcgaacgtggagagggtggcggaggcgcacgtccgcgtgtacgaggagctgagcggcacggccgggggccggtacatctgctacgaccacgtggtgcgacgaggcgaggagttcgcggagctgcagcggcagctggggctcagggtccccgcgaccgcgacgcccgacggctatggcggcgacgacgacgacggccgggcgccgcggttccagctctgtaaccggaagctggcggcgctcatgtccgcgcggaggcggtgcacctacgacgcctacttccccatgccgcaggagtgagaccggaagaggagagagagctgctgatgctggacaacgactggagcgtgcgtgacaagtgacctcgtgtacatagcaatagtggtgatcggctcgcatcaatataataaatcggcctcaagtatccc

SEQ ID NO: 72664 - DNA, 460 bp, Zea Mays
aaaaacaaaatcggtcaccgactgtttgtcctatatgggaacatacatagtatttccatcttgattactttgagaggaccttgacaagctgcgggagatggagatgtttggggagaatggcagggatggggtctggactgtgatcgcaaatgtgatggacccggagagtttgcatgaggctttcgacggctgtgttggtgtctttcacacttcgtcgcatgtggatccagcgggcatctccggttacacgaaacacatggcaggcttggaggccaaagcagcagagctggtggtggaagcatgtgtgaggacagaatccgtgaggaagtgcgtcctgacgtcgtcactgttggcatgcgtctggaggcagaactaccctcatgaccgccgccggttcccaactaccatcgatgagaactgttggagcgacgagagcttgtgccgcgacaacaagagtttg

SEQ ID NO: 72665 - DNA, 1719 bp, Zea Mays
ccagctcaggcatgcagcccggaccccccccccccccccccccccccccaccaccactcgcctcgccgcaggcggtcacgatcaatgccgcatccctccgctgccggcctgctcacacagcctcctcttcctccagtcctcctcccacgcaccacgggcgaacaaaagcacaaaagccaacccacaccgcaccacccctactacccctaggaaacgacgaccgcaactacataccagccagccgacccgacccccagcagtcttgcaggctacagcccctgcggcaccagagggagcggccgcggcagggcgtcctcgtcgccgcggcagggcgctagggcaggcaggcatgcgctgatggaattcacggcccaggagggggaggagcccgtctcggaggagatgggcgcgagctccgcgccgccgccctgcctcggccccggccgcggcccggggaaccagaaccacgccgccgaggcgacgtaccacgagtgtctgcgcaaccacgcggcggcgctgggcggacacgtcgtcgatggctgcggcgagttcatgcccgaggacgccgacaggctcaagtgcgcagcctgcggctgccaccgcagcttccaccgcaagggcgacgcggggcgccgccaccagctcctgctgccgccgcccgccgcggcggtcccgcgcgtcccgctgctcctgcctccgccccacccctacgcggccggcgctgcccacccccactacgcgtcgccgccgctgttcccgtaccacggcacgcccagcggcaccacgaccgagtcgtccagcgaggagcgtggcccgccgtccgggttcgccgccgcgccgcacgcgcacgcgcagggccacgtccggcggaagcggatccggaccaagttcacgccggagcagaaggagcagatgctggcgttcgcggaacgcctcggctggcggatgcagaagcaggacgacgcgctggtgcagcacttctgcgaccaggtcggcgtccggcggcaggtcttcaaggtctggatgcacaacaacaagcacatcggcagcggcggcaggaggcagccgccgccgcacctgccgcctcccgaggggcagcaacagccccagcagccccagtagccacggtgggagacaaggctcagcagtcagcagcaccaccaccaccaccaccatttgcttaatcccccgcctcatttttttatgggctccgagagggggtgtgggattaaacaagggaagtcaggaggggttcctatcctttcttcccttccgtttttgggttcaccttatccttgattttttgtagtcacttcacgtcttcaccatcctcttttgcttcacgattcttgcttgcatatctttggttttattctgttcttactagcttgggggatcaattggaaggaggaggaggcactgtgcatgttttgtagctacaatcctgctaccttattgccatttagcccccttcggcgagcaaggcattgaggcatgtgcttgctgaagttgatttggaccggtttgaccacgttgagcgcatgccagaccctatgccaaagccagcttgctaattgtgttgctctctctcaccacagtctagaccatgactttgtagtttgcaagcatctgttcatcacatgtttgactagtaaccgaaaatgtcaacaacggctgctgaggccaagatattgctctggctccgccttatctacaggc

SEQ ID NO: 72666 - DNA, 4005 bp, Zea Mays
gtccacaccacggctgtggtgcacggttctgcctccgcgcctttccatcgccagcgcgttcttcgtgctctgtcaatctcgcagcagcgccactctcttccccacttccccaccgtggtccccccttccccacccaccggagaccgcgccattccccccttccccaccgcgaccaccagaccggcatggcgcatacctgagattgcgctctccccaccggatccggcttggcgcacaccggagaccacgcccttcacccttccccaccgtggccaccggatcccgcacacgcgcgctccggcatggcgcatccacagcacgaacgcccggaatggagcagcgtgcgtccatgtacccaccggagaccaggccattcaccaccgcagtgcccccaccctcatcatcctcgcgtccccccgtcgctacagccgccaagttggtctgcagggaggtccccccctcaccgcgccacgctcgccgcgcccgccgctcggtcctcgccgcgacatgcgcctaccctcacctacacgatgctcactcctccgcacatcgcaaagccgaaggtccacgccccctccgtgctgtgaccccctcccttgtgtgcccatgatgctggaagggaagtcctaccttgtgccgcgctccctgctaagctcctgcgagatagagacacagtgggcgtacttcgcccacgaggtccacggcggcaagcgcctggcgccggaagactgcgaggtcgaagacctggacaaagctgacgtcggcggcaagcgcagcaagccgccgtctccacagccgcacacgccggacatctccgagggtcgcggctccagccgccatgcctccggttgcggagagcagcagggcactgggagcaaccccatgaattcaatcgaccgtgacctgaccctcaatagcctcctccggactattgaatagggcaaggaagatgtgacgaaaaggtaaggggtttcgatcggagatggcagcggcggcgaccgcacatagagccagcttcccgttgcgtctgcagtagatccttgctggaagctgcgccgtcgcacctgtggtcaaggtcgagtctgagccgattttgtggggtcctagatccagacgtcggtcgacaggtcgctggcgtcagtggaccacgtcgcctatcgcggttgtggagcggagctgtgagcagatcccaagtccaatgacgaagagggagtctcggtagggtgcgataaggcgcgatgaggtcagacacggagcacggacgtgtcctcagtcgctgttgtcatgtgtcagtggatgcagtcgtcgctatcgcccacaagaaacctcgcttcgtggaaagattagtatttaacatttggatgaggaagtcaaggacaccgacctcaagcgctctaccaggaagtccgaggaggccgtcctcgccgacctcgcttggctcggcctcgaatgggaggaagacctgttggtggaagggtgtttttcacaaatatgaagatagccttctcagcactgagcttgattatcttcctaacaacacacacgaattgtccaactgtaagatctgcagggacgaggtacctgcaaagtgatggccatcagaaaatcagaacagcttacggctgcaactcgcttttgatgtgtgcaataatgctttaatgcagtagcatttcttttcgtacagaacggtaacatggctccttcagtcctatatgaaactaaaatcaccttttgtaattgtagaccacaaaacatggaaaccataatagatatttaactcagcatggaacgatggaaattggtgcatctttgatagatgaatgcaacagggttcaatgctatgcattatgttcattttcatgggttagtgggttttgacaagaattctgtgtgtactttcgttagttgtttccttattatcctgtttaaatattttttgtttatttctcctggccttcaattttgataattactactaacatactctaacaccctactataaccagcggcagagctctcgcctcttggcaaggtggggccattaccataccttgagtttcttccgtacctactgtaatatgctgtttcatttgctaactatgctataaatcatgctacattgttctgcttgactgtctacgccatacctcaattcccacctgtcctctgctaatgcatgaaatatcctttttagggttaatttgggaacccccatttttcgaagggattttcatttttccaagggaaaatgaactaatttcccttgggaaaatctgaaaatgtggttcccaaactagcccttaaggtctattttgaaaacgggatcccccctgttcctgtgttttttcatatgaaattgaactaattcctgtgaaatttctatgaagatcgccaccaacctatcattcttacctttttctgtcatgtctctaatctgcatgtagcgttctgtaaggagcatctaaatattttggccttgtttatgttccttatgttcttagcaagcaatgtgtaaacgatgaacgaggtcattttactgatgtatttttggacatcactgtccaaatgatgtttattggctgatcatcttttttacttgtgtaggtgctcataaaagaacacctgtgatgcctagaaggaaccctccaccacctccaagagagcaatctaatagtttttttaccgcatggaagctcaaaggcaggagatgcaccgttagaggtctctctgacacggagatacaaaattcttggaaaagtagagcagaacaacctcaacccgagccaaaatgtgagaaagacccatttaacagctttgttgcagattttgacactcacaatctcaacattgccgttggtaaggcatccgaacttgaacttgaagtctccaatctaaaggagcagttgaagaaaatcacattagaaaaggctgagatgacaaccaagcatgaaaagttatctgcaatctgccgatcacagcgtcaggagatccaagagctgaagctcactcttgttgagccaacgcctccctcaaacaaagtcagctcaaggacacaagattctggatctcagcgaaaggaaaagatccaaggcactgtgtgggagcttgaacaagggatgcttgctattgctagcaactcctcatcagccagttctgatgccaaaacatggcaggctttccctgacacaaagactcaggcccgaccaaaggtcgatcatgcaactaatgggagccaaaacataaccaagaacacaacgtcaggtgcttcccccgatgcgtggggttttggtactgataatttcagaacaccagcaacaacattaagagctaccacacagatcaacagggcagctgcccaacggagctcatcccaaagatttaacgctggtgtggccaagagccagtctcggagctgcttccccagggtgaaagtcgtgcacacgtcgctgcagcgggacaacaggtactacgagcgcgaaaacttgctgatggtcatcaagaacaacctgttgtggcaccaccttagcatgggcctgggctatgatgactccaactccaacgatagcggcgtgtcacctagctcggaccgtgcgaacaacatagaggtcgccacagtgtcgccggtgccggcggtcgtcaagaagcaggcgaggttcctggtggcctcacctaggagccccgacgtgaatgagaccatgatggaggagctgcacgagctgtgcgaggcgcgggaggccggcaccgcgttcatcatggagcactcggcatgtggagaccaagcccgggtcgtcactgctcaagaggctgacatgtgaatttgatggacaacatgtatcctcaatgatcgctcgagtgctcagtgagccataatatcgtgaaaattctatgtgcttgtatgtttcgttttctttttataaatcatattgtaatgctatttctataggtggagggtgataaatgtatcaatttatctttatggttaatattgttgtaaagattttgaac

SEQ ID NO: 72667 - DNA, 4864 bp, Zea Mays
tgtggtgcacggttctgcctccgcgcctttccatcgccagcgcgttcttcgtgctctgtcaatctcgcagcagcgccactctcttccccacttccccaccgtggtccccccttccccacccaccggagaccgcgccattccccccttccccaccgcgaccaccagaccggcatggcgcatacctgagattgcgctctccccaccggatccggcttggcgcacaccggagaccacgcccttcacccttccccaccgtggccaccggatcccgcacacgcgcgctccggcatggcgcatccacagcacgaacgcccggaatggagcagcgtgcgtccatgtacccaccggagaccaggccattcaccaccgcagtgcccccaccctcatcatcctcgcgtccccccgtcgctacagccgccaagttggtctgcagggaggtccccccctcaccgcgccacgctcgccgcgcccgccgctcggtcctcgccgcgacatgcgcctaccctcacctacacgatgctcactcctccgcacatcgcaaagccgaaggtccacgccccctccgtgctgtgaccccctcccttgtgtgcccatgatgctggaagggaagtcctaccttgtgccgcgctccctgctaagctcctgcgagatagagacacagtgggcgtacttcgcccacgaggtccacggcggcaagcgcctggcgccggaagactgcgaggtcgaagacctggacaaagctgacgtcggcggcaagcgcagcaagccgccgtctccacagccgcacacgccggacatctccgagggtcgcggctccagccgccatgcctccggttgcggagagcagcagggcactgggagcaaccccatgaattcaatcgaccgtgacctgaccctcaatagcctcctccggactattgaatagggcaaggaagatgtgacgaaaaggtaaggggtttcgatcggagatggcagcggcggcgaccgcacatagagccagcttcccgttgcgtctgcagtagatccttgctggaagctgcgccgtcgcacctgtggtcaaggtcgagtctgagccgattttgtggggtcctagatccagacgtcggtcgacaggtcgctggcgtcagtggaccacgtcgcctatcgcggttgtggagcggagctgtgagcagatcccaagtccaatgacgaagagggagtctcggtagggtgcgataaggcgcgatgaggtcagacacggagcacggacgtgtcctcagtcgctgttgtcatgtgtcagtggatgcagtcgtcgctatcgcccacaagaaacctcgcttcgtggaaagattagtatttaacatttggatgaggaagtcaaggacaccgacctcaagcgctctaccaggaagtccgaggaggccgtcctcgccgacctcgcttggctcggcctcgaatgggaggaagacctgttggtggaagggtgtttttcacaaatatgaagatagccttctcagcactgagcttgattatcttcctaacaacacacacgaattgtccaactgtaagatctgcagggacgaggtacctgcaaagtgatggccatcagaaaatcagaacagcttacggctgcaactcgcttttgatgtgtgcaataatgctttaatgcagtagcatttcttttcgtacagaacggtaacatggctccttcagtcctatatgaaactaaaatcaccttttgtaattgtagaccacaaaacatggaaaccataatagatatttaactcagcatggaacgatggaaattggtgcatctttgatagatgaatgcaacagggttcaatgctatgcattatgttcattttcatgggttagtgggttttgacaagaattctgtgtgtactttcgttagttgtttccttattatcctgtttaaatattttttgtttatttctcctggccttcaattttgataattactactaacatactctaacaccctactataaccagcggcagagctctcgcctcttggcaaggtggggccattaccataccttgagtttcttccgtacctactgtaatatgctgtttcatttgctaactatgctataaatcatgctacattgttctgcttgactgtctacgccatacctcaattcccacctgtcctctgctaatgcatgaaatatcctttttagggttaatttgggaacccccatttttcgaagggattttcatttttccaagggaaaatgaactaatttcccttgggaaaatctgaaaatgtggttcccaaactagcccttaaggtctattttgaaaacgggatcccccctgttcctgtgttttttcatatgaaattgaactaattcctgtgaaatttctatgaagatcgccaccaacctatcattcttacctttttctgtcatgtctctaatctgcatgtagcgttctgtaaggagcatctaaatattttggccttgtttatgttccttatgttcttagcaagcaatgtgtaaacgatgaacgaggtcattttactgatgtatttttggacatcactgtccaaatgatgtttattggctgatcatcttttttacttgtgtaggtgctcataaaagaacacctgtgatgcctagaaggaaccctccaccacctccaagagagcaatctaatagtttttttaccgcatggaagctcaaaggcaggagatgcaccgttaggtgcattttgggtgacataacatgcacgaggtgctcaagctgtagttaacaggaaccctttgtttgatggggagtcaattaaggcatcactgtcatcaaagcagaaccaaagctgggtggacaccagcatcagtattcctggcaataggcatgatcattccggtcagatgtcactgacaagtaaagcacaaaataactctttgtccaataatgtttttagaggtctctctgacacggagatacaaaattcttggaaaagtagagcagaacaacctcaacccgagccaaaatgtgagaaagacccatttaacagctttgttgcagattttgacactcacaatctcaacattgccgttggtaaggcatccgaacttgaacttgaagtctccaatctaaaggagcagttgaagaaaatcacattagaaaaggctgagatgacaaccaagcatgaaaagttatctgcaatctgccgatcacagcgtcaggagatccaagagctgaagctcactcttgttgagccaacgcctccctcaaacaaagtcagctcaaggacacaagattctggatctcaggtgatttatctacatatgtctaatacagcatattcactctcctgaagtttattagcatcttgcatagtatttatactccatgcagcgaaaggaaaagatccaaggcactgtgtgggagcttgaacaagggatgcttgctattgctagcaactcctcatcagccagttctgatgccaaaacatggcaggctttccctgacacaaagactcaggcccgaccaaaggtcgatcatgcaactaatgggagccaaaacataaccaagaacacaacgtcaggtgcttcccccgatgcgtggggttttggtactgataatttcagaacaccagcaacaacattaagagctaccacacagatcaacagggcagctgcccaacggagctcatcccaaagatttaacgctggtgtggccaaggtagagcagccatctggatgggctggtttttaacttcaatcgacatgcgttaaccatcattctgatcaacatttacaatctgcgctacacaactgctgttgccgatggagttgtgatctttgacatccacagggcatcaaaattggttatttttagtgtgttcatcaattttggttgagccaactttgatattgattcatgagatcacttgaaattatccgttgttaatctctactactccttatgtttgtatcgtaggcgtccacattcgaggatggtgcacagttctgccatcgcgctccctccgcgctccatccgtcctccgctctcgatcctcgaatcccgcggctccatcctcgaatccagcgctccctccgcactccatccgtctccctccatgctccatccgtcctctgcgctcaatcctcgaatccctccgtgctccatccatcttccgccgcctctgtgatgaacacgggaagcgtacaatgacctggtgctggcgatcttggcatcagtgatgggcagtcaatccatcataagcaggaccttttccatcatcaatcagagccagtctcggagctgcttccccagggtgaaagtcgtgcacacgtcgctgcagcgggacaacaggtactacgagcgcgaaaacttgctgatggtcatcaagaacaacctgttgtggcaccaccttagcatgggcctgggctatgatgactccaactccaacgatagcggcgtgtcacctagctcggaccgtgcgaacaacatagaggtcgccacagtgtcgccggtgccggcggtcgtcaagaagcaggcgaggttcctggtggcctcacctaggagccccgacgtgaatgagaccatgatggaggagctgcacgagctgtgcgaggcgcgggaggccggcaccgcgttcatcatggagcactcggcatgtggagaccaagcccgggtcgtcactgctcaagaggctgacatgtgaatttgatggacaacatgtatcctcaatgatcgctcgagtgctcagtgagccataatatcgtgaaaattctatgtgcttgtatgtttcgttttctttttataaatcatattgtaatgctatttctataggtggagggtgataaatgtatcaatttatctttatggttaatattgttgtaaagattttgaac

SEQ ID NO: 72668 - DNA, 3415 bp, Zea Mays
tgtggtgcacggttctgcctccgcgcctttccatcgccagcgcgttcttcgtgctctgtcaatctcgcagcagcgccactctcttccccacttccccaccgtggtccccccttccccacccaccggagaccgcgccattccccccttccccaccgcgaccaccagaccggcatggcgcatacctgagattgcgctctccccaccggatccggcttggcgcacaccggagaccacgcccttcacccttccccaccgtggccaccggatcccgcacacgcgcgctccggcatggcgcatccacagcacgaacgcccggaatggagcagcgtgcgtccatgtacccaccggagaccaggccattcaccaccgcagtgcccccaccctcatcatcctcgcgtccccccgtcgctacagccgccaagttggtctgcagggaggtccccccctcaccgcgccacgctcgccgcgcccgccgctcggtcctcgccgcgacatgcgcctaccctcacctacacgatgctcactcctccgcacatcgcaaagccgaaggtccacgccccctccgtgctgtgaccccctcccttgtgtgcccatgatgctggaagggaagtcctaccttgtgccgcgctccctgctaagctcctgcgagatagagacacagtgggcgtacttcgcccacgaggtccacggcggcaagcgcctggcgccggaagactgcgaggtcgaagacctggacaaagctgacgtcggcggcaagcgcagcaagccgccgtctccacagccgcacacgccggacatctccgagggtcgcggctccagccgccatgcctccggttgcggagagcagcagggcactgggagcaaccccatgaattcaatcgaccgtgacctgaccctcaatagcctcctccggactattgaatagggcaaggaagatgtgacgaaaaggtaaggggtttcgatcggagatggcagcggcggcgaccgcacatagagccagcttcccgttgcgtctgcagtagatccttgctggaagctgcgccgtcgcacctgtggtcaaggtcgagtctgagccgattttgtggggtcctagatccagacgtcggtcgacaggtcgctggcgtcagtggaccacgtcgcctatcgcggttgtggagcggagctgtgagcagatcccaagtccaatgacgaagagggagtctcggtagggtgcgataaggcgcgatgaggtcagacacggagcacggacgtgtcctcagtcgctgttgtcatgtgtcagtggatgcagtcgtcgctatcgcccacaagaaacctcgcttcgtggaaagattagtatttaacatttggatgaggaagtcaaggacaccgacctcaagcgctctaccaggaagtccgaggaggccgtcctcgccgacctcgcttggctcggcctcgaatgggaggaaggtgctcataaaagaacacctgtgatgcctagaaggaaccctccaccacctccaagagagcaatctaatagtttttttaccgcatggaagctcaaaggcaggagatgcaccgttagaggtctctctgacacggagatacaaaattcttggaaaagtagagcagaacaacctcaacccgagccaaaatgtgagaaagacccatttaacagctttgttgcagattttgacactcacaatctcaacattgccgttggtaaggcatccgaacttgaacttgaagtctccaatctaaaggagcagttgaagaaaatcacattagaaaaggctgagatgacaaccaagcatgaaaagttatctgcaatctgccgatcacagcgtcaggagatccaagagctgaagctcactcttgttgagccaacgcctccctcaaacaaagtcagctcaaggacacaagattctggatctcagcgaaaggaaaagatccaaggcactgtgtgggagcttgaacaagggatgcttgctattgctagcaactcctcatcagccagttctgatgccaaaacatggcaggctttccctgacacaaagactcaggcccgaccaaaggtcgatcatgcaactaatgggagccaaaacataaccaagaacacaacgtcaggtgcttcccccgatgcgtggggttttggtactgataatttcagaacaccagcaacaacattaagagctaccacacagatcaacagggcagctgcccaacggagctcatcccaaagatttaacgctggtgtggccaaggtagagcagccatctggatgggctggtttttaacttcaatcgacatgcgttaaccatcattctgatcaacatttacaatctgcgctacacaactgctgttgccgatggagttgtgatctttgacatccacagggcatcaaaattggttatttttagtgtgttcatcaattttggttgagccaactttgatattgattcatgagatcacttgaaattatccgttgttaatctctactactccttatgtttgtatcgtaggcgtccacattcgaggatggtgcacagttctgccatcgcgctccctccgcgctccatccgtcctccgctctcgatcctcgaatcccgcggctccatcctcgaatccagcgctccctccgcactccatccgtctccctccatgctccatccgtcctctgcgctcaatcctcgaatccctccgtgctccatccatcttccgccgcctctgtgatgaacacgggaagcgtacaatgacctggtgctggcgatcttggcatcagtgatgggcagtcaatccatcataagcaggaccttttccatcatcaatcagagccagtctcggagctgcttccccagggtgaaagtcgtgcacacgtcgctgcagcgggacaacaggtactacgagcgcgaaaacttgctgatggtcatcaagaacaacctgttgtggcaccaccttagcatgggcctgggctatgatgactccaactccaacgatagcggcgtgtcacctagctcggaccgtgcgaacaacatagaggtcgccacagtgtcgccggtgccggcggtcgtcaagaagcaggcgaggttcctggtggcctcacctaggagccccgacgtgaatgagaccatgatggaggagctgcacgagctgtgcgaggcgcgggaggccggcaccgcgttcatcatggagcactcggcatgtggagaccaagcccgggtcgtcactgctcaagaggctgacatgtgaatttgatggacaacatgtatcctcaatgatcgctcgagtgctcagtgagccataatatcgtgaaaattctatgtgcttgtatgtttcgttttctttttataaatcatattgtaatgctatttctataggtggagggtgataaatgtatcaatttatctttatggttaatattgttgtaaagattttgaac

SEQ ID NO: 72669 - DNA, 4412 bp, Zea Mays
tgtggtgcacggttctgcctccgcgcctttccatcgccagcgcgttcttcgtgctctgtcaatctcgcagcagcgccactctcttccccacttccccaccgtggtccccccttccccacccaccggagaccgcgccattccccccttccccaccgcgaccaccagaccggcatggcgcatacctgagattgcgctctccccaccggatccggcttggcgcacaccggagaccacgcccttcacccttccccaccgtggccaccggatcccgcacacgcgcgctccggcatggcgcatccacagcacgaacgcccggaatggagcagcgtgcgtccatgtacccaccggagaccaggccattcaccaccgcagtgcccccaccctcatcatcctcgcgtccccccgtcgctacagccgccaagttggtctgcagggaggtccccccctcaccgcgccacgctcgccgcgcccgccgctcggtcctcgccgcgacatgcgcctaccctcacctacacgatgctcactcctccgcacatcgcaaagccgaaggtccacgccccctccgtgctgtgaccccctcccttgtgtgcccatgatgctggaagggaagtcctaccttgtgccgcgctccctgctaagctcctgcgagatagagacacagtgggcgtacttcgcccacgaggtccacggcggcaagcgcctggcgccggaagactgcgaggtcgaagacctggacaaagctgacgtcggcggcaagcgcagcaagccgccgtctccacagccgcacacgccggacatctccgagggtcgcggctccagccgccatgcctccggttgcggagagcagcagggcactgggagcaaccccatgaattcaatcgaccgtgacctgaccctcaatagcctcctccggactattgaatagggcaaggaagatgtgacgaaaaggtaaggggtttcgatcggagatggcagcggcggcgaccgcacatagagccagcttcccgttgcgtctgcagtagatccttgctggaagctgcgccgtcgcacctgtggtcaaggtcgagtctgagccgattttgtggggtcctagatccagacgtcggtcgacaggtcgctggcgtcagtggaccacgtcgcctatcgcggttgtggagcggagctgtgagcagatcccaagtccaatgacgaagagggagtctcggtagggtgcgataaggcgcgatgaggtcagacacggagcacggacgtgtcctcagtcgctgttgtcatgtgtcagtggatgcagtcgtcgctatcgcccacaagaaacctcgcttcgtggaaagattagtatttaacatttggatgaggaagtcaaggacaccgacctcaagcgctctaccaggaagtccgaggaggccgtcctcgccgacctcgcttggctcggcctcgaatgggaggaaggtgctctctccactctatattatgtctattgctctcatataggactcctgtttctccatgagttcttataggaagcaaaattagagtcagaatcatgttgtttctgcattgactttccagacctgttggtggaagggtgtttttcacaaatatgaagatagccttctcagcactgagcttgattatcttcctaacaacacacacgaattgtccaactgtaagatctgcagggacgaggtacctgcaaagtgatggccatcagaaaatcagaacagcttacggctgcaactcgcttttgatgtgtgcaataatgctttaatgcagtagcatttcttttcgtacagaacggtaacatggctccttcagtcctatatgaaactaaaatcaccttttgtaattgtagaccacaaaacatggaaaccataatagatatttaactcagcatggaacgatggaaattggtgcatctttgatagatgaatgcaacagggttcaatgctatgcattatgttcattttcatgggttagtgggttttgacaagaattctgtgtgtactttcgttagttgtttccttattatcctgtttaaatattttttgtttatttctcctggccttcaattttgataattactactaacatactctaacaccctactataaccagcggcagagctctcgcctcttggcaaggtgctcataaaagaacacctgtgatgcctagaaggaaccctccaccacctccaagagagcaatctaatagtttttttaccgcatggaagctcaaaggcaggagatgcaccgttaggtgcattttgggtgacataacatgcacgaggtgctcaagctgtagttaacaggaaccctttgtttgatggggagtcaattaaggcatcactgtcatcaaagcagaaccaaagctgggtggacaccagcatcagtattcctggcaataggcatgatcattccggtcagatgtcactgacaagtaaagcacaaaataactctttgtccaataatgtttttagaggtctctctgacacggagatacaaaattcttggaaaagtagagcagaacaacctcaacccgagccaaaatgtgagaaagacccatttaacagctttgttgcagattttgacactcacaatctcaacattgccgttggtaaggcatccgaacttgaacttgaagtctccaatctaaaggagcagttgaagaaaatcacattagaaaaggctgagatgacaaccaagcatgaaaagttatctgcaatctgccgatcacagcgtcaggagatccaagagctgaagctcactcttgttgagccaacgcctccctcaaacaaagtcagctcaaggacacaagattctggatctcaggtgatttatctacatatgtctaatacagcatattcactctcctgaagtttattagcatcttgcatagtatttatactccatgcagcgaaaggaaaagatccaaggcactgtgtgggagcttgaacaagggatgcttgctattgctagcaactcctcatcagccagttctgatgccaaaacatggcaggctttccctgacacaaagactcaggcccgaccaaaggtcgatcatgcaactaatgggagccaaaacataaccaagaacacaacgtcaggtgcttcccccgatgcgtggggttttggtactgataatttcagaacaccagcaacaacattaagagctaccacacagatcaacagggcagctgcccaacggagctcatcccaaagatttaacgctggtgtggccaaggtagagcagccatctggatgggctggtttttaacttcaatcgacatgcgttaaccatcattctgatcaacatttacaatctgcgctacacaactgctgttgccgatggagttgtgatctttgacatccacagggcatcaaaattggttatttttagtgtgttcatcaattttggttgagccaactttgatattgattcatgagatcacttgaaattatccgttgttaatctctactactccttatgtttgtatcgtaggcgtccacattcgaggatggtgcacagttctgccatcgcgctccctccgcgctccatccgtcctccgctctcgatcctcgaatcccgcggctccatcctcgaatccagcgctccctccgcactccatccgtctccctccatgctccatccgtcctctgcgctcaatcctcgaatccctccgtgctccatccatcttccgccgcctctgtgatgaacacgggaagcgtacaatgacctggtgctggcgatcttggcatcagtgatgggcagtcaatccatcataagcaggaccttttccatcatcaatcagagccagtctcggagctgcttccccagggtgaaagtcgtgcacacgtcgctgcagcgggacaacaggtactacgagcgcgaaaacttgctgatggtcatcaagaacaacctgttgtggcaccaccttagcatgggcctgggctatgatgactccaactccaacgatagcggcgtgtcacctagctcggaccgtgcgaacaacatagaggtcgccacagtgtcgccggtgccggcggtcgtcaagaagcaggcgaggttcctggtggcctcacctaggagccccgacgtgaatgagaccatgatggaggagctgcacgagctgtgcgaggcgcgggaggccggcaccgcgttcatcatggagcactcggcatgtggagaccaagcccgggtcgtcactgctcaagaggctgacatgtgaatttgatggacaacatgtatcctcaatgatcgctcgagtgctcagtgagccataatatcgtgaaaattctatgtgcttgtatgtttcgttttctttttataaatcatattgtaatgctatttctataggtggagggtgataaatgtatcaatttatctttatggttaatattgttgtaaagattttgaac

SEQ ID NO: 72670 - DNA, 4211 bp, Zea Mays
tgtggtgcacggttctgcctccgcgcctttccatcgccagcgcgttcttcgtgctctgtcaatctcgcagcagcgccactctcttccccacttccccaccgtggtccccccttccccacccaccggagaccgcgccattccccccttccccaccgcgaccaccagaccggcatggcgcatacctgagattgcgctctccccaccggatccggcttggcgcacaccggagaccacgcccttcacccttccccaccgtggccaccggatcccgcacacgcgcgctccggcatggcgcatccacagcacgaacgcccggaatggagcagcgtgcgtccatgtacccaccggagaccaggccattcaccaccgcagtgcccccaccctcatcatcctcgcgtccccccgtcgctacagccgccaagttggtctgcagggaggtccccccctcaccgcgccacgctcgccgcgcccgccgctcggtcctcgccgcgacatgcgcctaccctcacctacacgatgctcactcctccgcacatcgcaaagccgaaggtccacgccccctccgtgctgtgaccccctcccttgtgtgcccatgatgctggaagggaagtcctaccttgtgccgcgctccctgctaagctcctgcgagatagagacacagtgggcgtacttcgcccacgaggtccacggcggcaagcgcctggcgccggaagactgcgaggtcgaagacctggacaaagctgacgtcggcggcaagcgcagcaagccgccgtctccacagccgcacacgccggacatctccgagggtcgcggctccagccgccatgcctccggttgcggagagcagcagggcactgggagcaaccccatgaattcaatcgaccgtgacctgaccctcaatagcctcctccggactattgaatagggcaaggaagatgtgacgaaaaggtaaggggtttcgatcggagatggcagcggcggcgaccgcacatagagccagcttcccgttgcgtctgcagtagatccttgctggaagctgcgccgtcgcacctgtggtcaaggtcgagtctgagccgattttgtggggtcctagatccagacgtcggtcgacaggtcgctggcgtcagtggaccacgtcgcctatcgcggttgtggagcggagctgtgagcagatcccaagtccaatgacgaagagggagtctcggtagggtgcgataaggcgcgatgaggtcagacacggagcacggacgtgtcctcagtcgctgttgtcatgtgtcagtggatgcagtcgtcgctatcgcccacaagaaacctcgcttcgtggaaagattagtatttaacatttggatgaggaagtcaaggacaccgacctcaagcgctctaccaggaagtccgaggaggccgtcctcgccgacctcgcttggctcggcctcgaatgggaggaagacctgttggtggaagggtgtttttcacaaatatgaagatagccttctcagcactgagcttgattatcttcctaacaacacacacgaattgtccaactgtaagatctgcagggacgaggtacctgcaaagtgatggccatcagaaaatcagaacagcttacggctgcaactcgcttttgatgtgtgcaataatgctttaatgcagtagcatttcttttcgtacagaacggtaacatggctccttcagtcctatatgaaactaaaatcaccttttgtaattgtagaccacaaaacatggaaaccataatagatatttaactcagcatggaacgatggaaattggtgcatctttgatagatgaatgcaacagggttcaatgctatgcattatgttcattttcatgggttagtgggttttgacaagaattctgtgtgtactttcgttagttgtttccttattatcctgtttaaatattttttgtttatttctcctggccttcaattttgataattactactaacatactctaacaccctactataaccagcggcagagctctcgcctcttggcaaggtggggccattaccataccttgagtttcttccgtacctactgtaatatgctgtttcatttgctaactatgctataaatcatgctacattgttctgcttgactgtctacgccatacctcaattcccacctgtcctctgctaatgcatgaaatatcctttttagggttaatttgggaacccccatttttcgaagggattttcatttttccaagggaaaatgaactaatttcccttgggaaaatctgaaaatgtggttcccaaactagcccttaaggtctattttgaaaacgggatcccccctgttcctgtgttttttcatatgaaattgaactaattcctgtgaaatttctatgaagatcgccaccaacctatcattcttacctttttctgtcatgtctctaatctgcatgtagcgttctgtaaggagcatctaaatattttggccttgtttatgttccttatgttcttagcaagcaatgtgtaaacgatgaacgaggtcattttactgatgtatttttggacatcactgtccaaatgatgtttattggctgatcatcttttttacttgtgtaggtgctcataaaagaacacctgtgatgcctagaaggaaccctccaccacctccaagagagcaatctaatagtttttttaccgcatggaagctcaaaggcaggagatgcaccgttaggtgcattttgggtgacataacatgcacgaggtgctcaagctgtagttaacaggaaccctttgtttgatggggagtcaattaaggcatcactgtcatcaaagcagaaccaaagctgggtggacaccagcatcagtattcctggcaataggcatgatcattccggtcagatgtcactgacaagtaaagcacaaaataactctttgtccaataatgtttttagaggtctctctgacacggagatacaaaattcttggaaaagtagagcagaacaacctcaacccgagccaaaatgtgagaaagacccatttaacagctttgttgcagattttgacactcacaatctcaacattgccgttggtaaggcatccgaacttgaacttgaagtctccaatctaaaggagcagttgaagaaaatcacattagaaaaggctgagatgacaaccaagcatgaaaagttatctgcaatctgccgatcacagcgtcaggagatccaagagctgaagctcactcttgttgagccaacgcctccctcaaacaaagtcagctcaaggacacaagattctggatctcagcgaaaggaaaagatccaaggcactgtgtgggagcttgaacaagggatgcttgctattgctagcaactcctcatcagccagttctgatgccaaaacatggcaggctttccctgacacaaagactcaggcccgaccaaaggtcgatcatgcaactaatgggagccaaaacataaccaagaacacaacgtcaggtgcttcccccgatgcgtggggttttggtactgataatttcagaacaccagcaacaacattaagagctaccacacagatcaacagggcagctgcccaacggagctcatcccaaagatttaacgctggtgtggccaagagccagtctcggagctgcttccccagggtgaaagtcgtgcacacgtcgctgcagcgggacaacaggtactacgagcgcgaaaacttgctgatggtcatcaagaacaacctgttgtggcaccaccttagcatgggcctgggctatgatgactccaactccaacgatagcggcgtgtcacctagctcggaccgtgcgaacaacatagaggtcgccacagtgtcgccggtgccggcggtcgtcaagaagcaggcgaggttcctggtggcctcacctaggagccccgacgtgaatgagaccatgatggaggagctgcacgagctgtgcgaggcgcgggaggccggcaccgcgttcatcatggagcactcggcatgtggagaccaagcccgggtcgtcactgctcaagaggctgacatgtgaatttgatggacaacatgtatcctcaatgatcgctcgagtgctcagtgagccataatatcgtgaaaattctatgtgcttgtatgtttcgttttctttttataaatcatattgtaatgctatttctataggtggagggtgataaatgtatcaatttatctttatggttaatattgttgtaaagattttgaac

SEQ ID NO: 72671 - DNA, 2949 bp, Zea Mays
tgtggtgcacggttctgcctccgcgcctttccatcgccagcgcgttcttcgtgctctgtcaatctcgcagcagcgccactctcttccccacttccccaccgtggtccccccttccccacccaccggagaccgcgccattccccccttccccaccgcgaccaccagaccggcatggcgcatacctgagattgcgctctccccaccggatccggcttggcgcacaccggagaccacgcccttcacccttccccaccgtggccaccggatcccgcacacgcgcgctccggcatggcgcatccacagcacgaacgcccggaatggagcagcgtgcgtccatgtacccaccggagaccaggccattcaccaccgcagtgcccccaccctcatcatcctcgcgtccccccgtcgctacagccgccaagttggtctgcagggaggtccccccctcaccgcgccacgctcgccgcgcccgccgctcggtcctcgccgcgacatgcgcctaccctcacctacacgatgctcactcctccgcacatcgcaaagccgaaggtccacgccccctccgtgctgtgaccccctcccttgtgtgcccatgatgctggaagggaagtcctaccttgtgccgcgctccctgctaagctcctgcgagatagagacacagtgggcgtacttcgcccacgaggtccacggcggcaagcgcctggcgccggaagactgcgaggtcgaagacctggacaaagctgacgtcggcggcaagcgcagcaagccgccgtctccacagccgcacacgccggacatctccgagggtcgcggctccagccgccatgcctccggttgcggagagcagcagggcactgggagcaaccccatgaattcaatcgaccgtgacctgaccctcaatagcctcctccggactattgaatagggcaaggaagatgtgacgaaaaggtaaggggtttcgatcggagatggcagcggcggcgaccgcacatagagccagcttcccgttgcgtctgcagtagatccttgctggaagctgcgccgtcgcacctgtggtcaaggtcgagtctgagccgattttgtggggtcctagatccagacgtcggtcgacaggtcgctggcgtcagtggaccacgtcgcctatcgcggttgtggagcggagctgtgagcagatcccaagtccaatgacgaagagggagtctcggtagggtgcgataaggcgcgatgaggtcagacacggagcacggacgtgtcctcagtcgctgttgtcatgtgtcagtggatgcagtcgtcgctatcgcccacaagaaacctcgcttcgtggaaaggtgctcataaaagaacacctgtgatgcctagaaggaaccctccaccacctccaagagagcaatctaatagtttttttaccgcatggaagctcaaaggcaggagatgcaccgttaggtgcattttgggtgacataacatgcacgaggtgctcaagctgtagttaacaggaaccctttgtttgatggggagtcaattaaggcatcactgtcatcaaagcagaaccaaagctgggtggacaccagcatcagtattcctggcaataggcatgatcattccggtcagatgtcactgacaagtaaagcacaaaataactctttgtccaataatgtttttagaggtctctctgacacggagatacaaaattcttggaaaagtagagcagaacaacctcaacccgagccaaaatgtgagaaagacccatttaacagctttgttgcagattttgacactcacaatctcaacattgccgttggtaaggcatccgaacttgaacttgaagtctccaatctaaaggagcagttgaagaaaatcacattagaaaaggctgagatgacaaccaagcatgaaaagttatctgcaatctgccgatcacagcgtcaggagatccaagagctgaagctcactcttgttgagccaacgcctccctcaaacaaagtcagctcaaggacacaagattctggatctcagcgaaaggaaaagatccaaggcactgtgtgggagcttgaacaagggatgcttgctattgctagcaactcctcatcagccagttctgatgccaaaacatggcaggctttccctgacacaaagactcaggcccgaccaaaggtcgatcatgcaactaatgggagccaaaacataaccaagaacacaacgtcaggtgcttcccccgatgcgtggggttttggtactgataatttcagaacaccagcaacaacattaagagctaccacacagatcaacagggcagctgcccaacggagctcatcccaaagatttaacgctggtgtggccaagagccagtctcggagctgcttccccagggtgaaagtcgtgcacacgtcgctgcagcgggacaacaggtactacgagcgcgaaaacttgctgatggtcatcaagaacaacctgttgtggcaccaccttagcatgggcctgggctatgatgactccaactccaacgatagcggcgtgtcacctagctcggaccgtgcgaacaacatagaggtcgccacagtgtcgccggtgccggcggtcgtcaagaagcaggcgaggttcctggtggcctcacctaggagccccgacgtgaatgagaccatgatggaggagctgcacgagctgtgcgaggcgcgggaggccggcaccgcgttcatcatggagcactcggcatgtggagaccaagcccgggtcgtcactgctcaagaggctgacatgtgaatttgatggacaacatgtatcctcaatgatcgctcgagtgctcagtgagccataatatcgtgaaaattctatgtgcttgtatgtttcgttttctttttataaatcatattgtaatgctatttctataggtggagggtgataaatgtatcaatttatctttatggttaatattgttgtaaagattttgaac

SEQ ID NO: 72672 - DNA, 2847 bp, Zea Mays
tgtggtgcacggttctgcctccgcgcctttccatcgccagcgcgttcttcgtgctctgtcaatctcgcagcagcgccactctcttccccacttccccaccgtggtccccccttccccacccaccggagaccgcgccattccccccttccccaccgcgaccaccagaccggcatggcgcatacctgagattgcgctctccccaccggatccggcttggcgcacaccggagaccacgcccttcacccttccccaccgtggccaccggatcccgcacacgcgcgctccggcatggcgcatccacagcacgaacgcccggaatggagcagcgtgcgtccatgtacccaccggagaccaggccattcaccaccgcagtgcccccaccctcatcatcctcgcgtccccccgtcgctacagccgccaagttggtctgcagggaggtccccccctcaccgcgccacgctcgccgcgcccgccgctcggtcctcgccgcgacatgcgcctaccctcacctacacgatgctcactcctccgcacatcgcaaagccgaaggtccacgccccctccgtgctgtgaccccctcccttgtgtgcccatgatgctggaagggaagtcctaccttgtgccgcgctccctgctaagctcctgcgagatagagacacagtgggcgtacttcgcccacgaggtccacggcggcaagcgcctggcgccggaagactgcgaggtcgaagacctggacaaagctgacgtcggcggcaagcgcagcaagccgccgtctccacagccgcacacgccggacatctccgagggtcgcggctccagccgccatgcctccggttgcggagagcagcagggcactgggagcaaccccatgaattcaatcgaccgtgacctgaccctcaatagcctcctccggactattgaatagggcaaggaagatgtgacgaaaaggtaaggggtttcgatcggagatggcagcggcggcgaccgcacatagagccagcttcccgttgcgtctgcagtagatccttgctggaagctgcgccgtcgcacctgtggtcaaggtcgagtctgagccgattttgtggggtcctagatccagacgtcggtcgacaggtcgctggcgtcagtggaccacgtcgcctatcgcggttgtggagcggagctgtgagcagatcccaagtccaatgacgaagagggagtctcggtagggtgcgataaggcgcgatgaggtcagacacggagcacggacgtgtcctcagtcgctgttgtcatgtgtcagtggatgcagtcgtcgctatcgcccacaagaaacctcgcttcgtggaaagattagtatttaacatttggatgaggaagtcaaggacaccgacctcaagcgctctaccaggaagtccgaggaggccgtcctcgccgacctcgcttggctcggcctcgaatgggaggaaggtgctcataaaagaacacctgtgatgcctagaaggaaccctccaccacctccaagagagcaatctaatagtttttttaccgcatggaagctcaaaggcaggagatgcaccgttagaggtctctctgacacggagatacaaaattcttggaaaagtagagcagaacaacctcaacccgagccaaaatgtgagaaagacccatttaacagctttgttgcagattttgacactcacaatctcaacattgccgttggtaaggcatccgaacttgaacttgaagtctccaatctaaaggagcagttgaagaaaatcacattagaaaaggctgagatgacaaccaagcatgaaaagttatctgcaatctgccgatcacagcgtcaggagatccaagagctgaagctcactcttgttgagccaacgcctccctcaaacaaagtcagctcaaggacacaagattctggatctcagcgaaaggaaaagatccaaggcactgtgtgggagcttgaacaagggatgcttgctattgctagcaactcctcatcagccagttctgatgccaaaacatggcaggctttccctgacacaaagactcaggcccgaccaaaggtcgatcatgcaactaatgggagccaaaacataaccaagaacacaacgtcaggtgcttcccccgatgcgtggggttttggtactgataatttcagaacaccagcaacaacattaagagctaccacacagatcaacagggcagctgcccaacggagctcatcccaaagatttaacgctggtgtggccaagagccagtctcggagctgcttccccagggtgaaagtcgtgcacacgtcgctgcagcgggacaacaggtactacgagcgcgaaaacttgctgatggtcatcaagaacaacctgttgtggcaccaccttagcatgggcctgggctatgatgactccaactccaacgatagcggcgtgtcacctagctcggaccgtgcgaacaacatagaggtcgccacagtgtcgccggtgccggcggtcgtcaagaagcaggcgaggttcctggtggcctcacctaggagccccgacgtgaatgagaccatgatggaggagctgcacgagctgtgcgaggcgcgggaggccggcaccgcgttcatcatggagcactcggcatgtggagaccaagcccgggtcgtcactgctcaagaggctgacatgtgaatttgatggacaacatgtatcctcaatgatcgctcgagtgctcagtgagccataatatcgtgaaaattctatgtgcttgtatgtttcgttttctttttataaatcatattgtaatgctatttctataggtggagggtgataaatgtatcaatttatctttatggttaatattgttgtaaagattttgaac

SEQ ID NO: 72673 - DNA, 2965 bp, Zea Mays
tgtggtgcacggttctgcctccgcgcctttccatcgccagcgcgttcttcgtgctctgtcaatctcgcagcagcgccactctcttccccacttccccaccgtggtccccccttccccacccaccggagaccgcgccattccccccttccccaccgcgaccaccagaccggcatggcgcatacctgagattgcgctctccccaccggatccggcttggcgcacaccggagaccacgcccttcacccttccccaccgtggccaccggatcccgcacacgcgcgctccggcatggcgcatccacagcacgaacgcccggaatggagcagcgtgcgtccatgtacccaccggagaccaggccattcaccaccgcagtgcccccaccctcatcatcctcgcgtccccccgtcgctacagccgccaagttggtctgcagggaggtccccccctcaccgcgccacgctcgccgcgcccgccgctcggtcctcgccgcgacatgcgcctaccctcacctacacgatgctcactcctccgcacatcgcaaagccgaaggtccacgccccctccgtgctgtgaccccctcccttgtgtgcccatgatgctggaagggaagtcctaccttgtgccgcgctccctgctaagctcctgcgagatagagacacagtgggcgtacttcgcccacgaggtccacggcggcaagcgcctggcgccggaagactgcgaggtcgaagacctggacaaagctgacgtcggcggcaagcgcagcaagccgccgtctccacagccgcacacgccggacatctccgagggtcgcggctccagccgccatgcctccggttgcggagagcagcagggcactgggagcaaccccatgaattcaatcgaccgtgacctgaccctcaatagcctcctccggactattgaatagggcaaggaagatgtgacgaaaaggtaaggggtttcgatcggagatggcagcggcggcgaccgcacatagagccagcttcccgttgcgtctgcagtagatccttgctggaagctgcgccgtcgcacctgtggtcaaggtcgagtctgagccgattttgtggggtcctagatccagacgtcggtcgacaggtcgctggcgtcagtggaccacgtcgcctatcgcggttgtggagcggagctgtgagcagatcccaagtccaatgacgaagagggagtctcggtagggtgcgataaggcgcgatgaggtcagacacggagcacggacgtgtcctcagtcgctgttgtcatgtgtcagtggatgcagtcgtcgctatcgcccacaagaaacctcgcttcgtggaaagattagtatttaacatttggatgaggaagtcaaggacaccgacctcaagcgctctaccaggaagtccgaggaggccgtcctcgccgacctcgcttggctcggcctcgaatgggaggaaggtgctcataaaagaacacctgtgatgcctagaaggaaccctccaccacctccaagagagcaatctaatagtttttttaccgcatggaagctcaaaggcaggagatgcaccgttaggtgcattttgggtgacataacatgcacgaggtgctcaagctgtagttaacaggaaccctttgtttgatggggagtcaattaaggcatcactgtcatcaaagcagaaccaaagctgggtggacaccagcatcagtattcctggcaataggcatgatcattccggtcagatgtcactgacaagtaaagcacaaaataactctttgtccaataatgtttttagaggtctctctgacacggagatacaaaattcttggaaaagtagagcagaacaacctcaacccgagccaaaatgtgagaaagacccatttaacagctttgttgcagattttgacactcacaatctcaacattgccgttggtaaggcatccgaacttgaacttgaagtctccaatctaaaggagcagttgaagaaaatcacattagaaaaggctgagatgacaaccaagcatgaaaagttatctgcaatctgccgatcacagcgtcaggagatccaagagctgaagctcactcttgttgagccaacgcctccctcaaacaaagtcagctcaaggacacaagattctggatctcaggctttccctgacacaaagactcaggcccgaccaaaggtcgatcatgcaactaatgggagccaaaacataaccaagaacacaacgtcaggtgcttcccccgatgcgtggggttttggtactgataatttcagaacaccagcaacaacattaagagctaccacacagatcaacagggcagctgcccaacggagctcatcccaaagatttaacgctggtgtggccaagagccagtctcggagctgcttccccagggtgaaagtcgtgcacacgtcgctgcagcgggacaacaggtactacgagcgcgaaaacttgctgatggtcatcaagaacaacctgttgtggcaccaccttagcatgggcctgggctatgatgactccaactccaacgatagcggcgtgtcacctagctcggaccgtgcgaacaacatagaggtcgccacagtgtcgccggtgccggcggtcgtcaagaagcaggcgaggttcctggtggcctcacctaggagccccgacgtgaatgagaccatgatggaggagctgcacgagctgtgcgaggcgcgggaggccggcaccgcgttcatcatggagcactcggcatgtggagaccaagcccgggtcgtcactgctcaagaggctgacatgtgaatttgatggacaacatgtatcctcaatgatcgctcgagtgctcagtgagccataatatcgtgaaaattctatgtgcttgtatgtttcgttttctttttataaatcatattgtaatgctatttctataggtggagggtgataaatgtatcaatttatctttatggttaatattgttgtaaagattttgaac

SEQ ID NO: 72674 - DNA, 3635 bp, Zea Mays
tgtggtgcacggttctgcctccgcgcctttccatcgccagcgcgttcttcgtgctctgtcaatctcgcagcagcgccactctcttccccacttccccaccgtggtccccccttccccacccaccggagaccgcgccattccccccttccccaccgcgaccaccagaccggcatggcgcatacctgagattgcgctctccccaccggatccggcttggcgcacaccggagaccacgcccttcacccttccccaccgtggccaccggatcccgcacacgcgcgctccggcatggcgcatccacagcacgaacgcccggaatggagcagcgtgcgtccatgtacccaccggagaccaggccattcaccaccgcagtgcccccaccctcatcatcctcgcgtccccccgtcgctacagccgccaagttggtctgcagggaggtccccccctcaccgcgccacgctcgccgcgcccgccgctcggtcctcgccgcgacatgcgcctaccctcacctacacgatgctcactcctccgcacatcgcaaagccgaaggtccacgccccctccgtgctgtgaccccctcccttgtgtgcccatgatgctggaagggaagtcctaccttgtgccgcgctccctgctaagctcctgcgagatagagacacagtgggcgtacttcgcccacgaggtccacggcggcaagcgcctggcgccggaagactgcgaggtcgaagacctggacaaagctgacgtcggcggcaagcgcagcaagccgccgtctccacagccgcacacgccggacatctccgagggtcgcggctccagccgccatgcctccggttgcggagagcagcagggcactgggagcaaccccatgaattcaatcgaccgtgacctgaccctcaatagcctcctccggactattgaatagggcaaggaagatgtgacgaaaaggtaaggggtttcgatcggagatggcagcggcggcgaccgcacatagagccagcttcccgttgcgtctgcagtagatccttgctggaagctgcgccgtcgcacctgtggtcaaggtcgagtctgagccgattttgtggggtcctagatccagacgtcggtcgacaggtcgctggcgtcagtggaccacgtcgcctatcgcggttgtggagcggagctgtgagcagatcccaagtccaatgacgaagagggagtctcggtagggtgcgataaggcgcgatgaggtcagacacggagcacggacgtgtcctcagtcgctgttgtcatgtgtcagtggatgcagtcgtcgctatcgcccacaagaaacctcgcttcgtggaaagattagtatttaacatttggatgaggaagtcaaggacaccgacctcaagcgctctaccaggaagtccgaggaggccgtcctcgccgacctcgcttggctcggcctcgaatgggaggaaggtgctcataaaagaacacctgtgatgcctagaaggaaccctccaccacctccaagagagcaatctaatagtttttttaccgcatggaagctcaaaggcaggagatgcaccgttaggtgcattttgggtgacataacatgcacgaggtgctcaagctgtagttaacaggaaccctttgtttgatggggagtcaattaaggcatcactgtcatcaaagcagaaccaaagctgggtggacaccagcatcagtattcctggcaataggcatgatcattccggtcagatgtcactgacaagtaaagcacaaaataactctttgtccaataatgtttttagaggtctctctgacacggagatacaaaattcttggaaaagtagagcagaacaacctcaacccgagccaaaatgtgagaaagacccatttaacagctttgttgcagattttgacactcacaatctcaacattgccgttggtaaggcatccgaacttgaacttgaagtctccaatctaaaggagcagttgaagaaaatcacattagaaaaggctgagatgacaaccaagcatgaaaagttatctgcaatctgccgatcacagcgtcaggagatccaagagctgaagctcactcttgttgagccaacgcctccctcaaacaaagtcagctcaaggacacaagattctggatctcagcgaaaggaaaagatccaaggcactgtgtgggagcttgaacaagggatgcttgctattgctagcaactcctcatcagccagttctgatgccaaaacatggcaggctttccctgacacaaagactcaggcccgaccaaaggtcgatcatgcaactaatgggagccaaaacataaccaagaacacaacgtcaggtgcttcccccgatgcgtggggttttggtactgataatttcagaacaccagcaacaacattaagagctaccacacagatcaacagggcagctgcccaacggagctcatcccaaagatttaacgctggtgtggccaaggtagagcagccatctggatgggctggtttttaacttcaatcgacatgcgttaaccatcattctgatcaacatttacaatctgcgctacacaactgctgttgccgatggagttgtgatctttgacatccacagggcatcaaaattggttatttttagtgtgttcatcaattttggttgagccaactttgatattgattcatgagatcacttgaaattatccgttgttaatctctactactccttatgtttgtatcgtaggcgtccacattcgaggatggtgcacagttctgccatcgcgctccctccgcgctccatccgtcctccgctctcgatcctcgaatcccgcggctccatcctcgaatccagcgctccctccgcactccatccgtctccctccatgctccatccgtcctctgcgctcaatcctcgaatccctccgtgctccatccatcttccgccgcctctgtgatgaacacgggaagcgtacaatgacctggtgctggcgatcttggcatcagtgatgggcagtcaatccatcataagcaggaccttttccatcatcaatcagagccagtctcggagctgcttccccagggtgaaagtcgtgcacacgtcgctgcagcgggacaacaggtactacgagcgcgaaaacttgctgatggtcatcaagaacaacctgttgtggcaccaccttagcatgggcctgggctatgatgactccaactccaacgatagcggcgtgtcacctagctcggaccgtgcgaacaacatagaggtcgccacagtgtcgccggtgccggcggtcgtcaagaagcaggcgaggttcctggtggcctcacctaggagccccgacgtgaatgagaccatgatggaggagctgcacgagctgtgcgaggcgcgggaggccggcaccgcgttcatcatggagcactcggcatgtggagaccaagcccgggtcgtcactgctcaagaggctgacatgtgaatttgatggacaacatgtatcctcaatgatcgctcgagtgctcagtgagccataatatcgtgaaaattctatgtgcttgtatgtttcgttttctttttataaatcatattgtaatgctatttctataggtggagggtgataaatgtatcaatttatctttatggttaatattgttgtaaagattttgaac

SEQ ID NO: 72675 - DNA, 3597 bp, Zea Mays
tgtggtgcacggttctgcctccgcgcctttccatcgccagcgcgttcttcgtgctctgtcaatctcgcagcagcgccactctcttccccacttccccaccgtggtccccccttccccacccaccggagaccgcgccattccccccttccccaccgcgaccaccagaccggcatggcgcatacctgagattgcgctctccccaccggatccggcttggcgcacaccggagaccacgcccttcacccttccccaccgtggccaccggatcccgcacacgcgcgctccggcatggcgcatccacagcacgaacgcccggaatggagcagcgtgcgtccatgtacccaccggagaccaggccattcaccaccgcagtgcccccaccctcatcatcctcgcgtccccccgtcgctacagccgccaagttggtctgcagggaggtccccccctcaccgcgccacgctcgccgcgcccgccgctcggtcctcgccgcgacatgcgcctaccctcacctacacgatgctcactcctccgcacatcgcaaagccgaaggtccacgccccctccgtgctgtgaccccctcccttgtgtgcccatgatgctggaagggaagtcctaccttgtgccgcgctccctgctaagctcctgcgagatagagacacagtgggcgtacttcgcccacgaggtccacggcggcaagcgcctggcgccggaagactgcgaggtcgaagacctggacaaagctgacgtcggcggcaagcgcagcaagccgccgtctccacagccgcacacgccggacatctccgagggtcgcggctccagccgccatgcctccggttgcggagagcagcagggcactgggagcaaccccatgaattcaatcgaccgtgacctgaccctcaatagcctcctccggactattgaatagggcaaggaagatgtgacgaaaaggtaaggggtttcgatcggagatggcagcggcggcgaccgcacatagagccagcttcccgttgcgtctgcagtagatccttgctggaagctgcgccgtcgcacctgtggtcaaggtcgagtctgagccgattttgtggggtcctagatccagacgtcggtcgacaggtcgctggcgtcagtggaccacgtcgcctatcgcggttgtggagcggagctgtgagcagatcccaagtccaatgacgaagagggagtctcggtagggtgcgataaggcgcgatgaggtcagacacggagcacggacgtgtcctcagtcgctgttgtcatgtgtcagtggatgcagtcgtcgctatcgcccacaagaaacctcgcttcgtggaaagattagtatttaacatttggatgaggaagtcaaggacaccgacctcaagcgctctaccaggaagtccgaggaggccgtcctcgccgacctcgcttggctcggcctcgaatgggaggaagacctgttggtggaagggtgtttttcacaaatatgaagatagccttctcagcactgagcttgattatcttcctaacaacacacacgaattgtccaactgtgctcataaaagaacacctgtgatgcctagaaggaaccctccaccacctccaagagagcaatctaatagtttttttaccgcatggaagctcaaaggcaggagatgcaccgttagaggtctctctgacacggagatacaaaattcttggaaaagtagagcagaacaacctcaacccgagccaaaatgtgagaaagacccatttaacagctttgttgcagattttgacactcacaatctcaacattgccgttggtaaggcatccgaacttgaacttgaagtctccaatctaaaggagcagttgaagaaaatcacattagaaaaggctgagatgacaaccaagcatgaaaagttatctgcaatctgccgatcacagcgtcaggagatccaagagctgaagctcactcttgttgagccaacgcctccctcaaacaaagtcagctcaaggacacaagattctggatctcaggtgatttatctacatatgtctaatacagcatattcactctcctgaagtttattagcatcttgcatagtatttatactccatgcagcgaaaggaaaagatccaaggcactgtgtgggagcttgaacaagggatgcttgctattgctagcaactcctcatcagccagttctgatgccaaaacatggcaggctttccctgacacaaagactcaggcccgaccaaaggtcgatcatgcaactaatgggagccaaaacataaccaagaacacaacgtcaggtgcttcccccgatgcgtggggttttggtactgataatttcagaacaccagcaacaacattaagagctaccacacagatcaacagggcagctgcccaacggagctcatcccaaagatttaacgctggtgtggccaaggtagagcagccatctggatgggctggtttttaacttcaatcgacatgcgttaaccatcattctgatcaacatttacaatctgcgctacacaactgctgttgccgatggagttgtgatctttgacatccacagggcatcaaaattggttatttttagtgtgttcatcaattttggttgagccaactttgatattgattcatgagatcacttgaaattatccgttgttaatctctactactccttatgtttgtatcgtaggcgtccacattcgaggatggtgcacagttctgccatcgcgctccctccgcgctccatccgtcctccgctctcgatcctcgaatcccgcggctccatcctcgaatccagcgctccctccgcactccatccgtctccctccatgctccatccgtcctctgcgctcaatcctcgaatccctccgtgctccatccatcttccgccgcctctgtgatgaacacgggaagcgtacaatgacctggtgctggcgatcttggcatcagtgatgggcagtcaatccatcataagcaggaccttttccatcatcaatcagagccagtctcggagctgcttccccagggtgaaagtcgtgcacacgtcgctgcagcgggacaacaggtactacgagcgcgaaaacttgctgatggtcatcaagaacaacctgttgtggcaccaccttagcatgggcctgggctatgatgactccaactccaacgatagcggcgtgtcacctagctcggaccgtgcgaacaacatagaggtcgccacagtgtcgccggtgccggcggtcgtcaagaagcaggcgaggttcctggtggcctcacctaggagccccgacgtgaatgagaccatgatggaggagctgcacgagctgtgcgaggcgcgggaggccggcaccgcgttcatcatggagcactcggcatgtggagaccaagcccgggtcgtcactgctcaagaggctgacatgtgaatttgatggacaacatgtatcctcaatgatcgctcgagtgctcagtgagccataatatcgtgaaaattctatgtgcttgtatgtttcgttttctttttataaatcatattgtaatgctatttctataggtggagggtgataaatgtatcaatttatctttatggttaatattgttgtaaagattttgaac

SEQ ID NO: 72676 - DNA, 1894 bp, Zea Mays
ccatcttgtacaaattacttccaagctattttgcctgttcctgatgtcaatttgaggcactactaaacagattagtatttaacatttggatgaggaagtcaaggacaccgacctcaagcgctctaccaggaagtccgaggaggccgtcctcgccgacctcgcttggctcggcctcgaatgggaggaaggtgctcataaaagaacacctgtgatgcctagaaggaaccctccaccacctccaagagagcaatctaatagtttttttaccgcatggaagctcaaaggcaggagatgcaccgttaggtgcattttgggtgacataacatgcacgaggtgctcaagctgtagttaacaggaaccctttgtttgatggggagtcaattaaggcatcactgtcatcaaagcagaaccaaagctgggtggacaccagcatcagtattcctggcaataggcatgatcattccggtcagatgtcactgacaagtaaagcacaaaataactctttgtccaataatgtttttagaggtctctctgacacggagatacaaaattcttggaaaagtagagcagaacaacctcaacccgagccaaaatgtgagaaagacccatttaacagctttgttgcagattttgacactcacaatctcaacattgccgttggtaaggcatccgaacttgaacttgaagtctccaatctaaaggagcagttgaagaaaatcacattagaaaaggctgagatgacaaccaagcatgaaaagttatctgcaatctgccgatcacagcgtcaggagatccaagagctgaagctcactcttgttgagccaacgcctccctcaaacaaagtcagctcaaggacacaagattctggatctcaggtgatttatctacatatgtctaatacagcatattcactctcctgaagtttattagcatcttgcatagtatttatactccatgcagcgaaaggaaaagatccaaggcactgtgtgggagcttgaacaagggatgcttgctattgctagcaactcctcatcagccagttctgatgccaaaacatggcaggctttccctgacacaaagactcaggcccgaccaaaggtcgatcatgcaactaatgggagccaaaacataaccaagaacacaacgtcaggtgcttcccccgatgcgtggggttttggtactgataatttcagaacaccagcaacaacattaagagctaccacacagatcaacagggcagctgcccaacggagctcatcccaaagatttaacgctggtgtggccaagagccagtctcggagctgcttccccagggtgaaagtcgtgcacacgtcgctgcagcgggacaacaggtactacgagcgcgaaaacttgctgatggtcatcaagaacaacctgttgtggcaccaccttagcatgggcctgggctatgatgactccaactccaacgatagcggcgtgtcacctagctcggaccgtgcgaacaacatagaggtcgccacagtgtcgccggtgccggcggtcgtcaagaagcaggcgaggttcctggtggcctcacctaggagccccgacgtgaatgagaccatgatggaggagctgcacgagctgtgcgaggcgcgggaggccggcaccgcgttcatcatggagcactcggcatgtggagaccaagcccgggtcgtcactgctcaagaggctgacatgtgaatttgatggacaacatgtatcctcaatgatcgctcgagtgctcagtgagccataatatcgtgaaaattctatgtgcttgtatgtttcgttttctttttataaatcatattgtaatgctatttctataggtggagggtgataaatgtatcaatttatctttatggttaatattgttgtaaagattttgaac

SEQ ID NO: 72677 - DNA, 3803 bp, Zea Mays
tttttcggtaccgttttcatccctagctcgagccaaggagtccggcggaaggccgccggtgtgcgaaacagcgtcagcgtcgagaggagaaaaagtcaccgcgagtccaggatccatgctgaggcacttggtccggacgggccagctcgccgacgcgaggagcctattcgacgcgatgccgcgccgcgacgaggtcgcctacgcgactcttctctcgggctatgccgcggcagctgacttcccgggcgctatggcgctcttctcccgcttccgcgcctcctcctcccagccacacgacgccgcggatccgttcatcctcagccccgtcctcaaggcgtgcgcttccgctgccgccagcgcagggctcctccccctccctcacgccgccgcggcggccgctctgcacgcgttcgccgtccgctcctcctccctgccgtccgtgttcgtctccacggcgctcgcggacgcctacgccaaggccggccgcctcgacctggcgctgcaggtgctcgacgaaatgcccagcaggaacgtggtctcgtggaccacgctcgtcgcctcgctggcgcgtgctggccggcggcacgacgcgctccgccgcttcgccgagatgcgggcctccggcgtggcctgcgactcccacgcctgctcggcggctctcacggcgtgcgccgacgcggggctgctgccacgcggccgcgaggtgcacgcgctctgcgccaagctcggcctcgacgccgtgcccttcgtcgccaacgcgctcgcggcgctgtacgcgcggtgcggcgatgtcgaccgcgcgctggccgcggtcggccgcatgggctcgcacgacgttgccgtgtgcacaacgctgatcgcatcctacgtccagaccggccgcacggaggaagccatcgaggcgtttgtgagaatgcttcgcgatgagtcgtcaaattctgcttcaccaaatgagtatacgttctctgccgtaattgccgcgtgtccaaatatggatcgtgcatatcttggagagcagttacatgcacaagctgcacggagagggctatctcatgcccgctctgtggccaattcccttgtcaaactctattcccgccgtggccatctttcagctgctgatgctatcttccgggagagtgtcgtcaaggatgttgtctcctggagcacaattatatcaggatacacacaagaaggcctcgccgaggagtcttttgccttgttctcagaaatgcggcatcacagtagctgccctcggccgaatgagtttactcttgccagtctcttcagtgtgtgtgcaagtgctgcgtcgctggatactggacgccagctgcatgcactcgctgttgctgctgggcttgaacaccatgcaatggtcaggagtgcgcttgttaacatgtatggaaagggtggtagcatgtcagatgctaatgtcgtattttccaatcgcactaaagatgatgtgatttcatggactgcgatgatcgttgggcatgctgagcatggtcacagcaaagaggcttttgaactgtttgaggaaatgtgccgtatcgggctaaagccagaccatgttacgttcattggtgtactcactgcttgctctcacgcgggggaacttgagctcggattgagatacctcaatgcaatgaacaaaagctatgggctggagcctgaaaaggagcactacggttgtgttgttgatttgttagccagagctggtagaatacatgaggctgaggagttgattggaagaattgctgctgaggaaagagatggtgtggtttggacatccttgcttagggcatgtgctgctcgaggggcagaggaaactggaaagatagctgcagagaggatgatggaggcagagccatggggttcaggagcacatgtggtgatggccaacctctatgcaagcaaggggctgtggtgtgaggcagcacaggaacgccatttgatgaagcagaaaggtgttctaaaaggtgcagggtggtcatcagtcgaagttggaggggacgacaggggggttggagtgtttgtttcaggagatcggacaaatccccaagacagtgccatctacatgatgcttgagctgatgtactatggagccggaatgatacttcatgaagtgagaataaagcgggatagcaaaagggagggcaggcttcgtgcttggtgcgagttgtctcactgggtcaccaggtcgcatgttcgaagcagtctcttcgcatttgtggggggaaggcttgcctcggtttacccccttccccagaccccactcatgtgggagactccggccctgggtctgccccttttcgctgcgatctgtattgtgccattcttgccagccatgggcgattcagtcatttccagtacaccaaatcttatagtcaaggaatgcaacaaaactgttttcatatcagaaatggtgttgaaaaagacgcaaaatttggaagagggcaatgcagaaagtttggcaatttttgaacatttttctgattctggtaatgatatgcaatctgaatatactgaagttgtcgctcattaggatgatgcctcgttagaaaaaaacagatgactttcatcataaggccttattctgagcatagccaacataaatcaaaatgggcataatttttcttacatgtatttctgcatgtggttgttcaacttatatggttcttaagaccctaacactgagtaaataagtcggaagtgcttatttgttcaacttatgtaagtgtttgttcagtttgaggatacgggcagtgtctggctattggctaaagccagaccatgttacattcattagtgtactcaccgcgtactcacacacgcaggggaagttgagatcaaactaagatacctcaatgcaacgaacaaaagctgcaggttggagcctaaaaatgagtactacagttgtgttgttgatttgttgggcagaaatgttaagttttccggtgcttctaggcccatcagtcactaaaccaatagaatctaagcagaccttccttcttgcaactggtatttgctgagctgaaatggtccgccatatccatgatcagttggatttagaatctgaagtggagctaaacagctaactgagtaatctcggaaggagcacttactgcaagggagaaatttacatgaggccttgccatcggaggacaatataaggtcttcataagatatctgcaaatcattcagaaatctagggtgcgctgatgacttccagtccaatcaagtattctaaaaaagaattatgtcccaaacaaactacaatacctgtggccagtacaggctaaatcgtgctcaagttagtatctgcatcagatttgtattttagtctaccaaactgatataaccttggtagttggtacattgctcaagtgacttggagcagagcagaatgtgaatatctgcctgatgatcccttttacagcaaaagcatgccagagtgtgtgtgtcgtattcattcgttttccagaagggagcccggccaccatatggaaggaaattcactcttcatagtcacaacagcatcagtgtattccgtgttgcacgtactgctctttaaatctgtacactgctagtaaaatatttcttgactgacttgctggatattcttgtgcagcctggtgatgttttctaatgttacagtaatagagttaattttcatcccttatgccaactgatcacatgttactttacagcattgacgatagagtgatgtaaaggttaatggtgtcgattctttgtacagccttttttttacttttttttgtctctgttgagatgccaagttttgg

SEQ ID NO: 72678 - DNA, 3974 bp, Zea Mays
cgttttcatccctagctcgagccaaggagtccggcggaaggccgccggtgtgcgaaacagcgtcagcgtcgagaggagaaaaagtcaccgcgagtccaggatccatgctgaggcacttggtccggacgggccagctcgccgacgcgaggagcctattcgacgcgatgccgcgccgcgacgaggtcgcctacgcgactcttctctcgggctatgccgcggcagctgacttcccgggcgctatggcgctcttctcccgcttccgcgcctcctcctcccagccacacgacgccgcggatccgttcatcctcagccccgtcctcaaggcgtgcgcttccgctgccgccagcgcagggctcctccccctccctcacgccgccgcggcggccgctctgcacgcgttcgccgtccgctcctcctccctgccgtccgtgttcgtctccacggcgctcgcggacgcctacgccaaggccggccgcctcgacctggcgctgcaggtgctcgacgaaatgcccagcaggaacgtggtctcgtggaccacgctcgtcgcctcgctggcgcgtgctggccggcggcacgacgcgctccgccgcttcgccgagatgcgggcctccggcgtggcctgcgactcccacgcctgctcggcggctctcacggcgtgcgccgacgcggggctgctgccacgcggccgcgaggtgcacgcgctctgcgccaagctcggcctcgacgccgtgcccttcgtcgccaacgcgctcgcggcgctgtacgcgcggtgcggcgatgtcgaccgcgcgctggccgcggtcggccgcatgggctcgcacgacgttgccgtgtgcacaacgctgatcgcatcctacgtccagaccggccgcacggaggaagccatcgaggcgtttgtgagaatgcttcgcgatgagtcgtcaaattctgcttcaccaaatgagtatacgttctctgccgtaattgccgcgtgtccaaatatggatcgtgcatatcttggagagcagttacatgcacaagctgcacggagagggctatctcatgcccgctctgtggccaattcccttgtcaaactctattcccgccgtggccatctttcagctgctgatgctatcttccgggagagtgtcgtcaaggatgttgtctcctggagcacaattatatcaggatacacacaagaaggcctcgccgaggagtcttttgccttgttctcagaaatgcggcatcacagtagctgccctcggccgaatgagtttactcttgccagtctcttcagtgtgtgtgcaagtgctgcgtcgctggatactggacgccagctgcatgcactcgctgttgctgctgggcttgaacaccatgcaatggtcaggagtgcgcttgttaacatgtatggaaagggtggtagcatgtcagatgctaatgtcgtattttccaatcgcactaaagatgatgtgatttcatggactgcgatgatcgttgggcatgctgagcatggtcacagcaaagaggcttttgaactgtttgaggaaatgtgccgtatcgggctaaagccagaccatgttacgttcattggtgtactcactgcttgctctcacgcgggggaacttgagctcggattgagatacctcaatgcaatgaacaaaagctatgggctggagcctgaaaaggagcactacggttgtgttgttgatttgttagccagagctggtagaatacatgaggctgaggagttgattggaagaattgctgctgaggaaagagatggtgtggtttggacatccttgcttagggcatgtgctgctcgaggggcagaggaaactggaaagatagctgcagagaggatgatggaggcagagccatggggttcaggagcacatgtggtgatggccaacctctatgcaagcaaggggctgtggtgtgaggcagcacaggaacgccatttgatgaagcagaaaggtgttctaaaaggtgcagggtggtcatcagtcgaagttggaggggacgacaggggggttggagtgtttgtttcaggagatcggacaaatccccaagacagtgccatctacatgatgcttgagctgatgtactatggagccggaatgatacttcatgaagtgagaataaagcgggatagcaaaagggagggcaggcttcgtgcttggtgcgagttgtctcactgggtcaccaggtcgcatgttcgaagcagtctcttcgcatttgtggggggaaggcttgcctcggtttacccccttccccagaccccactcatgtgggagactccggccctgggtctgccccttttcgctgcgatctgtattgtgccattcttgccagccatgggcgattcagtcatttccagtacaccaaatcttatagtcaaggaatgcaacaaaactgttttcatatcagaagtaagtcatggcgcagccacagcagataaatgactaaatggtgcttgaggcatactctgtacataaaggtccttcctcacttgatatggcctctccagcaaaaggaatagatgttgaagctccttccttgagtgataatgcacaaggttcattgatgtggattgtggaatgtcaatgaagatggtgttgaaaaagacgcaaaatttggaagagggcaatgcagaaagtttggcaatttttgaacatttttctgattctggtaatgatatgcaatctgaatatactgaagttgtcgctcattaggatgatgcctcgttagaaaaaaacagatgactttcatcataaggccttattctgagcatagccaacataaatcaaaatgggcataatttttcttacatgtatttctgcatgtggttgttcaacttatatggttcttaagaccctaacactgagtaaataagtcggaagtgcttatttgttcaacttatgtaagtgtttgttcagtttgaggatacgggcagtgtctggctattggctaaagccagaccatgttacattcattagtgtactcaccgcgtactcacacacgcaggggaagttgagatcaaactaagatacctcaatgcaacgaacaaaagctgcaggttggagcctaaaaatgagtactacagttgtgttgttgatttgttgggcagaaatgttaagttttccggtgcttctaggcccatcagtcactaaaccaatagaatctaagcagaccttccttcttgcaactggtatttgctgagctgaaatggtccgccatatccatgatcagttggatttagaatctgaagtggagctaaacagctaactgagtaatctcggaaggagcacttactgcaagggagaaatttacatgaggccttgccatcggaggacaatataaggtgtcttcataagatatctgcaaatcattcagaaatctagggtgcgctgatgacttccagtccaatcaagtattctaaaaaagaattatgtcccaaacaaactacaatacctgtggccagtacaggctaaatcgtgctcaagttagtatctgcatcagatttgtattttagtctaccaaactgatataaccttggtagttggtacattgctcaagtgacttggagcagagcagaatgtgaatatctgcctgatgatcccttttacagcaaaagcatgccagagtgtgtgtgtcgtattcattcgttttccagaagggagcccggccaccatatggaaggaaattcactcttcatagtcacaacagcatcagtgtattccgtgttgcacgtactgctctttaaatctgtacactgctagtaaaatatttcttgactgacttgctggatattcttgtgcagcctggtgatgttttctaatgttacagtaatagagttaattttcatcccttatgccaactgatcacatgttactttacagcattgacgatagagtgatgtaaaggttaatggtgtcgattctttgtacagccttttttttacttttttttgtctctgttgagatgccaagttttgg

SEQ ID NO: 72679 - DNA, 4176 bp, Zea Mays
ccggtgtgcgaaacagcgtcagcgtcgagaggagaaaaagtcaccgcgagtccaggatccatgctgaggcacttggtccggacgggccagctcgccgacgcgaggagcctattcgacgcgatgccgcgccgcgacgaggtcgcctacgcgactcttctctcgggctatgccgcggcagctgacttcccgggcgctatggcgctcttctcccgcttccgcgcctcctcctcccagccacacgacgccgcggatccgttcatcctcagccccgtcctcaaggcgtgcgcttccgctgccgccagcgcagggctcctccccctccctcacgccgccgcggcggccgctctgcacgcgttcgccgtccgctcctcctccctgccgtccgtgttcgtctccacggcgctcgcggacgcctacgccaaggccggccgcctcgacctggcgctgcaggtgctcgacgaaatgcccagcaggaacgtggtctcgtggaccacgctcgtcgcctcgctggcgcgtgctggccggcggcacgacgcgctccgccgcttcgccgagatgcgggcctccggcgtggcctgcgactcccacgcctgctcggcggctctcacggcgtgcgccgacgcggggctgctgccacgcggccgcgaggtgcacgcgctctgcgccaagctcggcctcgacgccgtgcccttcgtcgccaacgcgctcgcggcgctgtacgcgcggtgcggcgatgtcgaccgcgcgctggccgcggtcggccgcatgggctcgcacgacgttgccgtgtgcacaacgctgatcgcatcctacgtccagaccggccgcacggaggaagccatcgaggcgtttgtgagaatgcttcgcgatgagtcgtcaaattctgcttcaccaaatgagtatacgttctctgccgtaattgccgcgtgtccaaatatggatcgtgcatatcttggagagcagttacatgcacaagctgcacggagagggctatctcatgcccgctctgtggccaattcccttgtcaaactctattcccgccgtggccatctttcagctgctgatgctatcttccgggagagtgtcgtcaaggatgttgtctcctggagcacaattatatcaggatacacacaagaaggcctcgccgaggagtcttttgccttgttctcagaaatgcggcatcacagtagctgccctcggccgaatgagtttactcttgccagtctcttcagtgtgtgtgcaagtgctgcgtcgctggatactggacgccagctgcatgcactcgctgttgctgctgggcttgaacaccatgcaatggtcaggagtgcgcttgttaacatgtatggaaagggtggtagcatgtcagatgctaatgtcgtattttccaatcgcactaaagatgatgtgatttcatggactgcgatgatcgttgggcatgctgagcatggtcacagcaaagaggcttttgaactgtttgaggaaatgtgccgtatcgggctaaagccagaccatgttacgttcattggtgtactcactgcttgctctcacgcgggggaacttgagctcggattgagatacctcaatgcaatgaacaaaagctatgggctggagcctgaaaaggagcactacggttgtgttgttgatttgttagccagagctggtagaatacatgaggctgaggagttgattggaagaattgctgctgaggaaagagatggtgtggtttggacatccttgcttagggcatgtgctgctcgaggggcagaggaaactggaaagatagctgcagagaggatgatggaggcagagccatggggttcaggagcacatgtggtgatggccaacctctatgcaagcaaggggctgtggtgtgaggcagcacaggaacgccatttgatgaagcagaaaggtgttctaaaaggtgcagggtggtcatcagtcgaagttggaggggacgacaggggggttggagtgtttgtttcaggagatcggacaaatccccaagacagtgccatctacatgatgcttgagctgatgtactatggagccggaatggttcgacaaatccctgatcagttggatttaggatctgaaggggagctaacagtttactaagtcatcctgaaagaagcactgactaaatagagaaatttacatggtaccttgtcaatgatggaacatccatcggaggacaacataaggatacacattgtatcctgctcttcagttgcttcaacttcaagctataatacctgtccatttattgtatctattgttttttgtgggtggctttgccctattctaaatgcaccaactgttttttatttagctatttgatattttccctgctggacataaatcactacatttatggctgatgtatttctactaaatggaacatagtgtagcagctctagaacatggaaaaccttaaatgcttgtttatgattaatctaactctttttttattcatggctgttcagatacttcatgaagtgagaataaagcgggatagcaaaagggagggcaggcttcgtgcttggtgcgagttgtctcactgggtcaccaggtcgcatgttcgaagcagtctcttcgcatttgtggggggaaggcttgcctcggtttacccccttccccagaccccactcatgtgggagactccggccctgggtctgccccttttcgctgcgatctgtattgtgccattcttgccagccatgggcgattcagtcatttccagtacaccaaatcttatagtcaaggaatgcaacaaaactgttttcatatcagaaatggtgttgaaaaagacgcaaaatttggaagagggcaatgcagaaagtttggcaatttttgaacatttttctgattctggtaatgatatgcaatctgaatatactgaagttgtcgctcattaggatgatgcctcgttagaaaaaaacagatgactttcatcataaggccttattctgagcatagccaacataaatcaaaatgggcataatttttcttacatgtatttctgcatgtggttgttcaacttatatggttcttaagaccctaacactgagtaaataagtcggaagtgcttatttgttcaacttatgtaagtgtttgttcagtttgaggatacgggcagtgtctggctattggctaaagccagaccatgttacattcattagtgtactcaccgcgtactcacacacgcaggggaagttgagatcaaactaagatacctcaatgcaacgaacaaaagctgcaggttggagcctaaaaatgagtactacagttgtgttgttgatttgttgggcagaaatgttaagttttccggtgcttctaggcccatcagtcactaaaccaatagaatctaagcagaccttccttcttgcaactggtatttgctgagctgaaatggtccgccatatccatgatcagttggatttagaatctgaagtggagctaaacagctaactgagtaatctcggaaggagcacttactgcaagggagaaatttacatgaggccttgccatcggaggacaatataaggtcttcataagatatctgcaaatcattcagaaatctagggtgcgctgatgacttccagtccaatcaagtattctaaaaaagaattatgtcccaaacaaactacaatacctgtggccagtacaggctaaatcgtgctcaagttagtatctgcatcagatttgtattttagtctaccaaactgatataaccttggtagttggtacattgctcaagtgacttggagcagagcagaatgtgaatatctgcctgatgatcccttttacagcaaaagcatgccagagtgtgtgtgtcgtattcattcgttttccagaagggagcccggccaccatatggaaggaaattcactcttcatagtcacaacagcatcagtgtattccgtgttgcacgtactgctctttaaatctgtacactgctagtaaaatatttcttgactgacttgctggatattcttgtgcagcctggtgatgttttctaatgttacagtaatagagttaattttcatcccttatgccaactgatcacatgttactttacagcattgacgatagagtgatgtaaaggttaatggtgtcgattctttgtacagccttttttttacttttttttgtctctgttgagatgccaagttttgg

SEQ ID NO: 72680 - DNA, 4161 bp, Zea Mays
aaacagcgtcagcgtcgagaggagaaaaagtcaccgcgagtccaggatccatgctgaggcacttggtccggacgggccagctcgccgacgcgaggagcctattcgacgcgatgccgcgccgcgacgaggtcgcctacgcgactcttctctcgggctatgccgcggcagctgacttcccgggcgctatggcgctcttctcccgcttccgcgcctcctcctcccagccacacgacgccgcggatccgttcatcctcagccccgtcctcaaggcgtgcgcttccgctgccgccagcgcagggctcctccccctccctcacgccgccgcggcggccgctctgcacgcgttcgccgtccgctcctcctccctgccgtccgtgttcgtctccacggcgctcgcggacgcctacgccaaggccggccgcctcgacctggcgctgcaggtgctcgacgaaatgcccagcaggaacgtggtctcgtggaccacgctcgtcgcctcgctggcgcgtgctggccggcggcacgacgcgctccgccgcttcgccgagatgcgggcctccggcgtggcctgcgactcccacgcctgctcggcggctctcacggcgtgcgccgacgcggggctgctgccacgcggccgcgaggtgcacgcgctctgcgccaagctcggcctcgacgccgtgcccttcgtcgccaacgcgctcgcggcgctgtacgcgcggtgcggcgatgtcgaccgcgcgctggccgcggtcggccgcatgggctcgcacgacgttgccgtgtgcacaacgctgatcgcatcctacgtccagaccggccgcacggaggaagccatcgaggcgtttgtgagaatgcttcgcgatgagtcgtcaaattctgcttcaccaaatgagtatacgttctctgccgtaattgccgcgtgtccaaatatggatcgtgcatatcttggagagcagttacatgcacaagctgcacggagagggctatctcatgcccgctctgtggccaattcccttgtcaaactctattcccgccgtggccatctttcagctgctgatgctatcttccgggagagtgtcgtcaaggatgttgtctcctggagcacaattatatcaggatacacacaagaaggcctcgccgaggagtcttttgccttgttctcagaaatgcggcatcacagtagctgccctcggccgaatgagtttactcttgccagtctcttcagtgtgtgtgcaagtgctgcgtcgctggatactggacgccagctgcatgcactcgctgttgctgctgggcttgaacaccatgcaatggtcaggagtgcgcttgttaacatgtatggaaagggtggtagcatgtcagatgctaatgtcgtattttccaatcgcactaaagatgatgtgatttcatggactgcgatgatcgttgggcatgctgagcatggtcacagcaaagaggcttttgaactgtttgaggaaatgtgccgtatcgggctaaagccagaccatgttacgttcattggtgtactcactgcttgctctcacgcgggggaacttgagctcggattgagatacctcaatgcaatgaacaaaagctatgggctggagcctgaaaaggagcactacggttgtgttgttgatttgttagccagagctggtagaatacatgaggctgaggagttgattggaagaattgctgctgaggaaagagatggtgtggtttggacatccttgcttagggcatgtgctgctcgaggggcagaggaaactggaaagatagctgcagagaggatgatggaggcagagccatggggttcaggagcacatgtggtgatggccaacctctatgcaagcaaggggctgtggtgtgaggcagcacaggaacgccatttgatgaagcagaaaggtgttctaaaaggtgcagggtggtcatcagtcgaagttggaggggacgacaggggggttggagtgtttgtttcaggagatcggacaaatccccaagacagtgccatctacatgatgcttgagctgatgtactatggagccggaatggttcgacaaatccctgatcagttggatttaggatctgaaggggagctaacagtttactaagtcatcctgaaagaagcactgactaaatagagaaatttacatggtaccttgtcaatgatggaacatccatcggaggacaacataaggatacacattgtatcctgctcttcagttgcttcaacttcaagctataatacctgtccatttattgtatctattgttttttgtgggtggctttgccctattctaaatgcaccaactgttttttatttagctatttgatattttccctgctggacataaatcactacatttatggctgatgtatttctactaaatggaacatagtgtagcagctctagaacatggaaaaccttaaatgcttgtttatgattaatctaactctttttttattcatggctgttcagatacttcatgaagtgagaataaagcgggatagcaaaagggaggcttcgtgcttggtgcgagttgtctcactgggtcaccaggtcgcatgttcgaagcagtctcttcgcatttgtggggggaaggcttgcctcggtttacccccttccccagaccccactcatgtgggagactccggccctgggtctgccccttttcgctgcgatctgtattgtgccattcttgccagccatgggcgattcagtcatttccagtacaccaaatcttatagtcaaggaatgcaacaaaactgttttcatatcagaaatggtgttgaaaaagacgcaaaatttggaagagggcaatgcagaaagtttggcaatttttgaacatttttctgattctggtaatgatatgcaatctgaatatactgaagttgtcgctcattaggatgatgcctcgttagaaaaaaacagatgactttcatcataaggccttattctgagcatagccaacataaatcaaaatgggcataatttttcttacatgtatttctgcatgtggttgttcaacttatatggttcttaagaccctaacactgagtaaataagtcggaagtgcttatttgttcaacttatgtaagtgtttgttcagtttgaggatacgggcagtgtctggctattggctaaagccagaccatgttacattcattagtgtactcaccgcgtactcacacacgcaggggaagttgagatcaaactaagatacctcaatgcaacgaacaaaagctgcaggttggagcctaaaaatgagtactacagttgtgttgttgatttgttgggcagaaatgttaagttttccggtgcttctaggcccatcagtcactaaaccaatagaatctaagcagaccttccttcttgcaactggtatttgctgagctgaaatggtccgccatatccatgatcagttggatttagaatctgaagtggagctaaacagctaactgagtaatctcggaaggagcacttactgcaagggagaaatttacatgaggccttgccatcggaggacaatataaggtcttcataagatatctgcaaatcattcagaaatctagggtgcgctgatgacttccagtccaatcaagtattctaaaaaagaattatgtcccaaacaaactacaatacctgtggccagtacaggctaaatcgtgctcaagttagtatctgcatcagatttgtattttagtctaccaaactgatataaccttggtagttggtacattgctcaagtgacttggagcagagcagaatgtgaatatctgcctgatgatcccttttacagcaaaagcatgccagagtgtgtgtgtcgtattcattcgttttccagaagggagcccggccaccatatggaaggaaattcactcttcatagtcacaacagcatcagtgtattccgtgttgcacgtactgctctttaaatctgtacactgctagtaaaatatttcttgactgacttgctggatattcttgtgcagcctggtgatgttttctaatgttacagtaatagagttaattttcatcccttatgccaactgatcacatgttactttacagcattgacgatagagtgatgtaaaggttaatggtgtcgattctttgtacagccttttttttacttttttttgtctctgttgagatgccaagttttgg

SEQ ID NO: 72681 - DNA, 966 bp, Zea Mays
ggtgggttcgacggttgtttccctaccaccgctgttgctgtctttgggcgctacggcggtggtagctgcggcgtccgtcatgactcatgcctcgggctccgtcgctgccacctcctgttgtctcctcctcgcgtgtgctgtcaacgcctcccctttcggcttctggagtggccatggaaaccttcccatgttcatccttgatggctcgaagggggaggaaatgtaggcgaaggagtggcacctgattgaggcagcttttgaccaggctgacaggagcctatagttggtggagcgttttctccactattttggtctggcagtttcaatcgctcgttcgtccatgacacttgacatcatcccacacggccagcttgtttattctcggtcatcgtctaggagggaggcgctgcgggccacctagcaggaggtggagaggctgcggccgcagatcgcccgctgggagaagagggaccaccagctctccagtctccacccttcaagccaaggccgagcgtctcgagagtgaggcaacatgccttcactcggggcgcgatgcggcgtgtaacgatgtcagacaacttcgtggggagaggcccatcttcggtgagatctacgcgaggcgagcttgcaggtcgaggacgccgatggtccctgcgggcgacaaacgctcgcttggaggaggtgaacttggaccttcagcgagagcaggggtggttggaggtagtgtcacacccgattttaaaaagtaaactgaatgcgaaccatgtacgtgccagaatcagaattttatagacacattgattacataactggacgtcatcacacagtgctcagataataacgtaaaatgtattaatttgattacatcatgatgtacgagacatccacatagtcttgaacatatatcaaagtacaaaagtcttgaacatagatcaaagtgtgaatacgaatcgtagtaaaatacgg

SEQ ID NO: 72682 - DNA, 703 bp, Zea Mays
atcgcacgtggccaccgcacagcctgcctccgccgacgccccgggcacgaccggtgccacctcaatctgtccccaacgcaccctcgcccccaacgcctaccacgtgcgcccagcttgcccccacacgctgtccctaatgcaacctcgcctgctcgcactgctccacctcccccatacgttggaggagttccacgcctgcctcctctgctcccacggccgcaacggcaccacgacgcgcgtcgtcgggagccaccaggatgtctgctacctaccccttctcaaggagtagctctccgagccatggactggcgcgagtgaggcaccgtcatcgagatctcaaaattccggagaatgtctcgaagtgcatagattgaaaaaagtagcataagaagaatggatttgtggaattgattattttcacaagactgcaaatcagagtagatgtttttcgaccatgctttactctaaacgctttatgaagcatctcagcgtgcgtttcagctctacagttctataatccatccaagtatccatgcaaacaataaaattgtacgggcatttggagagaagagagtagaggataatttgaagaaccacgtggacctttgcaggatgcttgatattgtcgcattggaaaaggacatcttatgatcaaggggacaaatgagatcatgccaactctactccatgtactgctggtgtc

SEQ ID NO: 72683 - DNA, 644 bp, Zea Mays
aaacgaaaggactgccctaacctcgtgcagtcgtgcccgcttgtttcacttgctcgccttcacccctcgccgccaccgccgccgccgtcgccgtcgcaagcgagacgatgctcgagatcaacttgttccgcaccgacaagggcggcaacccggaccttattcgcgagtcctagcgcagtcggttcgcctccgtcgagctcgtcgacgaggtcatcgccctcgacaaggcatggcgtggcaattcgagctggataagatccggcaggagctcaacgctaccagcaaaaagatcggcaagctcaaagccagcaagcaagaagaggaagcgaagaagctcatggatagcacagacgaaattaagaaaaggttggcagccaaagaagttgaggtgcaggaggccaagagcaccctcgacgccaaggtcatgacgatttgcaacatcgtgcatgagtctgtgccattcagcgatggcgaggcaaacaataaaattgtacgggcatttggagagaagagagtagaggataatttgaagaaccacgtggacctttgcaggatgcttgatattgtcgcattggaaaaggacatcttatgatcaaggggacaaatgagatcatgccaactctactccatgtactgctggtgtc

SEQ ID NO: 72684 - DNA, 3338 bp, Zea Mays
ggtgctcttcaactctctttctttttgcagcgcaggacaggaaaccgcatctcccgttcccggccgtttattattagctgagctcgtgcctcgtacacgaggccggccctctcgctctcggtgcgtgcgtgggctgaggccgctgagaggcaatacgcggtgcgtggggtgtggggagcgaggcggcggcgacgagggttttgctgctccgcacaccgcgcgcagcggcgacgcgaccgcagctcgtcgccgccccggttcgaggaggaggaggaggagccggctgaggcgcctgtggtggctgctgcggcgggagcgggagcgccatgaggggcggcggcgggaggcagccttcctatgcggcgtcggacggggcggatgcggatgcggcggcggtcccggctgcttccaggaagatggtgcagagcctcaaggggatcctggccgaccgctcggagggcgagatctacgccaccctctgcgactgcggcatggaccccgacatagccgtagagaggctcatctcccaggatacttttcatgaggtgagaagaaagcgggataagaaaaaggagactaaagttaatcaggaaacaaggcctcgtccattccagaaatctatatatggaggatataaggctggttcagatcgaagtgggagagcaaactctataggcggtttcaaaggccctgccaaaaaagaaccagagttacatgcttcaataaactcgtcagccttagatgtcaacacaagtgccacttcagaaacattttctgctactggcaatgttgcccaggctgatgctaagaacactttccagcctccatctcaagtgaaacatggttggggtggtgttccaggtcgcccttccatggctgaaatagtgaagatgggccggcctcaagctaaagttgggagcagatctgttgcaagtagcattgtcatgccagctattggtgattcagccattcccaatacaccaaatcttgcgcccaatgaatacaaccaaactgtatttgcatcagaagtaggccatggtgcagcagataaattgccaaatgttgccgatgaggtgcactctgtatctaaagatgcttcctcacttgatatgttaccttcagcagagggaacagatgttgaagccccttccatgagtgctaacatgcaaggttcatcaacgccagatgccaatgaagatgacgttgaaaaagacacaaatttggaagagggcaatacagaaagcttgacgactcctggacaagtttctgcttctggtaaaggtatacattcagaatatactgaacttgtcagtcatctggatgaaggctcgatggagaaaacagatgactttcagctcgatgctctttcatttgaacacaatctaaatctgaatggagatgtgtctacaacgacaacacaatttgatcatttgactctgcttgatggaccaaaattgtctgatgagaatccggctgtaataatccctggccatcttcaggtttcaaacgctgattgtgcgcacttgacatttggtagttttgtgtatggaacacttgatgcgtccttgacaacaaaacctcttgagagtcatggggatatcgtaacaattcctgacgatgattatgaccaatcagagggcagaatccatgacgatgaaagcaagcaatctgaagtcactagatccaatttcctggatgtcacgagcaatacggaatacaacctatcatcacccccagattatgcaacttcaagtgcagcgctgcaagattctacttcacagagttatctacaggaaaatcgacaattccagagcatttctcctctcccaagcttcatgcaaatacaaaatggtctcatgtcaccagcaattccaccattgcgcgaatttgatccagcattctcactattgctcactaatcctcctattatgcatggtacaacgtcatcatccatgagcagtgcaactgtttctacgcagccccaagagaatgccaatccagttggtttacccaaccctcaattgactcaatctcagccaagcaccagcattgctccagggcctccactccctcagcatcttcttcatccctatgctcaaacaacccttcctcttggatacgcaagcatgattggctatccatctcttccaccaagctatgcatatctcccacctgctgcttttcagcaaccatacatgaacagtggcatgttcctccaccaagcagcagcagcagttcccaactcaagtgtgaaataccctctgccgcagtacaaaagcaacattgcccttgctagcttaccacagccaggctctttgctctcaagctatgtcgggggctttggaactgcaaacaacatgcctggaaatttccctctgaaccaaagtacaacgtcggcaaccgcaactcttgggtttgatggaacggtcccgtcacatttggaagatggaaaccagtttgtttgtcttcagcagaacgagaaccctgcaatgtggatgcatggagctggttcacgagggatgcccccacttgcagccagtaccatgtatggctatcaagggcagagtcatcagaccggccttcggcagggccagctaccttcacaatatggctctgctctagggcagtcacagccgggcctgggccccgaacaccgaaatcctagcgatagtaacctaagtggtgctgctcaggctaaccagatgtggccaaacagctactgatccacccgaccaccccccttatcaacatctgtggaagacggtcttgttgttgtgtgcgcaaacgccagaggccatgcaaatgcctgtggcctgatccaggcacgcggataccagctgcgtgtgcatgagttactgtcgtgacattttgagaggcgcaagagatatatgttggagcatgttccacctgtagggtttgtaggatatggccaaaaatgtagctggatctgttcattcaaattctgatagggaaagggccggtcgtttttcgttctatttcccccctttttttgtcgtttgcatatcttgtgacaataaaaccggaatatctaacacatcagcaccattagttccccgaggggagtgaaagatagtctgttgtctttgcatcaccagtattgcgcctgcctcgcttaaattttatgattgagatggttatttgatggatgagaatttcccaacctgtgccttgtctgatgagatgtatcgttgtatttgaacattgaatgcataaaaaagagagattgcagcacacatttgccagccaaatgttgattattcgctgaagtatgtaaatagctctcattatattgattgatttggtcaaattgtttggtt

SEQ ID NO: 72685 - DNA, 3387 bp, Zea Mays
tttgcagcgcaggacaggaaaccgcatctcccgttcccggccgtttattattagctgagctcgtgcctcgtacacgaggccggccctctcgctctcggtgcgtgcgtgggctgaggccgctgagaggcaatacgcggtgcgtggggtgtggggagcgaggcggcggcgacgagggttttgctgctccgcacaccgcgcgcagcggcgacgcgaccgcagctcgtcgccgccccggttcgaggaggaggaggaggagccggctgaggcgcctgtggtggctgctgcggcgggagcgggagcgccatgaggggcggcggcgggaggcagccttcctatgcggcgtcggacggggcggatgcggatgcggcggcggtcccggctgcttccaggaagatggtgcagagcctcaaggggatcctggccgaccgctcggagggcgagatctacgccaccctctgcgactgcggcatggaccccgacatagccgtagagaggctcatctcccaggatacttttcatgaggtgagaagaaagcgggataagaaaaaggagactaaagttaatcaggaaacaaggcctcgtccattccagaaatctatatatggaggatataaggctggttcagatcgaagtgggagaggcggtttcaaaggccctgccaaaaaagaaccagagttacatgcttcaataaactcgtcagccttagatgtcaacacaagtgccacttcagaaacattttctgctactggcaatgttgcccaggctgatgctaagaacactttccagcctccatctcaagtgaaacatggttggggtggtgttccaggtcgcccttccatggctgaaatagtgaagatgggccggcctcaagctaaagttgggagcagatctgttgcaagtagcattgtcatgccagctattggtgattcagccattcccaatacaccaaatcttgcgcccaatgaatacaaccaaactgtatttgcatcagaagtaggccatggtgcagcagataaattgccaaatgttgccgatgaggtgcactctgtatctaaagatgcttcctcacttgatatgttaccttcagcagagggaacagatgttgaagccccttccatgagtgctaacatgcaaggttcatcaacgccagatgccaatgaagatgacgttgaaaaagacacaaatttggaagagggcaatacagaaagcttgacgactcctggacaagtttctgcttctggtaaaggtatacattcagaatatactgaacttgtcagtcatctggatgaaggctcgatggagaaaacagatgactttcagctcgatgctctttcatttgaacacaatctaaatctgaatggagatgtgtctacaacgacaacacaatttgatcatttgactctgcttgatggaccaaaattgtctgatgagaatccggctgtaataatccctggccatcttcaggtttcaaacgctgattgtgcgcacttgacatttggtagttttgtgtatggaacacttgatgcgtccttgacaacaaaacctcttgagagtcatggggatatcgtaacaattcctgacgatgattatgaccaatcagagggcagaatccatgacgatgaaagcaaggtaacattagcgcctgctgctaatgaatatgttacttctacgtcaaacagcaatgtagagaatcttgatattacatcagtacagcaatctgaagtcactagatccaatttcctggatgtcacgagcaatacggaatacaacctatcatcacccccagattatgcaacttcaagtgcagcgctgcaagattctacttcacagagttatctacaggaaaatcgacaattccagagcatttctcctctcccaagcttcatgcaaatacaaaatggtctcatgtcaccagcaattccaccattgcgcgaatttgatccagcattctcactattgctcactaatcctcctattatgcatggtacaacgtcatcatccatgagcagtgcaactgtttctacgcagccccaagagaatgccaatccagttggtttacccaaccctcaattgactcaatctcagccaagcaccagcattgctccagggcctccactccctcagcatcttcttcatccctatgctcaaacaacccttcctcttggatacgcaagcatgattggctatccatctcttccaccaagctatgcatatctcccacctgctgcttttcagcaaccatacatgaacagtggcatgttcctccaccaagcagcagcagcagttcccaactcaagtgtgaaataccctctgccgcagtacaaaagcaacattgcccttgctagcttaccacagccaggctctttgctctcaagctatgtcgggggctttggaactgcaaacaacatgcctggaaatttccctctgaaccaaagtacaacgtcggcaaccgcaactcttgggtttgatggaacggtcccgtcacatttggaagatggaaaccagtttgtttgtcttcagcagaacgagaaccctgcaatgtggatgcatggagctggttcacgagggatgcccccacttgcagccagtaccatgtatggctatcaagggcagagtcatcagaccggccttcggcagggccagctaccttcacaatatggctctgctctagggcagtcacagccgggcctgggccccgaacaccgaaatcctagcgatagtaacctaagtggtgctgctcaggctaaccagatgtggccaaacagctactgatccacccgaccaccccccttatcaacatctgtggaagacggtcttgttgttgtgtgcgcaaacgccagaggccatgcaaatgcctgtggcctgatccaggcacgcggataccagctgcgtgtgcatgagttactgtcgtgacattttgagaggcgcaagagatatatgttggagcatgttccacctgtagggtttgtaggatatggccaaaaatgtagctggatctgttcattcaaattctgatagggaaagggccggtcgtttttcgttctatttcccccctttttttgtcgtttgcatatcttgtgacaataaaaccggaatatctaacacatcagcaccattagttccccgaggggagtgaaagatagtctgttgtctttgcatcaccagtattgcgcctgcctcgcttaaattttatgattgagatggttatttgatggatgagaatttcccaacctgtgccttgtctgatgagatgtatcgttgtatttgaacattgaatgcataaaaaagagagattgcagcacacatttgccagccaaatgttgattattcgctgaagtatgtaaatagctctcattatattgattgatttggtcaaattgtttggtt

SEQ ID NO: 72686 - DNA, 2560 bp, Zea Mays
cacaactctcatagtgactggtcgcggcaatgttgcccaggctgatgctaagaacactttccagcctccatctcaagtgaaacatggttggggtggtgttccaggtcgcccttccatggctgaaatagtgaagatgggccggcctcaagctaaagttgggagcagatctgttgcaagtagcattgtcatgccagctattggtgattcagccattcccaatacaccaaatcttgcgcccaatgaatacaaccaaactgtatttgcatcagaagtaggccatggtgcagcagataaattgccaaatgttgccgatgaggtgcactctgtatctaaagatgcttcctcacttgatatgttaccttcagcagagggaacagatgttgaagccccttccatgagtgctaacatgcaaggttcatcaacgccagatgccaatgaagatgacgttgaaaaagacacaaatttggaagagggcaatacagaaagcttgacgactcctggacaagtttctgcttctggtaaagatctgaatggagatgtgtctacaacgacaacacaatttgatcatttgactctgcttgatggaccaaaattgtctgatgagaatccggctgtaataatccctggccatcttcaggtttcaaacgctgattgtgcgcacttgacatttggtagttttgtgtatggaacacttgatgcgtccttgacaacaaaacctcttgagagtcatggggatatcgtaacaattcctgacgatgattatgaccaatcagagggcagaatccatgacgatgaaagcaaggtaacattagcgcctgctgctaatgaatatgttacttctacgtcaaacagcaatgtagagaatcttgatattacatcagtacagcaatctgaagtcactagatccaatttcctggatgtcacgagcaatacggaatacaacctatcatcacccccagattatgcaacttcaagtgcagcgctgcaagattctacttcacagagttatctacaggaaaatcgacaattccagagcatttctcctctcccaagcttcatgcaaatacaaaatggtctcatgtcaccagcaattccaccattgcgcgaatttgatccagcattctcactattgctcactaatcctcctattatgcatggtacaacgtcatcatccatgagcagtgcaactgtttctacgcagccccaagagaatgccaatccagttggtttacccaaccctcaattgactcaatctcagccaagcaccagcattgctccagggcctccactccctcagcatcttcttcatccctatgctcaaacaacccttcctcttggatacgcaagcatgattggctatccatctcttccaccaagctatgcatatctcccacctgctgcttttcagcaaccatacatgaacagtggcatgttcctccaccaagcagcagcagcagttcccaactcaagtgtgaaataccctctgccgcagtacaaaagcaacattgcccttgctagcttaccacagccaggctctttgctctcaagctatgtcgggggctttggaactgcaaacaacatgcctggaaatttccctctgaaccaaagtacaacgtcggcaaccgcaactcttgggtttgatggaacggtcccgtcacatttggaagatggaaaccagtttgtttgtcttcagcagaacgagaaccctgcaatgtggatgcatggagctggttcacgagggatgcccccacttgcagccagtaccatgtatggctatcaagggcagagtcatcagaccggccttcggcagggccagctaccttcacaatatggctctgctctagggcagtcacagccgggcctgggccccgaacaccgaaatcctagcgatagtaacctaagtggtgctgctcaggctaaccagatgtggccaaacagctactgatccacccgaccaccccccttatcaacatctgtggaagacggtcttgttgttgtgtgcgcaaacgccagaggccatgcaaatgcctgtggcctgatccaggcacgcggataccagctgcgtgtgcatgagttactgtcgtgacattttgagaggcgcaagagatatatgttggagcatgttccacctgtagggtttgtaggatatggccaaaaatgtagctggatctgttcattcaaattctgatagggaaagggccggtcgtttttcgttctatttcccccctttttttgtcgtttgcatatcttgtgacaataaaaccggaatatctaacacatcagcaccattagttccccgaggggagtgaaagatagtctgttgtctttgcatcaccagtattgcgcctgcctcgcttaaattttatgattgagatggttatttgatggatgagaatttcccaacctgtgccttgtctgatgagatgtatcgttgtatttgaacattgaatgcataaaaaagagagattgcagcacacatttgccagccaaatgttgattattcgctgaagtatgtaaatagctctcattatattgattgatttggtcaaattgtttggtt

SEQ ID NO: 72687 - DNA, 2479 bp, Zea Mays
gcgctcttcaggtcctgtatggatgagcaatgttgcccaggctgatgctaagaacactttccagcctccatctcaagtgaaacatggttggggtggtgttccaggtcgcccttccatggctgaaatagtgaagatgggccggcctcaagctaaagttgggagcagatctgttgcaagtagcattgtcatgccagctattggtgattcagccattcccaatacaccaaatcttgcgcccaatgaatacaaccaaactgtatttgcatcagaagtaggccatggtgcagcagataaattgccaaatgttgccgatgaggtgcactctgtatctaaagatgcttcctcacttgatatgttaccttcagcagagggaacagatgttgaagccccttccatgagtgctaacatgcaaggttcatcaacgccagatgccaatgaagatgacgttgaaaaagacacaaatttggaagagggcaatacagaaagcttgacgactcctggacaagtttctgcttctggtaaagcagatctgaatggagatgtgtctacaacgacaacacaatttgatcatttgactctgcttgatggaccaaaattgtctgatgagaatccggctgtaataatccctggccatcttcaggtttcaaacgctgattgtgcgcacttgacatttggtagttttgtgtatggaacacttgatgcgtccttgacaacaaaacctcttgagagtcatggggatatcgtaacaattcctgacgatgattatgaccaatcagagggcagaatccatgacgatgaaagcaagcaatctgaagtcactagatccaatttcctggatgtcacgagcaatacggaatacaacctatcatcacccccagattatgcaacttcaagtgcagcgctgcaagattctacttcacagagttatctacaggaaaatcgacaattccagagcatttctcctctcccaagcttcatgcaaatacaaaatggtctcatgtcaccagcaattccaccattgcgcgaatttgatccagcattctcactattgctcactaatcctcctattatgcatggtacaacgtcatcatccatgagcagtgcaactgtttctacgcagccccaagagaatgccaatccagttggtttacccaaccctcaattgactcaatctcagccaagcaccagcattgctccagggcctccactccctcagcatcttcttcatccctatgctcaaacaacccttcctcttggatacgcaagcatgattggctatccatctcttccaccaagctatgcatatctcccacctgctgcttttcagcaaccatacatgaacagtggcatgttcctccaccaagcagcagcagcagttcccaactcaagtgtgaaataccctctgccgcagtacaaaagcaacattgcccttgctagcttaccacagccaggctctttgctctcaagctatgtcgggggctttggaactgcaaacaacatgcctggaaatttccctctgaaccaaagtacaacgtcggcaaccgcaactcttgggtttgatggaacggtcccgtcacatttggaagatggaaaccagtttgtttgtcttcagcagaacgagaaccctgcaatgtggatgcatggagctggttcacgagggatgcccccacttgcagccagtaccatgtatggctatcaagggcagagtcatcagaccggccttcggcagggccagctaccttcacaatatggctctgctctagggcagtcacagccgggcctgggccccgaacaccgaaatcctagcgatagtaacctaagtggtgctgctcaggctaaccagatgtggccaaacagctactgatccacccgaccaccccccttatcaacatctgtggaagacggtcttgttgttgtgtgcgcaaacgccagaggccatgcaaatgcctgtggcctgatccaggcacgcggataccagctgcgtgtgcatgagttactgtcgtgacattttgagaggcgcaagagatatatgttggagcatgttccacctgtagggtttgtaggatatggccaaaaatgtagctggatctgttcattcaaattctgatagggaaagggccggtcgtttttcgttctatttcccccctttttttgtcgtttgcatatcttgtgacaataaaaccggaatatctaacacatcagcaccattagttccccgaggggagtgaaagatagtctgttgtctttgcatcaccagtattgcgcctgcctcgcttaaattttatgattgagatggttatttgatggatgagaatttcccaacctgtgccttgtctgatgagatgtatcgttgtatttgaacattgaatgcataaaaaagagagattgcagcacacatttgccagccaaatgttgattattcgctgaagtatgtaaatagctctcattatattgattgatttggtcaaattgtttggtt

SEQ ID NO: 72688 - DNA, 2402 bp, Zea Mays
ctttgacaatgtatagcttcgctcatgcaaattaaatatgttcacttcatctgcaatgttgcccaggctgatgctaagaacactttccagcctccatctcaagtgaaacatggttggggtggtgttccaggtcgcccttccatggctgaaatagtgaagatgggccggcctcaagctaaagttgggagcagatctgttgcaagtagcattgtcatgccagctattggtgattcagccattcccaatacaccaaatcttgcgcccaatgaatacaaccaaactgtatttgcatcagaagtaggccatggtgcagcagataaattgccaaatgttgccgatgagatgccaatgaagatgacgttgaaaaagacacaaatttggaagagggcaatacagaaagcttgacgactcctggacaagtttctgcttctggtaaagatctgaatggagatgtgtctacaacgacaacacaatttgatcatttgactctgcttgatggaccaaaattgtctgatgagaatccggctgtaataatccctggccatcttcaggtttcaaacgctgattgtgcgcacttgacatttggtagttttgtgtatggaacacttgatgcgtccttgacaacaaaacctcttgagagtcatggggatatcgtaacaattcctgacgatgattatgaccaatcagagggcagcaatgtagagaatcttgatattacatcagtacagcaatctgaagtcactagatccaatttcctggatgtcacgagcaatacggaatacaacctatcatcacccccagattatgcaacttcaagtgcagcgctgcaagattctacttcacagagttatctacaggaaaatcgacaattccagagcatttctcctctcccaagcttcatgcaaatacaaaatggtctcatgtcaccagcaattccaccattgcgcgaatttgatccagcattctcactattgctcactaatcctcctattatgcatggtacaacgtcatcatccatgagcagtgcaactgtttctacgcagccccaagagaatgccaatccagttggtttacccaaccctcaattgactcaatctcagccaagcaccagcattgctccagggcctccactccctcagcatcttcttcatccctatgctcaaacaacccttcctcttggatacgcaagcatgattggctatccatctcttccaccaagctatgcatatctcccacctgctgcttttcagcaaccatacatgaacagtggcatgttcctccaccaagcagcagcagcagttcccaactcaagtgtgaaataccctctgccgcagtacaaaagcaacattgcccttgctagcttaccacagccaggctctttgctctcaagctatgtcgggggctttggaactgcaaacaacatgcctggaaatttccctctgaaccaaagtacaacgtcggcaaccgcaactcttgggtttgatggaacggtcccgtcacatttggaagatggaaaccagtttgtttgtcttcagcagaacgagaaccctgcaatgtggatgcatggagctggttcacgagggatgcccccacttgcagccagtaccatgtatggctatcaagggcagagtcatcagaccggccttcggcagggccagctaccttcacaatatggctctgctctagggcagtcacagccgggcctgggccccgaacaccgaaatcctagcgatagtaacctaagtggtgctgctcaggctaaccagatgtggccaaacagctactgatccacccgaccaccccccttatcaacatctgtggaagacggtcttgttgttgtgtgcgcaaacgccagaggccatgcaaatgcctgtggcctgatccaggcacgcggataccagctgcgtgtgcatgagttactgtcgtgacattttgagaggcgcaagagatatatgttggagcatgttccacctgtagggtttgtaggatatggccaaaaatgtagctggatctgttcattcaaattctgatagggaaagggccggtcgtttttcgttctatttcccccctttttttgtcgtttgcatatcttgtgacaataaaaccggaatatctaacacatcagcaccattagttccccgaggggagtgaaagatagtctgttgtctttgcatcaccagtattgcgcctgcctcgcttaaattttatgattgagatggttatttgatggatgagaatttcccaacctgtgccttgtctgatgagatgtatcgttgtatttgaacattgaatgcataaaaaagagagattgcagcacacatttgccagccaaatgttgattattcgctgaagtatgtaaatagctctcattatattgattgatttggtcaaattgtttggtt

SEQ ID NO: 72689 - DNA, 672 bp, Zea Mays
agcagcgcctggatgaacgaaagctctccagtatctggacgctgcagattacttcaacagctgaacaaagcgacgaaacgaaactagcaggcaaagacagcagagtaggtacagtaactcaccatggcagtggcaggcgaagatgacaagaagagacgcaaagccatgaactggcctcagaggcatggtcaggacaggaggcgtgcagtctgggcaggggaacaagaggaaacttgggcgtgcagtgcagggtgcctggtggtcaggacaggaggcggcggttgacactgaacgctagtcattcagcgagaggagtgggaaagtaaaaaggaaaaaacaagagaaaagaaagtctgtgatgcgatgtgggggggttcgtcttcatgatggcttgttagccgccatgatgagaagcggattcccgttgagtgcagccggattagagcggccatttcctttttacttttcctccgttccagattcgtgtgggatggagtggaatgtgatgccctctttcagacagacagacgtcgagctcaccttcttttacctgtcgatccatgcaccggccgggctggtctggatggatggaggagatgtgctttctaatggcatcccttgttaccggttccgtttgattttgtggtagacatgcatgttggccattttttt

SEQ ID NO: 72690 - DNA, 2548 bp, Zea Mays
ccgcccgtcgcctgccgcaccgcacccgccccggcctcctccgcagtcccatgagccaggccgcgcccgtggcgaaccctgctcgcgccgcgcctgcccattccccctctgccgccggtgcccggagtgcagatccgtctgaccgcgccgccgccgctctcggatatcgctttatccttcgtataattgtattgtcaaactggcacccaccggaatcatatagcctggataaccagcaagctgctctccgtctcctctcatcagtatgtatccagcttttaaaggtgataaatccaagattctgccagtaaagatgccgatctgtagctgtgaagaaactatccatgagttcgagatgttaacacgcgatgctgggcgtgtacagaaggatacactgaaaaagatcctcgagttgaatgctgatgctgaatatctgaacaagttcggcctcaatggcaggactgatgtagagagctacaaatcctgcatcccgctgtgtgtgcacagtgatcttgagccatacatccataagattgctgatggtgatagctccccactcctcactgggaagcccgtcacctccctttccctcagttctggtacaacgcagggaaggcctaagttcttgccgtttactgatgaattgcttgagaccacacttcaaatattccagacttcatatgcatttaggaaccgtgagtatccaattggaagaggaaaagccttgcagtttatctatggtagcaagcaagtggtaacaaaaggcggcatccttgccacaactgcaacaacaaacttgtaccggagggcacgatacaaggaggggatgaaggatatccagtctcaatgctgcagccctgatgaagttgtttttggctctgacttccaccagtccttgtattgtcacttgctctgtggtctaatatactctgatgaggtccatcaggtgttctcgacattcgctcacagcttagtccatgcatttcaaacatttgaggaggtttgggaagatctctgtgctgacataagagatggtgtcctctcagagaaagttacagtgccatcggttcgtgaagccgtgacaaaaatcctcaagcccaatcctgagctcgctgactcgatctataagaagtgtacgggcctgagcaactggtacggtgtaatcccagcactctggccaaacgcaaagtatgtgtacggtatcatgacagggtccatggaaccgtatttaaagaaactgaggcactatgctgggcacttgcctctgataagcgcagattacggcgcatctgaaggatgggttggtgctaatataaaccccacacttccacctgaacaggtgacatacgctgttctccctcagaccggttattttgagttcattcctttggaggtggagaatagtgcctcctccattcactacttagaatcagaaccagttggcctgactgaagttgaggttggcaaaacctacgaagtcgtgataactaccttcggaggtctataccgctaccggctaggagatatcgtgaaggtaacgggcttccacaacgcaacaccggagctccggttcatctgccgcagaagcctagtcctgagcatcaacatcgacaagaacaccgagcaagacctccagctggccgtcgaggaggcagcgaagctcctggacgcggagaagctggagatcgtcgatttcaccagcttcgtggagaagtcaagcgaccccggtcgctacgtcatcttctgggagctgagctccgacgcgagcgaggacgtcctgcgaggctgcgcgaactgcctggacctagccttcgtcgatgctgggtatgtgggctcgaggaagatcagagccatcggcccgctggagctgcggattctgaagaggggaaccttcaaggagatcctggatcacttcctgagcctcggtggcgccgtgagccagttcaagacgcctcggttcgtcaacccgttgaacgtcaaggttctgcagatactcagtaggaacaccaccagaagctacttcagtaccgcctatgggctctgataaataagaaacgctgctagtagttccatccatgtaattatatttatataaaaaaatattgcttcactgttctgttctagtctccaggtaaaagaaaacaatctactcatcctagtcctgctggcgccctgctagaatgtctgtaaatccatatgcaagcaaatgcattcagtctctgcctgtgttctgatctttgtgcatagcaagcaaatgcattcacagtctccactccagactccagagtagtagtacgtacacaaatactgtcactgggtattagtgctaatcttttttacttgtcctgacatcagattcagttctacacacatagaaacggacagaagatacatgaaactgaatacgtaaataatcaagcacatatagaacgtcgtggctgcaagagaagatcacaggctgtagttgacgtcgatgaagctgaggatctggtgcacggcgccggcgatgtcctccgccgagtaccttgcctcgccgacgatctatcac

SEQ ID NO: 72691 - DNA, 2589 bp, Zea Mays
cccgccccggcctcctccgcagtcccatgagccaggccgcgcccgtggcgaaccctgctcgcgccgcgcctgcccattccccctccgcccccgtcggccaccgggccgcctcgcccgcccggcgcccgcgcggagccacaggcgtcggcgccacagccgcccgctcccctctgccgccggtgcccggagtgcagatccgtctgaccgcgccgccgccgctctcggatatcgctttatccttcgtataattgtattgtcaaactggcacccaccggaatcatatagcctggataaccagcaagctgctctccgtctcctctcatcagtgataaatccaagattctgccagtaaagatgccgatctgtagctgtgaagaaactatccatgagttcgagatgttaacacgcgatgctgggcgtgtacagaaggatacactgaaaaagatcctcgagttgaatgctgatgctgaatatctgaacaagttcggcctcaatggcaggactgatgtagagagctacaaatcctgcatcccgctgtgtgtgcacagtgatcttgagccatacatccataagattgctgatggtgatagctccccactcctcactgggaagcccgtcacctccctttccctcagttctggtacaacgcagggaaggcctaagttcttgccgtttactgatgaattgcttgagaccacacttcaaatattccagacttcatatgcatttaggaaccgtgagtatccaattggaagaggaaaagccttgcagtttatctatggtagcaagcaagtggtaacaaaaggcggcatccttgccacaactgcaacaacaaacttgtaccggagggcacgatacaaggaggggatgaaggatatccagtctcaatgctgcagccctgatgaagttgtttttggctctgacttccaccagtccttgtattgtcacttgctctgtggtctaatatactctgatgaggtccatcaggtgttctcgacattcgctcacagcttagtccatgcatttcaaacatttgaggaggtttgggaagatctctgtgctgacataagagatggtgtcctctcagagaaagttacagtgccatcggttcgtgaagccgtgacaaaaatcctcaagcccaatcctgagctcgctgactcgatctataagaagtgtacgggcctgagcaactggtacggtgtaatcccagcactctggccaaacgcaaagtatgtgtacggtatcatgacagggtccatggaaccgtatttaaagaaactgaggcactatgctgggcacttgcctctgataagcgcagattacggcgcatctgaaggatgggttggtgctaatataaaccccacacttccacctgaacaggtgacatacgctgttctccctcagaccggttattttgagttcattcctttggaggtggagaatagtgcctcctccattcactacttagaatcagaaccagttggcctgactgaagttgaggttggcaaaacctacgaagtcgtgataactaccttcggaggtctataccgctaccggctaggagatatcgtgaaggtaacgggcttccacaacgcaacaccggagctccggttcatctgccgcagaagcctagtcctgagcatcaacatcgacaagaacaccgagcaagacctccagctggccgtcgaggaggcagcgaagctcctggacgcggagaagctggagatcgtcgatttcaccagcttcgtggagaagtcaagcgaccccggtcgctacgtcatcttctgggagctgagctccgacgcgagcgaggacgtcctgcgaggctgcgcgaactgcctggacctagccttcgtcgatgctgggtatgtgggctcgaggaagatcagagccatcggcccgctggagctgcggattctgaagaggggaaccttcaaggagatcctggatcacttcctgagcctcggtggcgccgtgagccagttcaagacgcctcggttcgtcaacccgttgaacgtcaaggttctgcagatactcagtaggaacaccaccagaagctacttcagtaccgcctatgggctctgataaataagaaacgctgctagtagttccatccatgtaattatatttatataaaaaaatattgcttcactgttctgttctagtctccaggtaaaagaaaacaatctactcatcctagtcctgctggcgccctgctagaatgtctgtaaatccatatgcaagcaaatgcattcagtctctgcctgtgttctgatctttgtgcatagcaagcaaatgcattcacagtctccactccagactccagagtagtagtacgtacacaaatactgtcactgggtattagtgctaatcttttttacttgtcctgacatcagattcagttctacacacatagaaacggacagaagatacatgaaactgaatacgtaaataatcaagcacatatagaacgtcgtggctgcaagagaagatcacaggctgtagttgacgtcgatgaagctgaggatctggtgcacggcgccggcgatgtcctccgccgagtaccttgcctcgccgacgatctatcac

SEQ ID NO: 72692 - DNA, 2407 bp, Zea Mays
ctcgtttctggctgcttcttctgtttcgtcgctgctgtgaggtgactgtacgcaatcaaattcaaacccttcttcctgtgggctgctcatggcgcccgccgaaactcatccctcccaatttcaatctatgctacaggctactggtgataaatccaagattctgccagtaaagatgccgatctgtagctgtgaagaaactatccatgagttcgagatgttaacacgcgatgctgggcgtgtacagaaggatacactgaaaaagatcctcgagttgaatgctgatgctgaatatctgaacaagttcggcctcaatggcaggactgatgtagagagctacaaatcctgcatcccgctgtgtgtgcacagtgatcttgagccatacatccataagattgctgatggtgatagctccccactcctcactgggaagcccgtcacctccctttccctcagttctggtacaacgcagggaaggcctaagttcttgccgtttactgatgaattgcttgagaccacacttcaaatattccagacttcatatgcatttaggaaccgtgagtatccaattggaagaggaaaagccttgcagtttatctatggtagcaagcaagtggtaacaaaaggcggcatccttgccacaactgcaacaacaaacttgtaccggagggcacgatacaaggaggggatgaaggatatccagtctcaatgctgcagccctgatgaagttgtttttggctctgacttccaccagtccttgtattgtcacttgctctgtggtctaatatactctgatgaggtccatcaggtgttctcgacattcgctcacagcttagtccatgcatttcaaacatttgaggaggtttgggaagatctctgtgctgacataagagatggtgtcctctcagagaaagttacagtgccatcggttcgtgaagccgtgacaaaaatcctcaagcccaatcctgagctcgctgactcgatctataagaagtgtacgggcctgagcaactggtacggtgtaatcccagcactctggccaaacgcaaagtatgtgtacggtatcatgacagggtccatggaaccgtatttaaagaaactgaggcactatgctgggcacttgcctctgataagcgcagattacggcgcatctgaaggatgggttggtgctaatataaaccccacacttccacctgaacaggtgacatacgctgttctccctcagaccggttattttgagttcattcctttggaggtggagaatagtgcctcctccattcactacttagaatcagaaccagttggcctgactgaagttgaggttggcaaaacctacgaagtcgtgataactaccttcggaggtctataccgctaccggctaggagatatcgtgaaggtaacgggcttccacaacgcaacaccggagctccggttcatctgccgcagaagcctagtcctgagcatcaacatcgacaagaacaccgagcaagacctccagctggccgtcgaggaggcagcgaagctcctggacgcggagaagctggagatcgtcgatttcaccagcttcgtggagaagtcaagcgaccccggtcgctacgtcatcttctgggagctgagctccgacgcgagcgaggacgtcctgcgaggctgcgcgaactgcctggacctagccttcgtcgatgctgggtatgtgggctcgaggaagatcagagccatcggcccgctggagctgcggattctgaagaggggaaccttcaaggagatcctggatcacttcctgagcctcggtggcgccgtgagccagttcaagacgcctcggttcgtcaacccgttgaacgtcaaggttctgcagatactcagtaggaacaccaccagaagctacttcagtaccgcctatgggctctgataaataagaaacgctgctagtagttccatccatgtaattatatttatataaaaaaatattgcttcactgttctgttctagtctccaggtaaaagaaaacaatctactcatcctagtcctgctggcgccctgctagaatgtctgtaaatccatatgcaagcaaatgcattcagtctctgcctgtgttctgatctttgtgcatagcaagcaaatgcattcacagtctccactccagactccagagtagtagtacgtacacaaatactgtcactgggtattagtgctaatcttttttacttgtcctgacatcagattcagttctacacacatagaaacggacagaagatacatgaaactgaatacgtaaataatcaagcacatatagaacgtcgtggctgcaagagaagatcacaggctgtagttgacgtcgatgaagctgaggatctggtgcacggcgccggcgatgtcctccgccgagtaccttgcctcgccgacgatctatcac

SEQ ID NO: 72693 - DNA, 2333 bp, Zea Mays
tagaattctaccagatgcccagcctttcagccgcttggtttctgccgattcccttggcggttaaaaaaggtgataaatccaagattctgccagtaaagatgccgatctgtagctgtgaagaaactatccatgagttcgagatgttaacacgcgatgctgggcgtgtacagaaggatacactgaaaaagatcctcgagttgaatgctgatgctgaatatctgaacaagttcggcctcaatggcaggactgatgtagagagctacaaatcctgcatcccgctgtgtgtgcacagtgatcttgagccatacatccataagattgctgatggtgatagctccccactcctcactgggaagcccgtcacctccctttccctcagttctggtacaacgcagggaaggcctaagttcttgccgtttactgatgaattgcttgagaccacacttcaaatattccagacttcatatgcatttaggaaccgtgagtatccaattggaagaggaaaagccttgcagtttatctatggtagcaagcaagtggtaacaaaaggcggcatccttgccacaactgcaacaacaaacttgtaccggagggcacgatacaaggaggggatgaaggatatccagtctcaatgctgcagccctgatgaagttgtttttggctctgacttccaccagtccttgtattgtcacttgctctgtggtctaatatactctgatgaggtccatcaggtgttctcgacattcgctcacagcttagtccatgcatttcaaacatttgaggaggtttgggaagatctctgtgctgacataagagatggtgtcctctcagagaaagttacagtgccatcggttcgtgaagccgtgacaaaaatcctcaagcccaatcctgagctcgctgactcgatctataagaagtgtacgggcctgagcaactggtacggtgtaatcccagcactctggccaaacgcaaagtatgtgtacggtatcatgacagggtccatggaaccgtatttaaagaaactgaggcactatgctgggcacttgcctctgataagcgcagattacggcgcatctgaaggatgggttggtgctaatataaaccccacacttccacctgaacaggtgacatacgctgttctccctcagaccggttattttgagttcattcctttggaggtggagaatagtgcctcctccattcactacttagaatcagaaccagttggcctgactgaagttgaggttggcaaaacctacgaagtcgtgataactaccttcggaggtctataccgctaccggctaggagatatcgtgaaggtaacgggcttccacaacgcaacaccggagctccggttcatctgccgcagaagcctagtcctgagcatcaacatcgacaagaacaccgagcaagacctccagctggccgtcgaggaggcagcgaagctcctggacgcggagaagctggagatcgtcgatttcaccagcttcgtggagaagtcaagcgaccccggtcgctacgtcatcttctgggagctgagctccgacgcgagcgaggacgtcctgcgaggctgcgcgaactgcctggacctagccttcgtcgatgctgggtatgtgggctcgaggaagatcagagccatcggcccgctggagctgcggattctgaagaggggaaccttcaaggagatcctggatcacttcctgagcctcggtggcgccgtgagccagttcaagacgcctcggttcgtcaacccgttgaacgtcaaggttctgcagatactcagtaggaacaccaccagaagctacttcagtaccgcctatgggctctgataaataagaaacgctgctagtagttccatccatgtaattatatttatataaaaaaatattgcttcactgttctgttctagtctccaggtaaaagaaaacaatctactcatcctagtcctgctggcgccctgctagaatgtctgtaaatccatatgcaagcaaatgcattcagtctctgcctgtgttctgatctttgtgcatagcaagcaaatgcattcacagtctccactccagactccagagtagtagtacgtacacaaatactgtcactgggtattagtgctaatcttttttacttgtcctgacatcagattcagttctacacacatagaaacggacagaagatacatgaaactgaatacgtaaataatcaagcacatatagaacgtcgtggctgcaagagaagatcacaggctgtagttgacgtcgatgaagctgaggatctggtgcacggcgccggcgatgtcctccgccgagtaccttgcctcgccgacgatctatcac

SEQ ID NO: 72694 - DNA, 2564 bp, Zea Mays
cttcccacagattgttcgctcgctagctcgcacctggactcaacaggcgaagcacgcatgtttctatccctctgcggcaatgcttgcacagtgagctctgtggatttgcacctgtttttagctagtaccaggtgcagcgagccgtgcggcaattactctgcgcgttcctccgtccatggatatcgctttatccttcgtataattgtattgtcaaactggcacccaccggaatcatatagcctggataaccagcaagctgctctccgtctcctctcatcagtatgtatccagcttttaaaggtgataaatccaagattctgccagtaaagatgccgatctgtagctgtgaagaaactatccatgagttcgagatgttaacacgcgatgctgggcgtgtacagaaggatacactgaaaaagatcctcgagttgaatgctgatgctgaatatctgaacaagttcggcctcaatggcaggactgatgtagagagctacaaatcctgcatcccgctgtgtgtgcacagtgatcttgagccatacatccataagattgctgatggtgatagctccccactcctcactgggaagcccgtcacctccctttccctcagttctggtacaacgcagggaaggcctaagttcttgccgtttactgatgaattgcttgagaccacacttcaaatattccagacttcatatgcatttaggaaccgtgagtatccaattggaagaggaaaagccttgcagtttatctatggtagcaagcaagtggtaacaaaaggcggcatccttgccacaactgcaacaacaaacttgtaccggagggcacgatacaaggaggggatgaaggatatccagtctcaatgctgcagccctgatgaagttgtttttggctctgacttccaccagtccttgtattgtcacttgctctgtggtctaatatactctgatgaggtccatcaggtgttctcgacattcgctcacagcttagtccatgcatttcaaacatttgaggaggtttgggaagatctctgtgctgacataagagatggtgtcctctcagagaaagttacagtgccatcggttcgtgaagccgtgacaaaaatcctcaagcccaatcctgagctcgctgactcgatctataagaagtgtacgggcctgagcaactggtacggtgtaatcccagcactctggccaaacgcaaagtatgtgtacggtatcatgacagggtccatggaaccgtatttaaagaaactgaggcactatgctgggcacttgcctctgataagcgcagattacggcgcatctgaaggatgggttggtgctaatataaaccccacacttccacctgaacaggtgacatacgctgttctccctcagaccggttattttgagttcattcctttggaggtggagaatagtgcctcctccattcactacttagaatcagaaccagttggcctgactgaagttgaggttggcaaaacctacgaagtcgtgataactaccttcggaggtctataccgctaccggctaggagatatcgtgaaggtaacgggcttccacaacgcaacaccggagctccggttcatctgccgcagaagcctagtcctgagcatcaacatcgacaagaacaccgagcaagacctccagctggccgtcgaggaggcagcgaagctcctggacgcggagaagctggagatcgtcgatttcaccagcttcgtggagaagtcaagcgaccccggtcgctacgtcatcttctgggagctgagctccgacgcgagcgaggacgtcctgcgaggctgcgcgaactgcctggacctagccttcgtcgatgctgggtatgtgggctcgaggaagatcagagccatcggcccgctggagctgcggattctgaagaggggaaccttcaaggagatcctggatcacttcctgagcctcggtggcgccgtgagccagttcaagacgcctcggttcgtcaacccgttgaacgtcaaggttctgcagatactcagtaggaacaccaccagaagctacttcagtaccgcctatgggctctgataaataagaaacgctgctagtagttccatccatgtaattatatttatataaaaaaatattgcttcactgttctgttctagtctccaggtaaaagaaaacaatctactcatcctagtcctgctggcgccctgctagaatgtctgtaaatccatatgcaagcaaatgcattcagtctctgcctgtgttctgatctttgtgcatagcaagcaaatgcattcacagtctccactccagactccagagtagtagtacgtacacaaatactgtcactgggtattagtgctaatcttttttacttgtcctgacatcagattcagttctacacacatagaaacggacagaagatacatgaaactgaatacgtaaataatcaagcacatatagaacgtcgtggctgcaagagaagatcacaggctgtagttgacgtcgatgaagctgaggatctggtgcacggcgccggcgatgtcctccgccgagtaccttgcctcgccgacgatctatcac

SEQ ID NO: 72695 - DNA, 2324 bp, Zea Mays
tagctagtaccaggtgcagcgagccgtgcggcaattactctgcgcgttcctccgtccatggtgataaatccaagattctgccagtaaagatgccgatctgtagctgtgaagaaactatccatgagttcgagatgttaacacgcgatgctgggcgtgtacagaaggatacactgaaaaagatcctcgagttgaatgctgatgctgaatatctgaacaagttcggcctcaatggcaggactgatgtagagagctacaaatcctgcatcccgctgtgtgtgcacagtgatcttgagccatacatccataagattgctgatggtgatagctccccactcctcactgggaagcccgtcacctccctttccctcagttctggtacaacgcagggaaggcctaagttcttgccgtttactgatgaattgcttgagaccacacttcaaatattccagacttcatatgcatttaggaaccgtgagtatccaattggaagaggaaaagccttgcagtttatctatggtagcaagcaagtggtaacaaaaggcggcatccttgccacaactgcaacaacaaacttgtaccggagggcacgatacaaggaggggatgaaggatatccagtctcaatgctgcagccctgatgaagttgtttttggctctgacttccaccagtccttgtattgtcacttgctctgtggtctaatatactctgatgaggtccatcaggtgttctcgacattcgctcacagcttagtccatgcatttcaaacatttgaggaggtttgggaagatctctgtgctgacataagagatggtgtcctctcagagaaagttacagtgccatcggttcgtgaagccgtgacaaaaatcctcaagcccaatcctgagctcgctgactcgatctataagaagtgtacgggcctgagcaactggtacggtgtaatcccagcactctggccaaacgcaaagtatgtgtacggtatcatgacagggtccatggaaccgtatttaaagaaactgaggcactatgctgggcacttgcctctgataagcgcagattacggcgcatctgaaggatgggttggtgctaatataaaccccacacttccacctgaacaggtgacatacgctgttctccctcagaccggttattttgagttcattcctttggaggtggagaatagtgcctcctccattcactacttagaatcagaaccagttggcctgactgaagttgaggttggcaaaacctacgaagtcgtgataactaccttcggaggtctataccgctaccggctaggagatatcgtgaaggtaacgggcttccacaacgcaacaccggagctccggttcatctgccgcagaagcctagtcctgagcatcaacatcgacaagaacaccgagcaagacctccagctggccgtcgaggaggcagcgaagctcctggacgcggagaagctggagatcgtcgatttcaccagcttcgtggagaagtcaagcgaccccggtcgctacgtcatcttctgggagctgagctccgacgcgagcgaggacgtcctgcgaggctgcgcgaactgcctggacctagccttcgtcgatgctgggtatgtgggctcgaggaagatcagagccatcggcccgctggagctgcggattctgaagaggggaaccttcaaggagatcctggatcacttcctgagcctcggtggcgccgtgagccagttcaagacgcctcggttcgtcaacccgttgaacgtcaaggttctgcagatactcagtaggaacaccaccagaagctacttcagtaccgcctatgggctctgataaataagaaacgctgctagtagttccatccatgtaattatatttatataaaaaaatattgcttcactgttctgttctagtctccaggtaaaagaaaacaatctactcatcctagtcctgctggcgccctgctagaatgtctgtaaatccatatgcaagcaaatgcattcagtctctgcctgtgttctgatctttgtgcatagcaagcaaatgcattcacagtctccactccagactccagagtagtagtacgtacacaaatactgtcactgggtattagtgctaatcttttttacttgtcctgacatcagattcagttctacacacatagaaacggacagaagatacatgaaactgaatacgtaaataatcaagcacatatagaacgtcgtggctgcaagagaagatcacaggctgtagttgacgtcgatgaagctgaggatctggtgcacggcgccggcgatgtcctccgccgagtaccttgcctcgccgacgatctatcac

SEQ ID NO: 72696 - DNA, 2663 bp, Zea Mays
cccttctcttcacagcagcaccagcaacagcaccatgttcttggcttcttctttgtgcctcagggaccctacttaaatattccagctcaacagccaccagcatgtttttttccttcttctttttgggaaaccaaaaaaaccatccctatggatggttggccaagtatttcacgaaagaaatcatgtcaacaagaccgatgtgtaaagggcaggccgtgctagagtggtcactgcactggtggtaggttgtattgctagtccgagcaccgagagagtggatatcgctttatccttcgtataattgtattgtcaaactggcacccaccggaatcatatagcctggataaccagcaagctgctctccgtctcctctcatcagtatgtatccagcttttaaaggtgataaatccaagattctgccagtaaagatgccgatctgtagctgtgaagaaactatccatgagttcgagatgttaacacgcgatgctgggcgtgtacagaaggatacactgaaaaagatcctcgagttgaatgctgatgctgaatatctgaacaagttcggcctcaatggcaggactgatgtagagagctacaaatcctgcatcccgctgtgtgtgcacagtgatcttgagccatacatccataagattgctgatggtgatagctccccactcctcactgggaagcccgtcacctccctttccctcagttctggtacaacgcagggaaggcctaagttcttgccgtttactgatgaattgcttgagaccacacttcaaatattccagacttcatatgcatttaggaaccgtgagtatccaattggaagaggaaaagccttgcagtttatctatggtagcaagcaagtggtaacaaaaggcggcatccttgccacaactgcaacaacaaacttgtaccggagggcacgatacaaggaggggatgaaggatatccagtctcaatgctgcagccctgatgaagttgtttttggctctgacttccaccagtccttgtattgtcacttgctctgtggtctaatatactctgatgaggtccatcaggtgttctcgacattcgctcacagcttagtccatgcatttcaaacatttgaggaggtttgggaagatctctgtgctgacataagagatggtgtcctctcagagaaagttacagtgccatcggttcgtgaagccgtgacaaaaatcctcaagcccaatcctgagctcgctgactcgatctataagaagtgtacgggcctgagcaactggtacggtgtaatcccagcactctggccaaacgcaaagtatgtgtacggtatcatgacagggtccatggaaccgtatttaaagaaactgaggcactatgctgggcacttgcctctgataagcgcagattacggcgcatctgaaggatgggttggtgctaatataaaccccacacttccacctgaacaggtgacatacgctgttctccctcagaccggttattttgagttcattcctttggaggtggagaatagtgcctcctccattcactacttagaatcagaaccagttggcctgactgaagttgaggttggcaaaacctacgaagtcgtgataactaccttcggaggtctataccgctaccggctaggagatatcgtgaaggtaacgggcttccacaacgcaacaccggagctccggttcatctgccgcagaagcctagtcctgagcatcaacatcgacaagaacaccgagcaagacctccagctggccgtcgaggaggcagcgaagctcctggacgcggagaagctggagatcgtcgatttcaccagcttcgtggagaagtcaagcgaccccggtcgctacgtcatcttctgggagctgagctccgacgcgagcgaggacgtcctgcgaggctgcgcgaactgcctggacctagccttcgtcgatgctgggtatgtgggctcgaggaagatcagagccatcggcccgctggagctgcggattctgaagaggggaaccttcaaggagatcctggatcacttcctgagcctcggtggcgccgtgagccagttcaagacgcctcggttcgtcaacccgttgaacgtcaaggttctgcagatactcagtaggaacaccaccagaagctacttcagtaccgcctatgggctctgataaataagaaacgctgctagtagttccatccatgtaattatatttatataaaaaaatattgcttcactgttctgttctagtctccaggtaaaagaaaacaatctactcatcctagtcctgctggcgccctgctagaatgtctgtaaatccatatgcaagcaaatgcattcagtctctgcctgtgttctgatctttgtgcatagcaagcaaatgcattcacagtctccactccagactccagagtagtagtacgtacacaaatactgtcactgggtattagtgctaatcttttttacttgtcctgacatcagattcagttctacacacatagaaacggacagaagatacatgaaactgaatacgtaaataatcaagcacatatagaacgtcgtggctgcaagagaagatcacaggctgtagttgacgtcgatgaagctgaggatctggtgcacggcgccggcgatgtcctccgccgagtaccttgcctcgccgacgatctatcac

SEQ ID NO: 72697 - DNA, 1578 bp, Zea Mays
aggtcacgacgcccagtccccaaccaaccccaacagaagcccgctgcgctgcccaccgctcttccactccctcgccaccctgcgccaatgccggacccgacgagccgccgccactgcggacgcgggggaccatagcgccgaacgggacgcgctgctgcgtcgccccctccccgcgcctcacgtctgcactggccggccacgccagctaatcaagtccaggagtaccatttcctcttccggccacggtgggttctccgtttcaacggacctccggttcatggcgagcgaggcgaaggagatgaagtacaggaggaggggcagggttcccgggccgccggagcacgggcaacgcagcgaccggagcggcgcgctggactgggccgcgctcaagcacgaccccgcggagctgctccggaagctcgacgaggtacgggaccagatcacccgctcctgcgagctcatggggccgccgccgccggaccgccaccgcgcgatgagccgccgcacggtctcgctgcgcccctcgtacgccgagccgccgcacgcggcaggccgggcccccgaccactaccgctcgcgctacgccgaccgcaacaggactagcttgccgccgagctcgtatgaccaccggtcgcagcgctccgtacccgacgacgaggcgtactccaggcagccgttccggcagcagtactaccatgagaggcagcgggagagccacggctttggccacgggaggcgccaccatagctcctgccagtgcgcgcactgcctccagagccagcgggcgccggtggtggcgccgccgaaggaccacgtcccgatggccagaggagggtggagtatttcaggaaaaaggctgagaagttctgccggccgacgaggggcgccgcgccttttctcgtgtgcacctcctgttcccatctcctgcagctgccgcaggggaagttcgcaggccggaagaaggatcaggtccagtgcggttcttgttcagagatcattgctttggagcctaagcaagtgaaagttcatccggtgatcacgccaccgtctttcccagtatcaaaaggtgtcagaagtaaaggttccagtcaccgggacaccaagagttccgggtggtatcaacatcaggatgatgacaacttcaatttctataagccgcaagcacagaagaaggattttgctgacaatatgtcaccgtcttctaccgccagttatggtagaacagacagtgagcatgggtcaaacaggagcgttcagttaaaatcagtgcctgccagcaggtctagattttcaaatgacccaaaggatatattatgtcaaggagatacaggcggtcaagtggaagcttcaggacagtgtacagtcagtccacaaggtccaattttagtggacaaacaaatggatccgttctccagtcaatggaaagagaaagactatagtggtggaaaccaaatcataagaaaagaatgtgacataaataccaaatcagattatgaagccaacgctagaggtgaaagtctcggtaggaaatgcatacagaagagtaaagaaggtcgtaagggtgggtttgaagatgaa

SEQ ID NO: 72698 - DNA, 1977 bp, Zea Mays
atcattgctttggagcctaagcaagtgaaagttaatccggtgatcacgccaccgtctttcccagtatcaaaaggtgtcagaagtaaaggttccagtcaccgggacaccaagagttccgggtggtatcaacatcaggatgatgacaacttcaatttctataagccgcaagcacagaagaaggattttgctgacaatatgtcaccgtcttctaccgccagttatggtagaacagacagtgagcatgggtcaaacaggagcgttcagttaaaatcagtgcctgccagcaggtctagattttcaaatgacccaaaggatatattatgtcaaggagatacaggcggtcaagtggaagcttcaggacagtgtacagtcagtccacaaggtccaattttagtggacaaacaaatggatccgttctccagtcaatggaaagagaaagactatagtggtggaaaccaaatcataagaaaagaatgtgacataaataccaaatcagattatgaagccaacgctagaggtgaaagtctcggtaggaaatgcatacagaagagtaaagaaggtcgtaagggtgggtttgaagatgaattcagtaatggaagaacacatggacaaaaaggtagacacggtaacactgacagtcctgaagatggaatcgttggaaacaaatacaaacataaggccgatgatgttgttataagcagccttgaagataaagatatgagcattaagtatgaacataatggtagctttagatttgaggaacttagtaagagagatgaaaaatgcaacaaaaaggatgacaacaatattcttgaacttgagagcatagctaggggatgtgaacaggacagaatcaaagatgactgcggaaaactgctgcactcagatagtagaaatggcaacacggtggccaagaattattcatcagttaatgaacacacaaattcaagttctcttgtttcctctgtggccgaggtagatgatatacagtcttcagttggcaagaatggggattcatccttttttactggtttcctcaagaaaggtttaaaggacctttctttattcaaccagtctgtagacagtgctaaggtttatatcaacggtcatccaatctctgaacgagctctccggaaatcagagaagaaagttggtcctgttggccctggttcatattggtacgactaccgtgctggattttggggtgtcttcggacaagagtgtagaggcatcataccaccattcataaaagaattcaactatccaatgcccaagaactgcgctggtggtagcactggggttttcgtaaatgggagagagctccaccagaaagattttgatttgcttgtagggagagggctccctcgaatacctggaaagtcatattctgttgagatatcaggaagcgtgatcgacgatacgactggcacgaagctacgtggtcttggaaagcttgcacccacaatcgagaaaatgaaacgtggctttggcatgcacgtccccgaagagacaaagtagctctatggatacttttgttgatgcttctgttgaaagttttacacacctagaaagctgccaattaatgggagtccaggtttgttgatctgttaggattggtgacagcggtagaaaggctttcacgtcttgaagctcgacagcgatgcagcctccggacattgagagaagaaatggagagatgtcataactcatacgcattcgcatcatcctacttggaattaaatgtcgtgtttccatggtgacagctccggccggcggcatacagttcctgtctccctctcgtttgtaaaattcgccacaccgtaggtgctaggtagcattcggagcatgtatccgtttcgggtttgtgatacagtggcgcaactcttcggctatataaatgtacctagtactttgtaacatgttgtccagtatgcaacgacgcatcagatttgtatacctctcgaattcgagccagag

SEQ ID NO: 72699 - DNA, 2116 bp, Zea Mays
ggagtggacagtgacgggtgacgactgtgcctctgaatggatcctatcctacacaagtcatgggggccgccgccagctcacacacactgccgacgctgccgtgccactgccatcctcgagcacaagggaccgaccagacccgatccacagctcatcacacacacacacagtggcgagctcgtcaattgcaggcaagacagcaagcgcatttacacagcacgctgaaagccgggacgcagagcagcttttgcgccttgtcccctcctgctcgtcgcttccctcactctcacagccacgccacgccacgagagaagaatgccgccgacgctgggcctgctcctcgcggcggcggcggcggtcctgctgctgctgctgccgccgccaccatcggcgggggcgcaggagacgtgctggtcggggccggcgccgcggcgcggggcgtggatgtccgtggccagcttcggggcgcgcggggacgggcagacgctcaacacgggcgcgttcgcgcgcgccgtggcgcgcatcgcgcgtcgccggggcgcgcggggcggcacgctgctgtacgtgccgcccggggtgtggctcacgggccccttcaacctcacctcccacatgacgctcttcctcgcccgcggcgccatcgtccgcgccacccaggacacgtcgagctggccgctcatcgacccgctgccgtcgtacgggagagggcgcgagctgcctggcgggagatacatgagcttgatccacggccacggtctgcaggacgtcttcatcacaggtgagaacggcaccatcgacggccaaggcggcgtgtggtgggacatgtggaagaagcgcacgctgcccttcacgaggccgcacctgctggagctcatgtactccaccgacgtcgtcgtctccaacctcgtcttccaggactcgccgttctggaacatccacccggtttactgcagcaacgtagtgatagcaaacctgactgtgttggcgccgcacgactcccccaacaccgacgggatcgatctagattcaagcagcaacgtgtgcgtcgaggactgctacatctccgccggcgacgacctgatctccatcaagagcgggtgggacgagtacggcgtggccttcggccgcccaagctccggcatcacggtccggaggataaccgggtcgggcccgttcgccggcttcgcggtcgggagcgagacctcgggcggcgtggaggacgtcgtggccgagcacctgagcttctccggcgtgggcgtcggggttcacgtgaagacaaactcgggcaggggcggcttcatccggaacgtcaccgtctcccaggtgaccctggacggcgcccgctacggcctgaggatcgccggcgacgttgggggccaccccggcgcgtcctacaacgcgagcctgctccccgtcatcgacggcgtggcggtcaggaacgtctggggccggaacgtccggcaggccgggctcatacggggcatcagggactcggtcttcagtaacatttgcctctccaacgtgaagctctatggcattggcagcgactccatcgggccgtggagatgccgagccgtcagtggcagcgcactcgacgtgcaaccgtcgccatgtgcggagctggctagtacgtccgggacaggtttctgtacctgaatcagtttttccgcctcctatagcagcaataaagacgtcagcatttctccattttgttcatcacctacagggccctttgtttctttggcaaactcttctgcgattcagctgtcactgttgaattctgctgttggcagaggataatctatttttaccagcagccattgcaagagaattatttttacgtccgtgaaatggtgagaccgatcagcattgcacatcctggtgttggtgtaaccagatcccccactgccgtgtgggcgcgggacactgccggccccacacgcagtgaccggcactcacgggtaccatggacttgtttggaagcaaagagaataaaaaagatgagttgtatagtgtttaatgttccagaagaagagaaagagaagcttcttgtaacacccaaagtcttattttggaagactagtaaaattctcccaatatttttaagttaaaatat

SEQ ID NO: 72700 - DNA, 2081 bp, Zea Mays
ctcacacacactgccgacgctgccgtgccactgccatcctcgagcacaagggaccgaccagacccgatccacagctcatcacacacacacacagtggcgagctcgtcaattgcaggcaagacagcaagcgcatttacacagcacgctgaaagccgggacgcagagcagcttttgcgccttgtcccctcctgctcgtcgcttccctcactctcacagccacgccacgccacgagagaagaatgccgccgacgctgggcctgctcctcgcggcggcggcggcggtcctgctgctgctgctgccgccgccaccatcggcgggggcgcaggagacgtgctggtcggggccggcgccgcggcgcggggcgtggatgtccgtggccagcttcggggcgcgcggggacgggcagacgctcaacacgggcgcgttcgcgcgcgccgtggcgcgcatcgcgcgtcgccggggcgcgcggggcggcacgctgctgtacgtgccgcccggggtgtggctcacgggccccttcaacctcacctcccacatgacgctcttcctcgcccgcggcgccatcgtccgcgccacccagccatgccttgctaccatcgaactaataagtgagcaggacacgtcgagctggccgctcatcgacccgctgccgtcgtacgggagagggcgcgagctgcctggcgggagatacatgagcttgatccacggccacggtctgcaggacgtcttcatcacaggtgagaacggcaccatcgacggccaaggcggcgtgtggtgggacatgtggaagaagcgcacgctgcccttcacgaggccgcacctgctggagctcatgtactccaccgacgtcgtcgtctccaacctcgtcttccaggactcgccgttctggaacatccacccggtttactgcagcaacgtagtgatagcaaacctgactgtgttggcgccgcacgactcccccaacaccgacgggatcgatctaggtaagattcaagcagcaacgtgtgcgtcgaggactgctacatctccgccggcgacgacctgatctccatcaagagcgggtgggacgagtacggcgtggccttcggccgcccaagctccggcatcacggtccggaggataaccgggtcgggcccgttcgccggcttcgcggtcgggagcgagacctcgggcggcgtggaggacgtcgtggccgagcacctgagcttctccggcgtgggcgtcggggttcacgtgaagacaaactcgggcaggggcggcttcatccggaacgtcaccgtctcccaggtgaccctggacggcgcccgctacggcctgaggatcgccggcgacgttgggggccaccccggcgcgtcctacaacgcgagcctgctccccgtcatcgacggcgtggcggtcaggaacgtctggggccggaacgtccggcaggccgggctcatacggggcatcagggactcggtcttcagtaacatttgcctctccaacgtgaagctctatggcattggcagcgactccatcgggccgtggagatgccgagccgtcagtggcagcgcactcgacgtgcaaccgtcgccatgtgcggagctggctagtacgtccgggacaggtttctgtacctgaatcagtttttccgcctcctatagcagcaataaagacgtcagcatttctccattttgttcatcacctacagggccctttgtttctttggcaaactcttctgcgattcagctgtcactgttgaattctgctgttggcagaggataatctatttttaccagcagccattgcaagagaattatttttacgtccgtgaaatggtgagaccgatcagcattgcacatcctggtgttggtgtaaccagatcccccactgccgtgtgggcgcgggacactgccggccccacacgcagtgaccggcactcacgggtaccatggacttgtttggaagcaaagagaataaaaaagatgagttgtatagtgtttaatgttccagaagaagagaaagagaagcttcttgtaacacccaaagtcttattttggaagactagtaaaattctcccaatatttttaagttaaaatat

SEQ ID NO: 72701 - DNA, 1944 bp, Zea Mays
acgctgaaagccgggacgcagagcagcttttgcgccttgtcccctcctgctcgtcgcttccctcactctcacagccacgccacgccacgagagaagaatgccgccgacgctgggcctgctcctcgcggcggcggcggcggtcctgctgctgctgctgccgccgccaccatcggcgggggcgcaggagacgtgctggtcggggccggcgccgcggcgcggggcgtggatgtccgtggccagcttcggggcgcgcggggacgggcagacgctcaacacgggcgcgttcgcgcgcgccgtggcgcgcatcgcgcgtcgccggggcgcgcggggcggcacgctgctgtacgtgccgcccggggtgtggctcacgggccccttcaacctcacctcccacatgacgctcttcctcgcccgcggcgccatcgtccgcgccacccagccatgccttgctaccatcgaactaataagtgagcaggacacgtcgagctggccgctcatcgacccgctgccgtcgtacgggagagggcgcgagctgcctggcgggagatacatgagcttgatccacggccacggtctgcaggacgtcttcatcacaggtgagaacggcaccatcgacggccaaggcggcgtgtggtgggacatgtggaagaagcgcacgctgcccttcacgaggccgcacctgctggagctcatgtactccaccgacgtcgtcgtctccaacctcgtcttccaggactcgccgttctggaacatccacccggtttactgcagcaacgtagtgatagcaaacctgactgtgttggcgccgcacgactcccccaacaccgacgggatcgatctaggtaaggtaagattcaagcagcaacgtgtgcgtcgaggactgctacatctccgccggcgacgacctgatctccatcaagagcgggtgggacgagtacggcgtggccttcggccgcccaagctccggcatcacggtccggaggataaccgggtcgggcccgttcgccggcttcgcggtcgggagcgagacctcgggcggcgtggaggacgtcgtggccgagcacctgagcttctccggcgtgggcgtcggggttcacgtgaagacaaactcgggcaggggcggcttcatccggaacgtcaccgtctcccaggtgaccctggacggcgcccgctacggcctgaggatcgccggcgacgttgggggccaccccggcgcgtcctacaacgcgagcctgctccccgtcatcgacggcgtggcggtcaggaacgtctggggccggaacgtccggcaggccgggctcatacggggcatcagggactcggtcttcagtaacatttgcctctccaacgtgaagctctatggcattggcagcgactccatcgggccgtggagatgccgagccgtcagtggcagcgcactcgacgtgcaaccgtcgccatgtgcggagctggctagtacgtccgggacaggtttctgtacctgaatcagtttttccgcctcctatagcagcaataaagacgtcagcatttctccattttgttcatcacctacagggccctttgtttctttggcaaactcttctgcgattcagctgtcactgttgaattctgctgttggcagaggataatctatttttaccagcagccattgcaagagaattatttttacgtccgtgaaatggtgagaccgatcagcattgcacatcctggtgttggtgtaaccagatcccccactgccgtgtgggcgcgggacactgccggccccacacgcagtgaccggcactcacgggtaccatggacttgtttggaagcaaagagaataaaaaagatgagttgtatagtgtttaatgttccagaagaagagaaagagaagcttcttgtaacacccaaagtcttattttggaagactagtaaaattctcccaatatttttaagttaaaatat

SEQ ID NO: 72702 - DNA, 2408 bp, Zea Mays
ggcgagtccagttcaccgtccctccctgtccttgccatggccatccccaccgcccccgccctcctcttcccctccgttctccctaactcattcccccgccggacaccctggcgacacctcgtccggcggcaaccgcgtcacctccgcgcgggccgcccgcgcctgcaggcgccggcgccggctcctcccccggtggcggaggtcgcggcggagcgggacgacacgcctccgctcaggctgctcgagccgccgcaggaggacgaccccttcccgcccgagatggagcccgcggaccctgatttctaccggataggatatgcgcggatgatgcgcgcctatgggatcgagttcctcgaaggccccgacgggatgggcgtctacgcttcccgggacgtggagccacttcgcagagctagactggacgtccatcaccacaccagttagtgtttggatgcagcacctgtgaatctgtgattgggtgggaaactcacatgagaataactggtcaaggacgttgttcgtgtgtagtaactgttagattatatttacactatatttagtaggtagtatacattaccactggaagtcaatggcttatgttaattgcctaattgttatttgctacatacttgctgtcaccaaaaaatatggcatctatagttataacacatgtttgctcgcagtcgcattaagctcacgaaatgccagacccatgtgttgaattcttcatcttgatgcatgctatagacctgtagtacgatggtcttgttcaaaagaattatatgatattcttggcatgctgaaactgtttgtataacatatttggttcttttcgttcgcaatgatgagcaatgttattgaaagatgtgctgatgttgctttcttttccaggtgattatggagattccgttggagctgatgctgactataactcaaaagaaaccttggatgtttttccctgacattattccactaggccatcctatatttgatgttatcgagtcaacagatccagagacagattgggatctaagattagcatgtcttcttctatatgcatttgatatagaagacaacttttggcagttatattctgattttttgccaagtgttgatgaatgcactagtttgctgctggcaccaaaggaagatctaatggaactagaagatgaagatcttgcttcacaaatgttaaaacaccaggaacgagcaattgacttttggcaaaagcattgggacaaaccaattcctctaaagctgaaacgccttgcacgtgaccatgagagatttctctgggcactgagtatagtacagtctcgttctgtcaacttgaagttgagaatgggagccttcatccaagatgcaaatgtgctagctccttatgctgatatgttgaaccactcacccaatgctaattgcttcctgcattggcgttttaaagaccgtatgcttgaagttatgattaaggctggacaagctatcaagaaaggagacgagatgacgatagattatatgagtggcgtcaacagcaaatttatggaaagatatgggttctcatcaccaacgaatccttgggagctcataaatttctcgagtcctgcaacaattcacatggattccttcttatcggtcttcaatatcgctggcttgcatgatgagctgtaccacaattctgcattgacctcagtagtagaaaccgactttgtggacggagcagtcgtagcagcagccagagcattgccgacatggtcagatggtgatgttcctgcaattcctagtgtggagagaaaatctgctcaggcactgcaagaggagtgccgccaaatgttggattcattcccaactaccatcgaacaagaccagcagatcctagattccgatgcgcatatcagcaaaacccgagaaattgcgatcaagtatcgtctgcaccggaagatgctcctacagaaaatcatggacgcactggacatatatcaggatagaattctgttctagctgtagaggcggcgctacctgtgctcatttagagcacagaacgagtgcccagttctactgctagtaaacctggggccattgtagaaaggggattttgtagggcagcctttcagttcatagcgtctgtaggttaacagcagaggatcccagaaggaaatcaacattaggataggctggttgccaggaaatatagctgctgtaagttcaagtcagcaagctgccatgtaacttgtttgcacagggcggcaatctgtcatagccacctgcatatctctcaggctcagcttcacaacaacttgcactgctgaaagaaatggcctgtgggctgtgtcctgtcacctgtgtgtgtgaaatactatccatatgattggttggccgcatcgctttgtcctgaaccactgtatgcattgatt

SEQ ID NO: 72703 - DNA, 1781 bp, Zea Mays
cgagtccagttcaccgtccctccctgtccttgccatggccatccccaccgcccccgccctcctcttcccctccgttctccctaactcattcccccgccggacaccctggcgacacctcgtccggcggcaaccgcgtcacctccgcgcgggccgcccgcgcctgcaggcgccggcgccggctcctcccccggtggcggaggtcgcggcggagcgggacgacacgcctccgctcaggctgctcgagccgccgcaggaggacgaccccttcccgcccgagatggagcccgcggaccctgatttctaccggataggatatgcgcggatgatgcgcgcctatgggatcgagttcctcgaaggccccgacgggatgggcgtctacgcttcccgggacgtggagccacttcgcagagctagagtgattatggagattccgttggagctgatgctgactataactcaaaagaaaccttggatgtttttccctgacattattccactaggccatcctatatttgatgttatcgagtcaacagatccagagacagattgggatctaagattagcatgtcttcttctatatgcatttgatatagaagacaacttttggcagttatattctgattttttgccaagtgttgatgaatgcactagtttgctgctggcaccaaaggaagatctaatggaactagaagatgaagatcttgcttcacaaatgttaaaacaccaggaacgagcaattgacttttggcaaaagcattggatatgttgaaccactcacccaatgctaattgcttcctgcattggcgttttaaagaccgtatgcttgaagttatgattaaggctggacaagctatcaagaaaggagacgagatgacgatagattatatgagtggcgtcaacagcaaatttatggaaagatatgggttctcatcaccaacgaatccttgggagctcataaatttctcgagtcctgcaacaattcacatggattccttcttatcggtcttcaatatcgctggcttgcatgatgagctgtaccacaattctgcattgacctcagtagtagaaaccgactttgtggacggagcagtcgtagcagcagccagagcattgccgacatggtcagatggtgatgttcctgcaattcctagtgtggagagaaaatctgctcaggcactgcaagaggagtgccgccaaatgttggattcattcccaactaccatcgaacaagaccagcagatcctagattccgatgcgcatatcagcaaaacccgagaaattgcgatcaagtatcgtctgcaccggaagatgctcctacagaaaatcatggacgcactggacatatatcaggatagaattctgttctagctgtagaggcggcgctacctgtgctcatttagagcacagaacgagtgcccagttctactgctagtaaacctggggccattgtagaaaggggattttgtagggcagcctttcagttcatagcgtctgtaggttaacagcagaggatcccagaaggaaatcaacattaggataggctggttgccaggaaatatagctgctgtaagttcaagtcagcaagctgccatgtaacttgtttgcacagggcggcaatctgtcatagccacctgcatatctctcaggctcagcttcacaacaacttgcactgctgaaagaaatggcctgtgggctgtgtcctgtcacctgtgtgtgtgaaatactatccatatgattggttggccgcatcgctttgtcctgaaccactgtatgcattgatt

SEQ ID NO: 72704 - DNA, 1999 bp, Zea Mays
cgagtccagttcaccgtccctccctgtccttgccatggccatccccaccgcccccgccctcctcttcccctccgttctccctaactcattcccccgccggacaccctggcgacacctcgtccggcggcaaccgcgtcacctccgcgcgggccgcccgcgcctgcaggcgccggcgccggctcctcccccggtggcggaggtcgcggcggagcgggacgacacgcctccgctcaggctgctcgagccgccgcaggaggacgaccccttcccgcccgagatggagcccgcggaccctgatttctaccggataggatatgcgcggatgatgcgcgcctatgggatcgagttcctcgaaggccccgacgggatgggcgtctacgcttcccgggacgtggagccacttcgcagagctagagtgagacacttcattcaacaattctcctcttgtccaagtccaaccactagctaccgatcaatttgaggtgattatggagattccgttggagctgatgctgactataactcaaaagaaaccttggatgtttttccctgacattattccactaggccatcctatatttgatgttatcgagtcaacagatccagagacagattgggatctaagattagcatgtcttcttctatatgcatttgatatagaagacaacttttggcagttatattctgattttttgccaagtgttgatgaatgcactagtttgctgctggcaccaaaggaagatctaatggaactagaagatgaagatcttgcttcacaaatgttaaaacaccaggaacgagcaattgacttttggcaaaagcattgggacaaaccaattcctctaaagctgaaacgccttgcacgtgaccatgagagatttctctgggcactgagtatagtacagtctcgttctgtcaacttgaagttgagaatgggagccttcatccaagatgcaaatgtgctagctccttatgctgatatgttgaaccactcacccaatgctaattgcttcctgcattggcgttttaaagaccgtatgcttgaagttatgattaaggctggacaagctatcaagaaaggagacgagatgacgatagattatatgagtggcgtcaacagcaaatttatggaaagatatgggttctcatcaccaacgaatccttgggagctcataaatttctcgagtcctgcaacaattcacatggattccttcttatcggtcttcaatatcgctggcttgcatgatgagctgtaccacaattctgcattgacctcagtagtagaaaccgactttgtggacggagcagtcgtagcagcagccagagcattgccgacatggtcagatggtgatgttcctgcaattcctagtgtggagagaaaatctgctcaggcactgcaagaggagtgccgccaaatgttggattcattcccaactaccatcgaacaagaccagcagatcctagattccgatgcgcatatcagcaaaacccgagaaattgcgatcaagtatcgtctgcaccggaagatgctcctacagaaaatcatggacgcactggacatatatcaggatagaattctgttctagctgtagaggcggcgctacctgtgctcatttagagcacagaacgagtgcccagttctactgctagtaaacctggggccattgtagaaaggggattttgtagggcagcctttcagttcatagcgtctgtaggttaacagcagaggatcccagaaggaaatcaacattaggataggctggttgccaggaaatatagctgctgtaagttcaagtcagcaagctgccatgtaacttgtttgcacagggcggcaatctgtcatagccacctgcatatctctcaggctcagcttcacaacaacttgcactgctgaaagaaatggcctgtgggctgtgtcctgtcacctgtgtgtgtgaaatactatccatatgattggttggccgcatcgctttgtcctgaaccactgtatgcattgatt

SEQ ID NO: 72705 - DNA, 1935 bp, Zea Mays
cgagtccagttcaccgtccctccctgtccttgccatggccatccccaccgcccccgccctcctcttcccctccgttctccctaactcattcccccgccggacaccctggcgacacctcgtccggcggcaaccgcgtcacctccgcgcgggccgcccgcgcctgcaggcgccggcgccggctcctcccccggtggcggaggtcgcggcggagcgggacgacacgcctccgctcaggctgctcgagccgccgcaggaggacgaccccttcccgcccgagatggagcccgcggaccctgatttctaccggataggatatgcgcggatgatgcgcgcctatgggatcgagttcctcgaaggccccgacgggatgggcgtctacgcttcccgggacgtggagccacttcgcagagctagagtgattatggagattccgttggagctgatgctgactataactcaaaagaaaccttggatgtttttccctgacattattccactaggccatcctatatttgatgttatcgagtcaacagatccagagacagattgggatctaagattagcatgtcttcttctatatgcatttgatatagaagacaacttttggcagttatattctgattttttgccaagtgttgatgaatgcactagtttgctgctggcaccaaaggtatcaaaaagctaacggaaagaagatctaatggaactagaagatgaagatcttgcttcacaaatgttaaaacaccaggaacgagcaattgacttttggcaaaagcattggatatgttgaaccactcacccaatgctaattgcttcctgcattggcgttttaaagaccgtatgcttgaagttatgattaaggctggacaagctatcaagaaaggagacgagatgacgatagattatatgagtggcgtcaacagcaaatttatggaaagatatgggttctcatcaccaacgaatccttgggagctcataaatttctcgagtcctgcaacaattcacatggattccttcttatcggtcttcaatatcgctggcttgcatgatgagctgtaccacaattctgcattgacctcagtagtagaaaccgactttgtggacggagcagtcgtagcagcagccagagcattgccgacatggtcagatggtgatgttcctgcaattcctagtgtggagagaaaatctgctcaggcactgcaagaggagtgccgccaaatgttggattcattcccaactaccatcgaacaagaccagcagatcctagattccgatgcgcatatcagcaaaacccgagaaattgcgatcaagtaggtgaactacctatttgttatgatgggctagtgattgatttgtgtgtatatatgtttttactctgggactgcttgtggataattttttgaaagtaggttgttgagttaccttctttcattctatgcgcaggtatcgtctgcaccggaagatgctcctacagaaaatcatggacgcactggacatatatcaggatagaattctgttctagctgtagaggcggcgctacctgtgctcatttagagcacagaacgagtgcccagttctactgctagtaaacctggggccattgtagaaaggggattttgtagggcagcctttcagttcatagcgtctgtaggttaacagcagaggatcccagaaggaaatcaacattaggataggctggttgccaggaaatatagctgctgtaagttcaagtcagcaagctgccatgtaacttgtttgcacagggcggcaatctgtcatagccacctgcatatctctcaggctcagcttcacaacaacttgcactgctgaaagaaatggcctgtgggctgtgtcctgtcacctgtgtgtgtgaaatactatccatatgattggttggccgcatcgctttgtcctgaaccactgtatgcattgatt

SEQ ID NO: 72706 - DNA, 2078 bp, Zea Mays
cgagtccagttcaccgtccctccctgtccttgccatggccatccccaccgcccccgccctcctcttcccctccgttctccctaactcattcccccgccggacaccctggcgacacctcgtccggcggcaaccgcgtcacctccgcgcgggccgcccgcgcctgcaggcgccggcgccggctcctcccccggtggcggaggtcgcggcggagcgggacgacacgcctccgctcaggctgctcgagccgccgcaggaggacgaccccttcccgcccgagatggagcccgcggaccctgatttctaccggataggatatgcgcggatgatgcgcgcctatgggatcgagttcctcgaaggccccgacgggatgggcgtctacgcttcccgggacgtggagccacttcgcagagctagactggacgtccatcaccacaccagttagtgtttggatgcagcacctgtgaatctgtgattgggtgggaaactcacatgagaataactggtcaaggacgttgttcgtgtgtagtaactgttagattatatttacactatatttagtaggtgattatggagattccgttggagctgatgctgactataactcaaaagaaaccttggatgtttttccctgacattattccactaggccatcctatatttgatgttatcgagtcaacagatccagagacagattgggatctaagattagcatgtcttcttctatatgcatttgatatagaagacaacttttggcagttatattctgattttttgccaagtgttgatgaatgcactagtttgctgctggcaccaaaggaagatctaatggaactagaagatgaagatcttgcttcacaaatgttaaaacaccaggaacgagcaattgacttttggcaaaagcattgggacaaaccaattcctctaaagctgaaacgccttgcacgtgaccatgagagatttctctgggcactgagtatagtacagtctcgttctgtcaacttgaagttgagaatgggagccttcatccaagatgcaaatgtgctagctccttatgctgatatgttgaaccactcacccaatgctaattgcttcctgcattggcgttttaaagaccgtatgcttgaagttatgattaaggctggacaagctatcaagaaaggagacgagatgacgatagattatatgagtggcgtcaacagcaaatttatggaaagatatgggttctcatcaccaacgaatccttgggagctcataaatttctcgagtcctgcaacaattcacatggattccttcttatcggtcttcaatatcgctggcttgcatgatgagctgtaccacaattctgcattgacctcagtagtagaaaccgactttgtggacggagcagtcgtagcagcagccagagcattgccgacatggtcagatggtgatgttcctgcaattcctagtgtggagagaaaatctgctcaggcactgcaagaggagtgccgccaaatgttggattcattcccaactaccatcgaacaagaccagcagatcctagattccgatgcgcatatcagcaaaacccgagaaattgcgatcaagtatcgtctgcaccggaagatgctcctacagaaaatcatggacgcactggacatatatcaggatagaattctgttctagctgtagaggcggcgctacctgtgctcatttagagcacagaacgagtgcccagttctactgctagtaaacctggggccattgtagaaaggggattttgtagggcagcctttcagttcatagcgtctgtaggttaacagcagaggatcccagaaggaaatcaacattaggataggctggttgccaggaaatatagctgctgtaagttcaagtcagcaagctgccatgtaacttgtttgcacagggcggcaatctgtcatagccacctgcatatctctcaggctcagcttcacaacaacttgcactgctgaaagaaatggcctgtgggctgtgtcctgtcacctgtgtgtgtgaaatactatccatatgattggttggccgcatcgctttgtcctgaaccactgtatgcattgatt

SEQ ID NO: 72707 - DNA, 1848 bp, Zea Mays
cgagtccagttcaccgtccctccctgtccttgccatggccatccccaccgcccccgccctcctcttcccctccgttctccctaactcattcccccgccggacaccctggcgacacctcgtccggcggcaaccgcgtcacctccgcgcgggccgcccgcgcctgcaggcgccggcgccggctcctcccccggtggcggaggtcgcggcggagcgggacgacacgcctccgctcaggctgctcgagccgccgcaggaggacgaccccttcccgcccgagatggagcccgcggaccctgatttctaccggataggatatgcgcggatgatgcgcgcctatgggatcgagttcctcgaaggccccgacgggatgggcgtctacgcttcccgggacgtggagccacttcgcagagctagagtgagacacttcattcaacaattctcctcttgtccaagtccaaccactagctaccgatcaatttgaggtgattatggagattccgttggagctgatgctgactataactcaaaagaaaccttggatgtttttccctgacattattccactaggccatcctatatttgatgttatcgagtcaacagatccagagacagattgggatctaagattagcatgtcttcttctatatgcatttgatatagaagacaacttttggcagttatattctgattttttgccaagtgttgatgaatgcactagtttgctgctggcaccaaaggaagatctaatggaactagaagatgaagatcttgcttcacaaatgttaaaacaccaggaacgagcaattgacttttggcaaaagcattggatatgttgaaccactcacccaatgctaattgcttcctgcattggcgttttaaagaccgtatgcttgaagttatgattaaggctggacaagctatcaagaaaggagacgagatgacgatagattatatgagtggcgtcaacagcaaatttatggaaagatatgggttctcatcaccaacgaatccttgggagctcataaatttctcgagtcctgcaacaattcacatggattccttcttatcggtcttcaatatcgctggcttgcatgatgagctgtaccacaattctgcattgacctcagtagtagaaaccgactttgtggacggagcagtcgtagcagcagccagagcattgccgacatggtcagatggtgatgttcctgcaattcctagtgtggagagaaaatctgctcaggcactgcaagaggagtgccgccaaatgttggattcattcccaactaccatcgaacaagaccagcagatcctagattccgatgcgcatatcagcaaaacccgagaaattgcgatcaagtatcgtctgcaccggaagatgctcctacagaaaatcatggacgcactggacatatatcaggatagaattctgttctagctgtagaggcggcgctacctgtgctcatttagagcacagaacgagtgcccagttctactgctagtaaacctggggccattgtagaaaggggattttgtagggcagcctttcagttcatagcgtctgtaggttaacagcagaggatcccagaaggaaatcaacattaggataggctggttgccaggaaatatagctgctgtaagttcaagtcagcaagctgccatgtaacttgtttgcacagggcggcaatctgtcatagccacctgcatatctctcaggctcagcttcacaacaacttgcactgctgaaagaaatggcctgtgggctgtgtcctgtcacctgtgtgtgtgaaatactatccatatgattggttggccgcatcgctttgtcctgaaccactgtatgcattgatt

SEQ ID NO: 72708 - DNA, 2255 bp, Zea Mays
cgagtccagttcaccgtccctccctgtccttgccatggccatccccaccgcccccgccctcctcttcccctccgttctccctaactcattcccccgccggacaccctggcgacacctcgtccggcggcaaccgcgtcacctccgcgcgggccgcccgcgcctgcaggcgccggcgccggctcctcccccggtggcggaggtcgcggcggagcgggacgacacgcctccgctcaggctgctcgagccgccgcaggaggacgaccccttcccgcccgagatggagcccgcggaccctgatttctaccggataggatatgcgcggatgatgcgcgcctatgggatcgagttcctcgaaggccccgacgggatgggcgtctacgcttcccgggacgtggagccacttcgcagagctagactggacgtccatcaccacaccagttagtgtttggatgcagcacctgtgaatctgtgattgggtgggaaactcacatgagaataactggtcaaggacgttgttcgtgtgtagtaactgttagattatatttacactatatttagtaggtagtatacattaccactggaagtcaatggcttatgttaattgcctaattgttatttgctacatacttgctgtcaccaaaaaatatggcatctatagttataacacatgtttgctcgcagtcgcattaagctcacgaaatgccagacccatgtgttgaattcttcatcttgatgcatgctatagacctgtagtacgatggtcttgttcaaaagaattatatgatattcttggcatgctgaaactgtttgtataacatatttggttcttttcgttcgcaatgatgagcaatgttattgaaagatgtgctgatgttgctttcttttccaggtgattatggagattccgttggagctgatgctgactataactcaaaagaaaccttggatgtttttccctgacattattccactaggccatcctatatttgatgttatcgagtcaacagatccagagacagattgggatctaagattagcatgtcttcttctatatgcatttgatatagaagacaacttttggcagttatattctgattttttgccaagtgttgatgaatgcactagtttgctgctggcaccaaaggaagatctaatggaactagaagatgaagatcttgcttcacaaatgttaaaacaccaggaacgagcaattgacttttggcaaaagcattggatatgttgaaccactcacccaatgctaattgcttcctgcattggcgttttaaagaccgtatgcttgaagttatgattaaggctggacaagctatcaagaaaggagacgagatgacgatagattatatgagtggcgtcaacagcaaatttatggaaagatatgggttctcatcaccaacgaatccttgggagctcataaatttctcgagtcctgcaacaattcacatggattccttcttatcggtcttcaatatcgctggcttgcatgatgagctgtaccacaattctgcattgacctcagtagtagaaaccgactttgtggacggagcagtcgtagcagcagccagagcattgccgacatggtcagatggtgatgttcctgcaattcctagtgtggagagaaaatctgctcaggcactgcaagaggagtgccgccaaatgttggattcattcccaactaccatcgaacaagaccagcagatcctagattccgatgcgcatatcagcaaaacccgagaaattgcgatcaagtatcgtctgcaccggaagatgctcctacagaaaatcatggacgcactggacatatatcaggatagaattctgttctagctgtagaggcggcgctacctgtgctcatttagagcacagaacgagtgcccagttctactgctagtaaacctggggccattgtagaaaggggattttgtagggcagcctttcagttcatagcgtctgtaggttaacagcagaggatcccagaaggaaatcaacattaggataggctggttgccaggaaatatagctgctgtaagttcaagtcagcaagctgccatgtaacttgtttgcacagggcggcaatctgtcatagccacctgcatatctctcaggctcagcttcacaacaacttgcactgctgaaagaaatggcctgtgggctgtgtcctgtcacctgtgtgtgtgaaatactatccatatgattggttggccgcatcgctttgtcctgaaccactgtatgcattgatt

SEQ ID NO: 72709 - DNA, 1472 bp, Zea Mays
ccaggctccagctcacagagactggcagtgggcagtgggaccaccgcgtgccgttgccggaggaaggaacaccaagccaaaggcgatgggcctgcactgtttgtcgtccttcctacaactgatgagagtcaccaaccaaaccaaggagaaggagatgccgagcgagcgtgggactggaattcgtgcttgccaagcaagcaacaggcctgggctggccagagcgtgcttgagttgagctccacgatctgggcctgcatctccacgaccgtctcctgagctgctgcctcactcagcttcgcgggagagcccgggcagttcgagtgctgctggaacgctgctgctccgtgaggaagggtcttcttcgagccggtcgggcactcgggcgacggtatgggactcgaaggtgcttgcttcatctccactccaccatctgcatgccgaagccatcccttcaccccagtggcgaatctgcacttctgcagtgactctacttcaagttgatttagatataggacttgaaggttctgatgagcaggggtataggcaacagaaaatcacctgacaatggcagctagtttgtttggtcactaaaactgtagaggttggagtgcagctcacataccccaggcctccttttggctgcaatttcgcgcagtcagcactccacagcgaagcagtttaaggaacatggaaagatgatacggcaacgactgctatgcaagcagtccttctatgcaagcgtgcaatcaaatcatctgatccattagattatgatccaaccacagacacaactatagtttgttagaggtttttttataaagattattaagctgatggtgaaagggttaaatatgaccaacggttcgattacgatctaatgaatcagattatttgtttgcacacctgtacagaacgactgcttgcatagcagtcgttgccagatgatacgggttacactccaaatggataaataaacccagacctttggcacaagggtcttgctgcttggtcacaaacagctgcttcaatgtgcaccgagtctgactgaaagcgtgctaagcaagatgccggtcaggcaggctccagtcgcccggaagacgccgcctccacctgcgcgcctccctggtccctccccacggccggaaggttcccctttcccgcggccgctcgcctcccgccgcgtcgaccgtacgcttcggaggctacggacctgctgcaacgtccgcagtggccactggccgcgccgccgcctggcgtgaagtgtgcgaggcgagcggagtgagggtcgcgggattcggatttcagatcggtcacgtgagacgtgagacgtgagagcggagtgaaggctgcccgttgcagcctgtagaactagccctaaaaagactagtttgggatttcagtttacattttggcttcatttatttatccagaacaattggtggcaggaaattctataaagattagttcgggaa

SEQ ID NO: 72710 - DNA, 2503 bp, Zea Mays
atggctggcatcgggcatctccactcccactccaccggccccacctccgcgaggggcgacccgagaacaccaccacgcccgccatgtggcgccgcctccaaaccctagccccctcgctccgccgcgccgccgcatcgtcgtccccggcctccgcccgcgccgtgcccttgtccacggtgccggtggccgcgttccggcgcacttcgaccctcctctcctctcccggcgacaagccggcgcccagcaaggtcgaggatgtcatgccgatcgccacggggctggagcgcgaggagctcgaggcggagctccaggggaagaagcggtttgacatggatcctgccgtcggccccttcggtactaaggttggtttctcgagaagcaatgattgcattttttgtgggacggagagagtagtttcttcctcaagctgagtcctgttaggactgtgaagttaggtaattattggtactttttagaattaattatgtcaaaaaaaacttttgctgtgtccatggctattgttcacctgatctgctctgtggtctttggctagttgaacgtgttgtagtctagtttgttattaagacagccatttcgtggtacaaaatgtcatcatgttagaggccccagtgttcaatgtttaccagtctgctcattagttgtcatttacattgaagtctgtggcttcttttactccctctgtcctaaaatagtattcgttttagctctcggtttttactccctccgttccataatctgcctcgtctaagcaatttttttttgcagattccgttttcttcgtcgtatttgtatttgctgcttcattgaatgtgcatgctgcttggttcccaataaaaactgaagcagtgcgtttgtttattctctctgcatggctgcatgctcctctcccaaacgttcaccttggcacaagagacgatgcataccggatagaaataactcattccttggtcactgtgctcgactactataagatggagattttagaaaggagggagtatgtctatattcaatggataatgaatttagacacatataaaacacatacatcaagtattgtatgaatctattaattttctaaaacgagttttaatttgggactgatggagtacctttttaagtgatgggcccaagatatctaacaaattatgagtcacttgtagtatctgttcctactgcttgatttattgacaggaactcttttgtgtatgttacgtggaaacttgaaagttttactgttgtatgacccatttatcaattgttgtgtgcagattaaacttgtgctaagcacaagtaatgacacaatatttcactccagtatggacatggctttaagtaaaaaagacccaccagatacatctcttgttactgatattaatatcgtaaactacaaagtatttgatatgtgcatgcttaagctgcattacctgaagcttgtttcaaatacaccagcagtcagccagccgtacatgaaattcgtagggtatgtttataactgccttgtcacttgggagcattgcgttaaatatcagtgtttgatgtatctggtgcttctattcttcaaccgtaggcatgccctcacatccatgctgagtactgacattgcctgtatttggtctagatatgtgttgaagttcttgaccactcacttcccttctgttttttttctttccagacttcctatgctgcaagatctcaattgttctggacaatataaagtactaccttaagaaaacaagtataataccaaaaaaacactaaacaacaggggcacacttttcacttgtttgtggttatgctattcctaaattttctaattttcaatcaattgatgcacccagcttctatgcataccctgtgctgactactgacattgtgtgcgcttttagtgaagagatgtaggatttcttgatcactctctccccttggttttgcataccactctttgtgctgcaagattgtccatttgttaattttgaatgtattgtctgcacgaggaatcagccgtgattgaatcctactataacaagagaatagttggctgccctggtgccgaaggagaggatgaacacgatgtcgtctggttttggttggaaaaggataaaccgcatgagtgcctagtctgctcacgctcaaggtcattggtgatgggggtgatccagatggccacgatgacgaggatgatcatcactgaggccttgtgtcgataatgataataagaactttgtgaaacatggttttgtcctatctttgcagcatcagactgccctatagagtattgtaattgataagtgtttgaccatgaaccaggtcgggtggtgttttacacctacgaattttgttcagatcttttcgaccatacggttgcttctgtttggaatatagatttttttttctggagtgcaacatcaaataaaggatgagtgcatcggtttcactctattgaccatctatttttgggttatattttgttcctgattggatg

SEQ ID NO: 72711 - DNA, 2172 bp, Zea Mays
atggctggcatcgggcatctccactcccactccaccggccccacctccgcgaggggcgacccgagaacaccaccacgcccgccatgtggcgccgcctccaaaccctagccccctcgctccgccgcgccgccgcatcgtcgtccccggcctccgcccgcgccgtgcccttgtccacggtgccggtggccgcgttccggcgcacttcgaccctcctctcctctcccggcgacaagccggcgcccagcaaggtcgaggatgtcatgccgatcgccacggggctggagcgcgaggagctcgaggcggagctccaggggaagaagcggtttgacatggatcctgccgtcggccccttcggtactaaggttggtttctcgagaagcaatgattgcattttttgtgggacggagagagtagtttcttcctcaagctgagtcctgttaggactgtgaagttagattccgttttcttcgtcgtatttgtatttgctgcttcattgaatgtgcatgctgcttggttcccaataaaaactgaagcagtgcgtttgtttattctctctgcatggctgcatgctcctctcccaaacgttcaccttggcacaagagacgatgcataccggatagaaataactcattccttggtcactgtgctcgactactataagatggagattttagaaaggagggagtatgtctatattcaatggataatgaatttagacacatataaaacacatacatcaagtattgtatgaatctattaattttctaaaacgagttttaatttgggactgatggagtacctttttaagtgatgggcccaagatatctaacaaattatgagtcacttgtagtatctgttcctactgcttgatttattgacaggaactcttttgtgtatgttacgtggaaacttgaaagttttactgttgtatgacccatttatcaattgttgtgtgcagattaaacttgtgctaagcacaagtaatgacacaatatttcactccagtatggacatggctttaagtaaaaaagacccaccagatacatctcttgttactgatattaatatcgtaaactacaaagtatttgatatgtgcatgcttaagctgcattacctgaagcttgtttcaaatacaccagcagtcagccagccgtacatgaaattcgtagggtatgtttataactgccttgtcacttgggagcattgcgttaaatatcagtgtttgatgtatctggtgcttctattcttcaaccgtaggcatgccctcacatccatgctgagtactgacattgcctgtatttggtctagatatgtgttgaagttcttgaccactcacttcccttctgttttttttctttccagacttcctatgctgcaagatctcaattgttctggacaatataaagtactaccttaagaaaacaagtataataccaaaaaaacactaaacaacaggggcacacttttcacttgtttgtggttatgctattcctaaattttctaattttcaatcaattgatgcacccagcttctatgcataccctgtgctgactactgacattgtgtgcgcttttagtgaagagatgtaggatttcttgatcactctctccccttggttttgcataccactctttgtgctgcaagattgtccatttgttaattttgaatgtattgtctgcacgaggaatcagccgtgattgaatcctactataacaagagaatagttggctgccctggtgccgaaggagaggatgaacacgatgtcgtctggttttggttggaaaaggataaaccgcatgagtgcctagtctgctcacgctcaaggtcattggtgatgggggtgatccagatggccacgatgacgaggatgatcatcactgaggccttgtgtcgataatgataataagaactttgtgaaacatggttttgtcctatctttgcagcatcagactgccctatagagtattgtaattgataagtgtttgaccatgaaccaggtcgggtggtgttttacacctacgaattttgttcagatcttttcgaccatacggttgcttctgtttggaatatagatttttttttctggagtgcaacatcaaataaaggatgagtgcatcggtttcactctattgaccatctatttttgggttatattttgttcctgattggatg

SEQ ID NO: 72712 - DNA, 2089 bp, Zea Mays
atggctggcatcgggcatctccactcccactccaccggccccacctccgcgaggggcgacccgagaacaccaccacgcccgccatgtggcgccgcctccaaaccctagccccctcgctccgccgcgccgccgcatcgtcgtccccggcctccgcccgcgccgtgcccttgtccacggtgccggtggccgcgttccggcgcacttcgaccctcctctcctctcccggcgacaagccggcgcccagcaaggtcgaggatgtcatgccgatcgccacggggctggagcgcgaggagctcgaggcggagctccaggggaagaagcggtttgacatggatcctgccgtcggccccttcggtactaagattccgttttcttcgtcgtatttgtatttgctgcttcattgaatgtgcatgctgcttggttcccaataaaaactgaagcagtgcgtttgtttattctctctgcatggctgcatgctcctctcccaaacgttcaccttggcacaagagacgatgcataccggatagaaataactcattccttggtcactgtgctcgactactataagatggagattttagaaaggagggagtatgtctatattcaatggataatgaatttagacacatataaaacacatacatcaagtattgtatgaatctattaattttctaaaacgagttttaatttgggactgatggagtacctttttaagtgatgggcccaagatatctaacaaattatgagtcacttgtagtatctgttcctactgcttgatttattgacaggaactcttttgtgtatgttacgtggaaacttgaaagttttactgttgtatgacccatttatcaattgttgtgtgcagattaaacttgtgctaagcacaagtaatgacacaatatttcactccagtatggacatggctttaagtaaaaaagacccaccagatacatctcttgttactgatattaatatcgtaaactacaaagtatttgatatgtgcatgcttaagctgcattacctgaagcttgtttcaaatacaccagcagtcagccagccgtacatgaaattcgtagggtatgtttataactgccttgtcacttgggagcattgcgttaaatatcagtgtttgatgtatctggtgcttctattcttcaaccgtaggcatgccctcacatccatgctgagtactgacattgcctgtatttggtctagatatgtgttgaagttcttgaccactcacttcccttctgttttttttctttccagacttcctatgctgcaagatctcaattgttctggacaatataaagtactaccttaagaaaacaagtataataccaaaaaaacactaaacaacaggggcacacttttcacttgtttgtggttatgctattcctaaattttctaattttcaatcaattgatgcacccagcttctatgcataccctgtgctgactactgacattgtgtgcgcttttagtgaagagatgtaggatttcttgatcactctctccccttggttttgcataccactctttgtgctgcaagattgtccatttgttaattttgaatgtattgtctgcacgaggaatcagccgtgattgaatcctactataacaagagaatagttggctgccctggtgccgaaggagaggatgaacacgatgtcgtctggttttggttggaaaaggataaaccgcatgagtgcctagtctgctcacggtactttgtgctcaaggtcattggtgatgggggtgatccagatggccacgatgacgaggatgatcatcactgaggccttgtgtcgataatgataataagaactttgtgaaacatggttttgtcctatctttgcagcatcagactgccctatagagtattgtaattgataagtgtttgaccatgaaccaggtcgggtggtgttttacacctacgaattttgttcagatcttttcgaccatacggttgcttctgtttggaatatagatttttttttctggagtgcaacatcaaataaaggatgagtgcatcggtttcactctattgaccatctatttttgggttatattttgttcctgattggatg

SEQ ID NO: 72713 - DNA, 2804 bp, Zea Mays
atggctggcatcgggcatctccactcccactccaccggccccacctccgcgaggggcgacccgagaacaccaccacgcccgccatgtggcgccgcctccaaaccctagccccctcgctccgccgcgccgccgcatcgtcgtccccggcctccgcccgcgccgtgcccttgtccacggtgccggtggccgcgttccggcgcacttcgaccctcctctcctctcccggcgacaagccggcgcccagcaaggtcgaggatgtcatgccgatcgccacggggctggagcgcgaggagctcgaggcggagctccaggggaagaagcggtttgacatggatcctgccgtcggccccttcggtactaaggtgaggtgcccctgcttttgcgacttagctcagagcctcggactctaggggatcacgtcaggtgtttggtgtcgtgcagagaaatttgcacaagtacttgctccgtcctagaaagaatgcaattatgggaaccgtcccagtgaaactagctcaagtttgaccaaattatagtaaataatattaacatgtatatctccaaataagtttatcatgaaaatatattttgtaattagttcagttatacttaatttgtaccataaatattattgtttttatataattttagtcaaatttcaaataggttggtttctcgagaagcaatgattgcattttttgtgggacggagagagtagtttcttcctcaagctgagtcctgttaggactgtgaagttaggtaattattggtactttttagaattaattatgtcaaaaaaaacttttgctgtgtccatggctattgttcacctgatctgctctgtggtctttggctagttgaacgtgttgtagtctagtttgttattaagacagccatttcgtggtacaaaatgtcatcatgttagaggccccagtgttcaatgtttaccagtctgctcattagttgtcatttacattgaagtctgtggcttcttttactccctctgtcctaaaatagtattcgttttagctctcggtttttactccctccgttccataatctgcctcgtctaagcaatttttttttgcagattccgttttcttcgtcgtatttgtatttgctgcttcattgaatgtgcatgctgcttggttcccaataaaaactgaagcagtgcgtttgtttattctctctgcatggctgcatgctcctctcccaaacgttcaccttggcacaagagacgatgcataccggatagaaataactcattccttggtcactgtgctcgactactataagatggagattttagaaaggagggagtatgtctatattcaatggataatgaatttagacacatataaaacacatacatcaagtattgtatgaatctattaattttctaaaacgagttttaatttgggactgatggagtacctttttaagtgatgggcccaagatatctaacaaattatgagtcacttgtagtatctgttcctactgcttgatttattgacaggaactcttttgtgtatgttacgtggaaacttgaaagttttactgttgtatgacccatttatcaattgttgtgtgcagattaaacttgtgctaagcacaagtaatgacacaatatttcactccagtatggacatggctttaagtaaaaaagacccaccagatacatctcttgttactgatattaatatcgtaaactacaaagtatttgatatgtgcatgcttaagctgcattacctgaagcttgtttcaaatacaccagcagtcagccagccgtacatgaaattcgtagggtatgtttataactgccttgtcacttgggagcattgcgttaaatatcagtgtttgatgtatctggtgcttctattcttcaaccgtaggcatgccctcacatccatgctgagtactgacattgcctgtatttggtctagatatgtgttgaagttcttgaccactcacttcccttctgttttttttctttccagacttcctatgctgcaagatctcaattgttctggacaatataaagtactaccttaagaaaacaagtataataccaaaaaaacactaaacaacaggggcacacttttcacttgtttgtggttatgctattcctaaattttctaattttcaatcaattgatgcacccagcttctatgcataccctgtgctgactactgacattgtgtgcgcttttagtgaagagatgtaggatttcttgatcactctctccccttggttttgcataccactctttgtgctgcaagattgtccatttgttaattttgaatgtattgtctgcacgaggaatcagccgtgattgaatcctactataacaagagaatagttggctgccctggtgccgaaggagaggatgaacacgatgtcgtctggttttggttggaaaaggataaaccgcatgagtgcctagtctgctcacgctcaaggtcattggtgatgggggtgatccagatggccacgatgacgaggatgatcatcactgaggccttgtgtcgataatgataataagaactttgtgaaacatggttttgtcctatctttgcagcatcagactgccctatagagtattgtaattgataagtgtttgaccatgaaccaggtcgggtggtgttttacacctacgaattttgttcagatcttttcgaccatacggttgcttctgtttggaatatagatttttttttctggagtgcaacatcaaataaaggatgagtgcatcggtttcactctattgaccatctatttttgggttatattttgttcctgattggatg

SEQ ID NO: 72714 - DNA, 853 bp, Zea Mays
atggctggcatcgggcatctccactcccactccaccggccccacctccgcgaggggcgacccgagaacaccaccacgcccgccatgtggcgccgcctccaaaccctagccccctcgctccgccgcgccgccgcatcgtcgtccccggcctccgcccgcgccgtgcccttgtccacggtgccggtggccgcgttccggcgcacttcgaccctcctctcctctcccggcgacaagccggcgcccagcaaggtcgaggatgtcatgccgatcgccacggggctggagcgcgaggagctcgaggcggagctccaggggaagaagcggtttgacatggatcctgccgtcggccccttcggtactaagccgtgattgaatcctactataacaagagaatagttggctgccctggtgccgaaggagaggatgaacacgatgtcgtctggttttggttggaaaaggataaaccgcatgagtgcctagtctgctcacggtactttgtgctcaaggtcattggtgatgggggtgatccagatggccacgatgacgaggatgatcatcactgaggccttgtgtcgataatgataataagaactttgtgaaacatggttttgtcctatctttgcagcatcagactgccctatagagtattgtaattgataagtgtttgaccatgaaccaggtcgggtggtgttttacacctacgaattttgttcagatcttttcgaccatacggttgcttctgtttggaatatagatttttttttctggagtgcaacatcaaataaaggatgagtgcatcggtttcactctattgaccatctatttttgggttatattttgttcctgattggatg

SEQ ID NO: 72715 - DNA, 968 bp, Zea Mays
atggctggcatcgggcatctccactcccactccaccggccccacctccgcgaggggcgacccgagaacaccaccacgcccgccatgtggcgccgcctccaaaccctagccccctcgctccgccgcgccgccgcatcgtcgtccccggcctccgcccgcgccgtgcccttgtccacggtgccggtggccgcgttccggcgcacttcgaccctcctctcctctcccggcgacaagccggcgcccagcaaggtcgaggatgtcatgccgatcgccacggggctggagcgcgaggagctcgaggcggagctccaggggaagaagcggtttgacatggatcctgccgtcggccccttcggtactaagtgaagagatgtaggatttcttgatcactctctccccttggttttgcataccactctttgtgctgcaagattgtccatttgttaattttgaatgtattgtctgcacgaggaatcagccgtgattgaatcctactataacaagagaatagttggctgccctggtgccgaaggagaggatgaacacgatgtcgtctggttttggttggaaaaggataaaccgcatgagtgcctagtctgctcacggtactttgtgctcaaggtcattggtgatgggggtgatccagatggccacgatgacgaggatgatcatcactgaggccttgtgtcgataatgataataagaactttgtgaaacatggttttgtcctatctttgcagcatcagactgccctatagagtattgtaattgataagtgtttgaccatgaaccaggtcgggtggtgttttacacctacgaattttgttcagatcttttcgaccatacggttgcttctgtttggaatatagatttttttttctggagtgcaacatcaaataaaggatgagtgcatcggtttcactctattgaccatctatttttgggttatattttgttcctgattggatg

SEQ ID NO: 72716 - DNA, 860 bp, Zea Mays
atggctggcatcgggcatctccactcccactccaccggccccacctccgcgaggggcgacccgagaacaccaccacgcccgccatgtggcgccgcctccaaaccctagccccctcgctccgccgcgccgccgcatcgtcgtccccggcctccgcccgcgccgtgcccttgtccacggtgccggtggccgcgttccggcgcacttcgaccctcctctcctctcccggcgacaagccggcgcccagcaaggtcgaggatgtcatgccgatcgccacggggctggagcgcgaggagctcgaggcggagctccaggggaagaagcggtttgacatggatcctgccgtcggccccttcggtactaaggaatcagccgtgattgaatcctactataacaagagaatagttggctgccctggtgccgaaggagaggatgaacacgatgtcgtctggttttggttggaaaaggataaaccgcatgagtgcctagtctgctcacggtactttgtgctcaaggtcattggtgatgggggtgatccagatggccacgatgacgaggatgatcatcactgaggccttgtgtcgataatgataataagaactttgtgaaacatggttttgtcctatctttgcagcatcagactgccctatagagtattgtaattgataagtgtttgaccatgaaccaggtcgggtggtgttttacacctacgaattttgttcagatcttttcgaccatacggttgcttctgtttggaatatagatttttttttctggagtgcaacatcaaataaaggatgagtgcatcggtttcactctattgaccatctatttttgggttatattttgttcctgattggatg

SEQ ID NO: 72717 - DNA, 2814 bp, Zea Mays
atggctggcatcgggcatctccactcccactccaccggccccacctccgcgaggggcgacccgagaacaccaccacgcccgccatgtggcgccgcctccaaaccctagccccctcgctccgccgcgccgccgcatcgtcgtccccggcctccgcccgcgccgtgcccttgtccacggtgccggtggccgcgttccggcgcacttcgaccctcctctcctctcccggcgacaagccggcgcccagcaaggtcgaggatgtcatgccgatcgccacggggctggagcgcgaggagctcgaggcggagctccaggggaagaagcggtttgacatggatcctgccgtcggccccttcggtactaaggtgaggtgcccctgcttttgcgacttagctcagagcctcggactctaggggatcacgtcaggtgtttggtgtcgtgcagagaaatttgcacaagtacttgctccgtcctagaaagaatgcaattatgggaaccgtcccagtgaaactagctcaagtttgaccaaattatagtaaataatattaacatgtatatctccaaataagtttatcatgaaaatatattttgtaattagttcagttatacttaatttgtaccataaatattattgtttttatataattttagtcaaatttcaaataggttggtttctcgagaagcaatgattgcattttttgtgggacggagagagtagtttcttcctcaagctgagtcctgttaggactgtgaagttaggtaattattggtactttttagaattaattatgtcaaaaaaaacttttgctgtgtccatggctattgttcacctgatctgctctgtggtctttggctagttgaacgtgttgtagtctagtttgttattaagacagccatttcgtggtacaaaatgtcatcatgttagaggccccagtgttcaatgtttaccagtctgctcattagttgtcatttacattgaagtctgtggcttcttttactccctctgtcctaaaatagtattcgttttagctctcggtttttactccctccgttccataatctgcctcgtctaagcaatttttttttgcagattccgttttcttcgtcgtatttgtatttgctgcttcattgaatgtgcatgctgcttggttcccaataaaaactgaagcagtgcgtttgtttattctctctgcatggctgcatgctcctctcccaaacgttcaccttggcacaagagacgatgcataccggatagaaataactcattccttggtcactgtgctcgactactataagatggagattttagaaaggagggagtatgtctatattcaatggataatgaatttagacacatataaaacacatacatcaagtattgtatgaatctattaattttctaaaacgagttttaatttgggactgatggagtacctttttaagtgatgggcccaagatatctaacaaattatgagtcacttgtagtatctgttcctactgcttgatttattgacaggaactcttttgtgtatgttacgtggaaacttgaaagttttactgttgtatgacccatttatcaattgttgtgtgcagattaaacttgtgctaagcacaagtaatgacacaatatttcactccagtatggacatggctttaagtaaaaaagacccaccagatacatctcttgttactgatattaatatcgtaaactacaaagtatttgatatgtgcatgcttaagctgcattacctgaagcttgtttcaaatacaccagcagtcagccagccgtacatgaaattcgtagggtatgtttataactgccttgtcacttgggagcattgcgttaaatatcagtgtttgatgtatctggtgcttctattcttcaaccgtaggcatgccctcacatccatgctgagtactgacattgcctgtatttggtctagatatgtgttgaagttcttgaccactcacttcccttctgttttttttctttccagacttcctatgctgcaagatctcaattgttctggacaatataaagtactaccttaagaaaacaagtataataccaaaaaaacactaaacaacaggggcacacttttcacttgtttgtggttatgctattcctaaattttctaattttcaatcaattgatgcacccagcttctatgcataccctgtgctgactactgacattgtgtgcgcttttagtgaagagatgtaggatttcttgatcactctctccccttggttttgcataccactctttgtgctgcaagattgtccatttgttaattttgaatgtattgtctgcacgaggaatcagccgtgattgaatcctactataacaagagaatagttggctgccctggtgccgaaggagaggatgaacacgatgtcgtctggttttggttggaaaaggataaaccgcatgagtgcctagtctgctcacggtactttgtgctcaaggtcattggtgatgggggtgatccagatggccacgatgacgaggatgatcatcactgaggccttgtgtcgataatgataataagaactttgtgaaacatggttttgtcctatctttgcagcatcagactgccctatagagtattgtaattgataagtgtttgaccatgaaccaggtcgggtggtgttttacacctacgaattttgttcagatcttttcgaccatacggttgcttctgtttggaatatagatttttttttctggagtgcaacatcaaataaaggatgagtgcatcggtttcactctattgaccatctatttttgggttatattttgttcctgattggatg

SEQ ID NO: 72718 - DNA, 2182 bp, Zea Mays
atggctggcatcgggcatctccactcccactccaccggccccacctccgcgaggggcgacccgagaacaccaccacgcccgccatgtggcgccgcctccaaaccctagccccctcgctccgccgcgccgccgcatcgtcgtccccggcctccgcccgcgccgtgcccttgtccacggtgccggtggccgcgttccggcgcacttcgaccctcctctcctctcccggcgacaagccggcgcccagcaaggtcgaggatgtcatgccgatcgccacggggctggagcgcgaggagctcgaggcggagctccaggggaagaagcggtttgacatggatcctgccgtcggccccttcggtactaaggttggtttctcgagaagcaatgattgcattttttgtgggacggagagagtagtttcttcctcaagctgagtcctgttaggactgtgaagttagattccgttttcttcgtcgtatttgtatttgctgcttcattgaatgtgcatgctgcttggttcccaataaaaactgaagcagtgcgtttgtttattctctctgcatggctgcatgctcctctcccaaacgttcaccttggcacaagagacgatgcataccggatagaaataactcattccttggtcactgtgctcgactactataagatggagattttagaaaggagggagtatgtctatattcaatggataatgaatttagacacatataaaacacatacatcaagtattgtatgaatctattaattttctaaaacgagttttaatttgggactgatggagtacctttttaagtgatgggcccaagatatctaacaaattatgagtcacttgtagtatctgttcctactgcttgatttattgacaggaactcttttgtgtatgttacgtggaaacttgaaagttttactgttgtatgacccatttatcaattgttgtgtgcagattaaacttgtgctaagcacaagtaatgacacaatatttcactccagtatggacatggctttaagtaaaaaagacccaccagatacatctcttgttactgatattaatatcgtaaactacaaagtatttgatatgtgcatgcttaagctgcattacctgaagcttgtttcaaatacaccagcagtcagccagccgtacatgaaattcgtagggtatgtttataactgccttgtcacttgggagcattgcgttaaatatcagtgtttgatgtatctggtgcttctattcttcaaccgtaggcatgccctcacatccatgctgagtactgacattgcctgtatttggtctagatatgtgttgaagttcttgaccactcacttcccttctgttttttttctttccagacttcctatgctgcaagatctcaattgttctggacaatataaagtactaccttaagaaaacaagtataataccaaaaaaacactaaacaacaggggcacacttttcacttgtttgtggttatgctattcctaaattttctaattttcaatcaattgatgcacccagcttctatgcataccctgtgctgactactgacattgtgtgcgcttttagtgaagagatgtaggatttcttgatcactctctccccttggttttgcataccactctttgtgctgcaagattgtccatttgttaattttgaatgtattgtctgcacgaggaatcagccgtgattgaatcctactataacaagagaatagttggctgccctggtgccgaaggagaggatgaacacgatgtcgtctggttttggttggaaaaggataaaccgcatgagtgcctagtctgctcacggtactttgtgctcaaggtcattggtgatgggggtgatccagatggccacgatgacgaggatgatcatcactgaggccttgtgtcgataatgataataagaactttgtgaaacatggttttgtcctatctttgcagcatcagactgccctatagagtattgtaattgataagtgtttgaccatgaaccaggtcgggtggtgttttacacctacgaattttgttcagatcttttcgaccatacggttgcttctgtttggaatatagatttttttttctggagtgcaacatcaaataaaggatgagtgcatcggtttcactctattgaccatctatttttgggttatattttgttcctgattggatg

SEQ ID NO: 72719 - DNA, 1027 bp, Zea Mays
atggctggcatcgggcatctccactcccactccaccggccccacctccgcgaggggcgacccgagaacaccaccacgcccgccatgtggcgccgcctccaaaccctagccccctcgctccgccgcgccgccgcatcgtcgtccccggcctccgcccgcgccgtgcccttgtccacggtgccggtggccgcgttccggcgcacttcgaccctcctctcctctcccggcgacaagccggcgcccagcaaggtcgaggatgtcatgccgatcgccacggggctggagcgcgaggagctcgaggcggagctccaggggaagaagcggtttgacatggatcctgccgtcggccccttcggtactaaggttggtttctcgagaagcaatgattgcattttttgtgggacggagagagtagtttcttcctcaagctgagtcctgttaggactgtgaagttagccgtgattgaatcctactataacaagagaatagttggctgccctggtgccgaaggaggtacatcaaggctaaccatatatgtcagtacctagtgttgagtatgtaactcaccataactgtgcttatttttccatcgtgcttattgcagaggatgaacacgatgtcgtctggttttggttggaaaaggataaaccgcatgagtgcctagtctgctcacgctcaaggtcattggtgatgggggtgatccagatggccacgatgacgaggatgatcatcactgaggccttgtgtcgataatgataataagaactttgtgaaacatggttttgtcctatctttgcagcatcagactgccctatagagtattgtaattgataagtgtttgaccatgaaccaggtcgggtggtgttttacacctacgaattttgttcagatcttttcgaccatacggttgcttctgtttggaatatagatttttttttctggagtgcaacatcaaataaaggatgagtgcatcggtttcactctattgaccatctatttttgggttatattttgttcctgattggatg

SEQ ID NO: 72720 - DNA, 1760 bp, Zea Mays
atggctggcatcgggcatctccactcccactccaccggccccacctccgcgaggggcgacccgagaacaccaccacgcccgccatgtggcgccgcctccaaaccctagccccctcgctccgccgcgccgccgcatcgtcgtccccggcctccgcccgcgccgtgcccttgtccacggtgccggtggccgcgttccggcgcacttcgaccctcctctcctctcccggcgacaagccggcgcccagcaaggtcgaggatgtcatgccgatcgccacggggctggagcgcgaggagctcgaggcggagctccaggggaagaagcggtttgacatggatcctgccgtcggccccttcggtactaaggttggtttctcgagaagcaatgattgcattttttgtgggacggagagagtagtttcttcctcaagctgagtcctgttaggactgtgaagttagattaaacttgtgctaagcacaagtaatgacacaatatttcactccagtatggacatggctttaagtaaaaaagacccaccagatacatctcttgttactgatattaatatcgtaaactacaaagtatttgatatgtgcatgcttaagctgcattacctgaagcttgtttcaaatacaccagcagtcagccagccgtacatgaaattcgtagggtatgtttataactgccttgtcacttgggagcattgcgttaaatatcagtgtttgatgtatctggtgcttctattcttcaaccgtaggcatgccctcacatccatgctgagtactgacattgcctgtatttggtctagatatgtgttgaagttcttgaccactcacttcccttctgttttttttctttccagacttcctatgctgcaagatctcaattgttctggacaatataaagtactaccttaagaaaacaagtataataccaaaaaaacactaaacaacaggggcacacttttcacttgtttgtggttatgctattcctaaattttctaattttcaatcaattgatgcacccagcttctatgcataccctgtgctgactactgacattgtgtgcgcttttagtgaagagatgtaggatttcttgatcactctctccccttggttttgcataccactctttgtgctgcaagattgtccatttgttaattttgaatgtattgtctgcacgaggaatcagccgtgattgaatcctactataacaagagaatagttggctgccctggtgccgaaggaggtacatcaaggctaaccatatatgtcagtacctagtgttgagtatgtaactcaccataactgtgcttatttttccatcgtgcttattgcagaggatgaacacgatgtcgtctggttttggttggaaaaggataaaccgcatgagtgcctagtctgctcacgctcaaggtcattggtgatgggggtgatccagatggccacgatgacgaggatgatcatcactgaggccttgtgtcgataatgataataagaactttgtgaaacatggttttgtcctatctttgcagcatcagactgccctatagagtattgtaattgataagtgtttgaccatgaaccaggtcgggtggtgttttacacctacgaattttgttcagatcttttcgaccatacggttgcttctgtttggaatatagatttttttttctggagtgcaacatcaaataaaggatgagtgcatcggtttcactctattgaccatctatttttgggttatattttgttcctgattggatg

SEQ ID NO: 72721 - DNA, 2079 bp, Zea Mays
atggctggcatcgggcatctccactcccactccaccggccccacctccgcgaggggcgacccgagaacaccaccacgcccgccatgtggcgccgcctccaaaccctagccccctcgctccgccgcgccgccgcatcgtcgtccccggcctccgcccgcgccgtgcccttgtccacggtgccggtggccgcgttccggcgcacttcgaccctcctctcctctcccggcgacaagccggcgcccagcaaggtcgaggatgtcatgccgatcgccacggggctggagcgcgaggagctcgaggcggagctccaggggaagaagcggtttgacatggatcctgccgtcggccccttcggtactaagattccgttttcttcgtcgtatttgtatttgctgcttcattgaatgtgcatgctgcttggttcccaataaaaactgaagcagtgcgtttgtttattctctctgcatggctgcatgctcctctcccaaacgttcaccttggcacaagagacgatgcataccggatagaaataactcattccttggtcactgtgctcgactactataagatggagattttagaaaggagggagtatgtctatattcaatggataatgaatttagacacatataaaacacatacatcaagtattgtatgaatctattaattttctaaaacgagttttaatttgggactgatggagtacctttttaagtgatgggcccaagatatctaacaaattatgagtcacttgtagtatctgttcctactgcttgatttattgacaggaactcttttgtgtatgttacgtggaaacttgaaagttttactgttgtatgacccatttatcaattgttgtgtgcagattaaacttgtgctaagcacaagtaatgacacaatatttcactccagtatggacatggctttaagtaaaaaagacccaccagatacatctcttgttactgatattaatatcgtaaactacaaagtatttgatatgtgcatgcttaagctgcattacctgaagcttgtttcaaatacaccagcagtcagccagccgtacatgaaattcgtagggtatgtttataactgccttgtcacttgggagcattgcgttaaatatcagtgtttgatgtatctggtgcttctattcttcaaccgtaggcatgccctcacatccatgctgagtactgacattgcctgtatttggtctagatatgtgttgaagttcttgaccactcacttcccttctgttttttttctttccagacttcctatgctgcaagatctcaattgttctggacaatataaagtactaccttaagaaaacaagtataataccaaaaaaacactaaacaacaggggcacacttttcacttgtttgtggttatgctattcctaaattttctaattttcaatcaattgatgcacccagcttctatgcataccctgtgctgactactgacattgtgtgcgcttttagtgaagagatgtaggatttcttgatcactctctccccttggttttgcataccactctttgtgctgcaagattgtccatttgttaattttgaatgtattgtctgcacgaggaatcagccgtgattgaatcctactataacaagagaatagttggctgccctggtgccgaaggagaggatgaacacgatgtcgtctggttttggttggaaaaggataaaccgcatgagtgcctagtctgctcacgctcaaggtcattggtgatgggggtgatccagatggccacgatgacgaggatgatcatcactgaggccttgtgtcgataatgataataagaactttgtgaaacatggttttgtcctatctttgcagcatcagactgccctatagagtattgtaattgataagtgtttgaccatgaaccaggtcgggtggtgttttacacctacgaattttgttcagatcttttcgaccatacggttgcttctgtttggaatatagatttttttttctggagtgcaacatcaaataaaggatgagtgcatcggtttcactctattgaccatctatttttgggttatattttgttcctgattggatg

SEQ ID NO: 72722 - DNA, 946 bp, Zea Mays
atggctggcatcgggcatctccactcccactccaccggccccacctccgcgaggggcgacccgagaacaccaccacgcccgccatgtggcgccgcctccaaaccctagccccctcgctccgccgcgccgccgcatcgtcgtccccggcctccgcccgcgccgtgcccttgtccacggtgccggtggccgcgttccggcgcacttcgaccctcctctcctctcccggcgacaagccggcgcccagcaaggtcgaggatgtcatgccgatcgccacggggctggagcgcgaggagctcgaggcggagctccaggggaagaagcggtttgacatggatcctgccgtcggccccttcggtactaaggttggtttctcgagaagcaatgattgcattttttgtgggacggagagagtagtttcttcctcaagctgagtcctgttaggactgtgaagttagccgtgattgaatcctactataacaagagaatagttggctgccctggtgccgaaggagaggatgaacacgatgtcgtctggttttggttggaaaaggataaaccgcatgagtgcctagtctgctcacggtactttgtgctcaaggtcattggtgatgggggtgatccagatggccacgatgacgaggatgatcatcactgaggccttgtgtcgataatgataataagaactttgtgaaacatggttttgtcctatctttgcagcatcagactgccctatagagtattgtaattgataagtgtttgaccatgaaccaggtcgggtggtgttttacacctacgaattttgttcagatcttttcgaccatacggttgcttctgtttggaatatagatttttttttctggagtgcaacatcaaataaaggatgagtgcatcggtttcactctattgaccatctatttttgggttatattttgttcctgattggatg

SEQ ID NO: 72723 - DNA, 2190 bp, Zea Mays
cggactccgttcaccggctgcaatctcttctcccgttcgccccgcgctctccttctctctctctctcgtggcgcaactgggtggccgccgccctacgccaggtgcctttgccggtcttcgtcgggccggttgccggcgacgagcacccaccaggtatgcgctacgcagtgcgcatgccttctcgtcccttcttgctgtgcgagtgcgaagccgagcaccacgaaccctaattcaatacagattgcgagctattggttgaacatgtgtacaccaatgtcgccatggatggggcggctgcgctctcaccacgcgacccctcaaagttttcccaagaggaggcccccttcccagaccaagaacccggaggagaaagaggagctccaaacatggaagaagcatactgcccgcaagaagaccgcgagaggtcgccacgctggagctgctgcacagcagcccagggcgttcttacgtgggtcttcgcggctcgctggaagagactatgagcatccgattatgatagacgatgatgtaaacgaggaatgtaaatccagggctgatcaatcagcaattacacctctccgcagatccccacgattccatctggaagataaaagtttgagcaagtcactgttgccaccaaatcgctgtgagacctctcctaacagaaagactaaaaatgctcatagaaaagacaaaaatcaagagagcctgaaagggaataggggaagtgctggatttcctcctaggaaagatatttcagatgtatctaacaaaaagagtgacaagcaagagttaaagcccatccattgtaaagtgcaaacaggaaagaggaagagaggaacagaaaggaggttgttatcgaagaagcaaagttgccaggaccctggaccattgcctgcgtatcgccaagaaattgcatcttgcaatgaatccagaaaatccacccacagaaggattgaaaatgacccttctaccgaggtgaagcttaaagttggtgatgtgagattggcaaacattgatgaaaacatcaacaagcccagtgggactcagagagaaggaatagaaattttttgtggtcctgatgattggacaaaagagcaggacatggcattgcgcaaagcttacttcagtgcccgaccatccccacatttctggaagagggtttcaaaaatgggagatctgctgaagattgcttcaacagaatttatactgacctctcaacaccgactccaattgccccacgtcccagagcaagtaaaacaacattttctcctataggaaatttcacattgtctgatccaaaacctccaaatatcttggaacctacagttggaatgcgaaagtccgctaaacagaagagtctagtagcacagaagacagtgaggcatttgttgcagaaacattgccgcattgaccaagctcaagaggctgaccacttctcagtttttgaaagctcaccaagtgccttacaattgaacttatcttttgacaattctcctgggactcctgacagttatatgaattcagattctctaggcaagcacagtggaaggtcttcagcacgaaagaaaccattttcaaggttaagaactaaaccatctgaacccagcccaggagttctaaagcctataaagaatgttatcctacatgagaggtacattgataaattggcacgtagagaaggcgcaaaaaggcctcgcagaagggctccagctggctctaaagctgctgattctgggaagtctctttctgagcagcaagctggtagtctgaaggctgctaaaaatgctctcatctcagaagcaaccgacttcataagcagttttaagacgcttcaagccaattcgcttgcgcatgctgtggagaatagtgaagacgagattgaatgtgatgccagtgattgtagccatgatgataaagaataagaatgtccttatagtcttgattcccagcggcccttagcaatcatctcctttttgtcaactaacgttagtcatcacttatcagttgtcagctgatgttagtcagcacttatcagctgcaataaggctaggcagttgtcagggcagtgtattctgcctaatatgatgtatctagttttgttcctcttagtgcatcagagatgttagttagttgtgaaatgttgccttcgtcatgccttatgaagattgaaatcactggagattacaa

SEQ ID NO: 72724 - DNA, 2057 bp, Zea Mays
cggactccgttcaccggctgcaatctcttctcccgttcgccccgcgctctccttctctctctctctcgtggcgcaactgggtggccgccgccctacgccaggtgcctttgccggtcttcgtcgggccggttgccggcgacgagcacccaccagagctattggttgaacatgtgtacaccaatgtcgccatggatggggcggctgcgctctcaccacgcgacccctcaaagttttcccaagaggaggcccccttcccagaccaagaacccggaggagaaagaggagctccaaacatggaagaagcatactgcccgcaagaagaccgcgagaggtcgccacgctggagctgctgcacagcagcccagggcgttcttacgtgggtcttcgcggctcgctggaagagactatgagcatccgattatgatagacgatgatgtaaacgagatccccacgattccatctggaagataaaagtttgagcaagtcactgttgccaccaaatcgctgtgagacctctcctaacagaaagactaaaaatgctcatagaaaagacaaaaatcaagagagcctgaaagggaataggggaagtgctggatttcctcctaggaaagatatttcagatgtatctaacaaaaagagtgacaagcaagagttaaagcccatccattgtaaagtgcaaacaggaaagaggaagagaggaacagaaaggaggttgttatcgaagaagcaaagttgccaggaccctggaccattgcctgcgtatcgccaagaaattgcatcttgcaatgaatccagaaaatccacccacagaaggattgaaaatgacccttctaccgaggtgaagcttaaagttggtgatgtgagattggcaaacattgatgaaaacatcaacaagcccagtgggactcagagagaaggaatagaaattttttgtggtcctgatgattggacaaaagagcaggacatggcattgcgcaaagcttacttcagtgcccgaccatccccacatttctggaagagggtttcaaaaatggtgccagggagatctgctgaagattgcttcaacagaatttatactgacctctcaacaccgactccaattgccccacgtcccagagcaagtaaaacaacattttctcctataggaaatttcacattgtctgatccaaaacctccaaatatcttggaacctacagttggaatgcgaaagtccgctaaacagaagagtctagtagcacagaagacagtgaggcatttgttgcagaaacattgccgcattgaccaagctcaagaggctgaccacttctcagtttttgaaagctcaccaagtgccttacaattgaacttatcttttgacaattctcctgggactcctgacagttatatgaattcagattctctaggcaagcacagtggaaggtcttcagcacgaaagaaaccattttcaaggttaagaactaaaccatctgaacccagcccaggagttctaaagcctataaagaatgttatcctacatgagaggtacattgataaattggcacgtagagaaggcgcaaaaaggcctcgcagaagggctccagctggctctaaagctgctgattctgggaagtctctttctgagcagcaagctggtagtctgaaggctgctaaaaatgctctcatctcagaagcaaccgacttcataagcagttttaagacgcttcaagccaattcgcttgcgcatgctgtggagaatagtgaagacgagattgaatgtgatgccagtgattgtagccatgatgataaagaataagaatgtccttatagtcttgattcccagcggcccttagcaatcatctcctttttgtcaactaacgttagtcatcacttatcagttgtcagctgatgttagtcagcacttatcagctgcaataaggctaggcagttgtcagggcagtgtattctgcctaatatgatgtatctagttttgttcctcttagtgcatcagagatgttagttagttgtgaaatgttgccttcgtcatgccttatgaagattgaaatcactggagattacaa

SEQ ID NO: 72725 - DNA, 2183 bp, Zea Mays
cggactccgttcaccggctgcaatctcttctcccgttcgccccgcgctctccttctctctctctctcgtggcgcaactgggtggccgccgccctacgccaggtgcctttgccggtcttcgtcgggccggttgccggcgacgagcacccaccaggtatgcgctacgcagtgcgcatgccttctcgtcccttcttgctgtgcgagtgcgaagccgagcaccacgaaccctaattcaatacagattgcgagctattggttgaacatgtgtacaccaatgtcgccatggatggggcggctgcgctctcaccacgcgacccctcaaagttttcccaagaggaggcccccttcccagaccaagaacccggaggagaaagaggagctccaaacatggaagaagcatactgcccgcaagaagaccgcgagaggtcgccacgctggagctgctgcacagcagcccagggcgttcttacgtgggtcttcgcggctcgctggaagagactatgagcatccgattatgatagacgatgatgtaaacgagggctgatcaatcagcaattacacctctccgcagatccccacgattccatctggaagataaaagtttgagcaagtcactgttgccaccaaatcgctgtgagacctctcctaacagaaagactaaaaatgctcatagaaaagacaaaaatcaagagagcctgaaagggaataggggaagtgctggatttcctcctaggaaagatatttcagatgtatctaacaaaaagagtgacaagcaagagttaaagcccatccattgtaaagtgcaaacaggaaagaggaagagaggaacagaaaggaggttgttatcgaagaagcaaagttgccaggaccctggaccattgcctgcgtatcgccaagaaattgcatcttgcaatgaatccagaaaatccacccacagaaggattgaaaatgacccttctaccgaggtgaagcttaaagttggtgatgtgagattggcaaacattgatgaaaacatcaacaagcccagtgggactcagagagaaggaatagaaattttttgtggtcctgatgattggacaaaagagcaggacatggcattgcgcaaagcttacttcagtgcccgaccatccccacatttctggaagagggtttcaaaaatggtgccagggagatctgctgaagattgcttcaacagaatttatactgacctctcaacaccgactccaattgccccacgtcccagagcaagtaaaacaacattttctcctataggaaatttcacattgtctgatccaaaacctccaaatatcttggaacctacagttggaatgcgaaagtccgctaaacagaagagtctagtagcacagaagacagtgaggcatttgttgcagaaacattgccgcattgaccaagctcaagaggctgaccacttctcagtttttgaaagctcaccaagtgccttacaattgaacttatcttttgacaattctcctgggactcctgacagttatatgaattcagattctctaggcaagcacagtggaaggtcttcagcacgaaagaaaccattttcaaggttaagaactaaaccatctgaacccagcccaggagttctaaagcctataaagaatgttatcctacatgagaggtacattgataaattggcacgtagagaaggcgcaaaaaggcctcgcagaagggctccagctggctctaaagctgctgattctgggaagtctctttctgagcagcaagctggtagtctgaaggctgctaaaaatgctctcatctcagaagcaaccgacttcataagcagttttaagacgcttcaagccaattcgcttgcgcatgctgtggagaatagtgaagacgagattgaatgtgatgccagtgattgtagccatgatgataaagaataagaatgtccttatagtcttgattcccagcggcccttagcaatcatctcctttttgtcaactaacgttagtcatcacttatcagttgtcagctgatgttagtcagcacttatcagctgcaataaggctaggcagttgtcagggcagtgtattctgcctaatatgatgtatctagttttgttcctcttagtgcatcagagatgttagttagttgtgaaatgttgccttcgtcatgccttatgaagattgaaatcactggagattacaa

SEQ ID NO: 72726 - DNA, 3905 bp, Zea Mays
gtcgtgtcttgggctgtcgtctcacccactggctcgcatcggcatcggaatcggctttgccacttcaagcgcaagttctaccagcgctacatcgaccatgatctggtcgttgagccgaggtcattcaccggttccactcagcccagcagaccggatgtaaggccatcgtcttcatcgtccagcgataatgccagggcacataattcaggagatacctggaagagccttgtctttggctgggtaaacacaaataatactacgctgagcctcctcagttcaaatgctgaaagcgccttgggttttcttcactgttctcgtggcgcggtagcataattcagacattcatgtactgggagctgagggattagtacgaggccatttatgctgttttgctgcatgtaattcttaacctctgcatctctgctggcaaacgtactgatttaccctgtttgctgtatcgtttcaatcccaagcgatccaatctatcttctgccctgctttttgtccatcaacaaccagctagaacttggttggcaataagaactaagaagcgttgaagccgatgtatcatgctgctcccgtgacatccagacgccccgttcctccttccagacgcccatttctgggatccaaatatggtggctctggtagggtggtttaagatcatgtatctgctgctgaatagctgagctgcccgggttgtctgcacagaacttagcacagccgctgtgttcttatgtaatgctgcagcagtgcgcgggataagttttctgcagaaaaatagcattcattgtatttgtctggaacgtatgatcccaatttgataactgtagcttctgctatttgctgtcataataagcagtctggaacgtatgcgtggcaggccctgctgcctgtacgcgtctctgcctctgtctatcctcgcgtttccttcaattcaaacaagtgatgacagatttacgccctggctgtaccggatccccgcgtctccatggccaggctcagatgccatgcgtcgcgacctccacaagcttcgtctgatgcatgcatgcacacgtgggacgccgcccctggtttgccggtcgccaaaatttgcggggacggaaagagagactgttggagtaaaattagtaaatgaaaaatggtgtttctccgtcaaatataattttgggaagcttttacatattttcttggagatactctgatactgtttttatttgacggcggcacagtgttttctgttgccctcttcctctcgctgtgccgccggcgccaacgccgttcagcccatccactccaccactgctcccaccacacaggggttgtacaaggcatgtcgcgaggggtcagctctggccgccgcacgtgcttggagctagagcggatcatcctaaatcggcaccgctccggaagcctcggccgagaggacgcgctcaacctgttcgatgaattgcttcctcaggccagaccggcatcggtgcacgccttcaatagtgtcctcaccgtcgtcgctcgcgccgactcctcgtcgtcaccgcgtcacagcgctgcgctcgccgtgtcccttttcaataccatggcccggtccggcgtcaatatgatggccgccaaccgttacatcataggcatcctcatccgttgcttctgcactgttggccgcttggacctcgccttcgctgcctttgccctgttcctcaagatgggatggagggtgcagaacgtgaccctcaaccagctaatcaagggtctctgtgatggcaagaggactgatgacgcaatggatatggtgttcagacgaatgccggagcttggctatacacctgatgttttctcctacaatgctcttatcaaggggctctgcgtcgagaaaaagagtcaagaggctcttgagctgctgcttcatatgacggccgatggcggatacaactgttctcccaatgtggtgtcgtatagcacaatcattgatggcttctttaaagaaggtgaagtcgacaaagcttacttcctgtttgatgaaatgattggccaggggtttccacctgatgttgtgacatacagctcactcattgatggcctgtgcaaggctcaagcaatgaacaaggctgaagcaatcctacaacatatgtttgataaaggtgttatgccgaatactaggacatataatatcatgatccgtggatattgctctttaggacagttggaagaggcagtgagactgctcaaaaagatgtctggtagtggtcttcaaccggatgttgtcacttacattcttctgatacagtattattgcaagattggaagatgcgcagaagctaggagtgtctttgattcaatggttcggaagggtcaaaaacccaattctactatctatcacatcttgcttcatgggtacgccaccaaaggagctcttattgatgtgcgtgatctccttgatttgatgattcgagacggtattccgtttgaacatcgtgccttcaatatcttgatttgtgcatacgctaaacatggagcagtggataaggcaatgactgcatttacagaaatgcgacagaatggtttgaggccagatgtagtcagctacagcacggtaattcacattctttgcaagatcggcagagtggaggatgctgtgtaccatttcaatcagatggtcagtgaagggttgtctcctaacatcataagttttacctcactaatacatggtctatgttccattggtgaatggaagaaggttgaggaactggcttttgaaatgatcaataggggcatccaccctgatgccatattcatgaacacaataatggacaacctatgcaaggaaggaagggttgtggaagcacaagatttctttgatatggttatacacattggtgtgaaaccaaatgttgtttcatataatacactgatagatggatattgtttcgttgggaagatggatgaatcgattaagcaatttgatcgtatggtctccattggcttgagacctgacagttggacctataatgctctacttaatggctactttaagaatggaagggttgaagatgcattagctctttacagagaaatgttcaggaaggatgtaaaattttgtgctattacatctaacataatcctgcatgggttatttcaggctggaaggattgttgctgcaagggaattatacatgaaaatggttgacagaggaacacagttgagaatcgaaacatacaacacagttcttggaggactctgtgaaaatagttgtgttgatgaagcgctgagaatgtttgaggacttgcgttcaaaagaatttgagcttgatgtttggactttcaatatagtgattaatgcattgctgaaagttggtaggattgatgaagcaaagagcctgttttcagctatggtgctccgtggtccagtgcctcatgtgataacctacagcttaatgatcaaaagtcgtatagaagaaggtttgttagaggagtctgatgatctttttctatctatggagaagaatggctgtgctgccgactcacacatgctaaacgtcataattagaagactacttgaaaaaggagatgtgagaagggctggaacctacctaaccaaaattgatgagaagaacttctccgttgaagcttccaccgctgcattgctgattcctattgtttcagagaagaagtaccagaaagaagtaaagtttcttcctgaaaaataccactctttcatgcaacctagggatgattgagacctttcccggtttttctgtgctggacattagagattgctaactagacttatttcagaagatcaatttgaaaacatgaaatcttctgcataacttgggcacaaatgaagtggagagttacctggccttgaaggattttcttgtttctagagattgtctttcatatttaataacc

SEQ ID NO: 72727 - DNA, 1383 bp, Zea Mays
atgtcgccatggaaagggcggctgcgctctcaccacgcgacccctcaaagttttcccaagaggaggcccccttcccagaccaagaacccggaggagaaagaggagctccaaacatgtaagaagcatactgcccgcaagaagaccgcgagaggtcgccacgctggagctgctgcacagcagcccagggctctcttacgcgggtcgtcgcggctcgctggaagagaccatgagcatccaattatgatagacgatgatgtaaacgaggaatgtaaatctagggctgataatcagcaattacacctctccgcaggtccccacgattccatctggaagataaaagtttgagcaagtcactgttgccaccaaatcgctgtgagacctatcctaacagaaagactaaaaatgcttataggaaagacaaaaatcaagagagcctgaaagggaatagggaaagtgctggatttcctcctaggaaagatatttcagatttatctaacaaaaagagtgacaagcaagagttaaagcccaaccattaaagtgcaaacaggaaagaggaagagaggaacagaaaggaggttgttatcgaagaagcaaagttgccaggaccctggaccattctctgcgtatcaccaagaaattgcatcttgcaatgaatccagaaaatccacccacagaaggattgaaaatgacccttctaccgaggtgaagcttaaagttggtgatgtgagattggcaaacattgatgaaaacatcaacaagcccagtgggactgagagagaaggaatagaatttttttgtggtcctgatgatgggacaaaagagcaggacatggcattgcgcaaagcttacttcagtgcccgaccatccccacatttctggaagagggtttcaaaaatggtgccagggagatctgctgaagattgcttcaacagaatttatactgacctctcaacaccgactccaattgccccacgtcccagagcaaattctctaggcaagcacagtggaaggtcttcagcacgaaagaaaccattttcaaggttaagaactaaatcatctgatcccagcccaggagttctaaagcctataaagaatgttatcctacatgagaggtacattgataaattggcacgtagagaaggagcaaaaaggcctcgcagaagggctccagctggctctaaagctgctgattctgggaagtctctttctgagcagcaagctggtagtctgaaggctgctaaaaatgctctcatctcagaagcaaccgacttcataagcagttttaagacgctgcaagccaattcgcttgcgcatgctgtggagaatagtgaagacgagattgaatgtgatgccagtaattgtagccatgatgataaagaataa

SEQ ID NO: 72728 - DNA, 4507 bp, Zea Mays
atcggcatcggaatcggcgttgccacttccaccgcttctgctccccttcgccctgcttcatgttccgcgattcccttcgcacaccctcccgctgccgccgctgttctcctaccacccgtcctcccgcgctgggtagcggtactaatttaggatctgatacactttctgtgcggaagcgcggtcctgctaaatccgtgtgccggggttccagattgcaggagcttgccttgtagcgtcgggttatgctggttgcagcgagtggctaagcagagatccagtcgcggcgcgctgcttgcttgcttccaaccctgggtgcttgtgctactctttcaagctcgtgatctcatcatgggcaatgcagcatgctcgttcttactagttactaagtttatttatccatacaacccatgttataagttgggtcaggaactcaggatacggatactgttatgcagctgtgcaggcagggccacagaacaagtttgtttgtacacagactcaagaaatggaaaacaaattcttgttatttgggaaaacaacttcttgttatttgcgtttgcacaccattttgagttgatttcatccactgaagactaaagagtgaagtaataaggtcgtgtacacttgattttcccctcctctggttggttgcacaggaccatgatctggtcgttgagccgaggtcattcaccggttccactcagcccagcagaccggatgtaaggccatcgtcttcatcgtccagcgataatgccagggcacataattcagattccgaaggcttaactttgccggatcctctttctataggagatacctggaagagccttgtctttggctgggtaaacacaaataatactacgctgagcctcctcagttcaaatgctgaaagcgccttgggttttcttcactgttctcgtggcgcggtagcataattcagacattcatgtactgggagctgagggattagtacgaggccatttatgctgttttgctgcatgtaattcttaacctctgcatctctgctggcaaacgtactgatttaccctgtttgctgtatcgtttcaatcccaagcgatccaatctatcttctgccctgctttttgtccatcaacaaccagctagaacttggttggcaataagaactaagaagcgttgaagccgatgtatcatgctgctcccgtgacatccagacgccccgttcctccttccagacgcccatttctgggatccaaatatggtggctctggtagggtggtttaagatcatgtatctgctgctgaatagctgagctgcccgggttgtctgcacagaacttagcacagccgctgtgttcttatgtaatgctgcagcagtgcgcgggataagttttctgcagaaaaatagcattcattgtatttgtctggaacgtatgatcccaatttgataactgtagcttctgctatttgctgtcataataagcagtctggaacgtatgcgtggcaggccctgctgcctgtacgcgtctctgcctctgtctatcctcgcgtttccttcaattcaaacaagtgatgacagatttacgccctggctgtaccggatccccgcgtctccatggccaggctcagatgccatgcgtcgcgacctccacaagcttcgtctgatgcatgcatgcacacgtgggacgccgcccctggtttgccggtcgccaaaatttgcggggacggaaagagagactgttggagtaaaattagtaaatgaaaaatggtgtttctccgtcaaatataattttgggaagcttttacatattttcttggagatactctgatactgtttttatttgacggcggcacagtgttttctgttgccctcttcctctcgctgtgccgccggcgccaacgccgttcagcccatccactccaccactgctcccaccacacaggggttgtacaaggcatgtcgcgaggggtcagctctggccgccgcacgtgcttggagctagagcggatcatcctaaatcggcaccgctccggaagcctcggccgagaggacgcgctcaacctgttcgatgaattgcttcctcaggccagaccggcatcggtgcacgccttcaatagtgtcctcaccgtcgtcgctcgcgccgactcctcgtcgtcaccgcgtcacagcgctgcgctcgccgtgtcccttttcaataccatggcccggtccggcgtcaatatgatggccgccaaccgttacatcataggcatcctcatccgttgcttctgcactgttggccgcttggacctcgccttcgctgcctttgccctgttcctcaagatgggatggagggtgcagaacgtgaccctcaaccagctaatcaagggtctctgtgatggcaagaggactgatgacgcaatggatatggtgttcagacgaatgccggagcttggctatacacctgatgttttctcctacaatgctcttatcaaggggctctgcgtcgagaaaaagagtcaagaggctcttgagctgctgcttcatatgacggccgatggcggatacaactgttctcccaatgtggtgtcgtatagcacaatcattgatggcttctttaaagaaggtgaagtcgacaaagcttacttcctgtttgatgaaatgattggccaggggtttccacctgatgttgtgacatacagctcactcattgatggcctgtgcaaggctcaagcaatgaacaaggctgaagcaatcctacaacatatgtttgataaaggtgttatgccgaatactaggacatataatatcatgatccgtggatattgctctttaggacagttggaagaggcagtgagactgctcaaaaagatgtctggtagtggtcttcaaccggatgttgtcacttacattcttctgatacagtattattgcaagattggaagatgcgcagaagctaggagtgtctttgattcaatggttcggaagggtcaaaaacccaattctactatctatcacatcttgcttcatgggtacgccaccaaaggagctcttattgatgtgcgtgatctccttgatttgatgattcgagacggtattccgtttgaacatcgtgccttcaatatcttgatttgtgcatacgctaaacatggagcagtggataaggcaatgactgcatttacagaaatgcgacagaatggtttgaggccagatgtagtcagctacagcacggtaattcacattctttgcaagatcggcagagtggaggatgctgtgtaccatttcaatcagatggtcagtgaagggttgtctcctaacatcataagttttacctcactaatacatggtctatgttccattggtgaatggaagaaggttgaggaactggcttttgaaatgatcaataggggcatccaccctgatgccatattcatgaacacaataatggacaacctatgcaaggaaggaagggttgtggaagcacaagatttctttgatatggttatacacattggtgtgaaaccaaatgttgtttcatataatacactgatagatggatattgtttcgttgggaagatggatgaatcgattaagcaatttgatcgtatggtctccattggcttgagacctgacagttggacctataatgctctacttaatggctactttaagaatggaagggttgaagatgcattagctctttacagagaaatgttcaggaaggatgtaaaattttgtgctattacatctaacataatcctgcatgggttatttcaggctggaaggattgttgctgcaagggaattatacatgaaaatggttgacagaggaacacagttgagaatcgaaacatacaacacagttcttggaggactctgtgaaaatagttgtgttgatgaagcgctgagaatgtttgaggacttgcgttcaaaagaatttgagcttgatgtttggactttcaatatagtgattaatgcattgctgaaagttggtaggattgatgaagcaaagagcctgttttcagctatggtgctccgtggtccagtgcctcatgtgataacctacagcttaatgatcaaaagtcgtatagaagaaggtttgttagaggagtctgatgatctttttctatctatggagaagaatggctgtgctgccgactcacacatgctaaacgtcataattagaagactacttgaaaaaggagatgtgagaagggctggaacctacctaaccaaaattgatgagaagaacttctccgttgaagcttccaccgctgcattgctgattcctattgtttcagagaagaagtaccagaaagaagtaaagtttcttcctgaaaaataccactctttcatgcaacctagggatgattgagacctttcccggtttttctgtgctggacattagagattgctaactagacttatttcagaagatcaatttgaaaacatgaaatcttctgcataacttgggcacaaatgaagtggagagttacctggccttgaaggattttcttgtttctagagattgtctttcatatttaataacc

SEQ ID NO: 72729 - DNA, 1242 bp, Zea Mays
tcccccttctcctctatgtcggtgccttctttgctcctcaaatccatggcaccgcggcctcccaacttggactgcgccactctttgatttccggtggccggcgtcttcctctgcgccgtcagcttgccggactcgcgccatcctccaccgccctagattttttcctgaagcactacgcccctggtcgagcttgcccatggcgtcttccccctggcgcccctgtgctcgcgcccctgtggccgcggctctccctctggttgcagggacgcgcaagccccatccccaatggtgctcggccgcccagctccctgctccttccactcgcccggcctctagttccctgcgcgcgctcctctgctcgccggttctccttgccccagaaccatcagtcctctatccggcttcaaccccaccgtcggtctctagactctagttcgccatggcgctgaatttcttcctcgtgtcatccctgctcctcgcgcgttgggcaccgggagactttccctgcttggtctggcgtgggttgtagctgccggacaagcgcacccctgtttcctttgtcgtcggtcgtcgtttgacctcgtcttgctgcgtggttcctggtcataatcataaccatctcggactgcgctgtcgcccagatctgaaaccgaactccccaacgccctggcgctcaatgaaatgtccaagccagtccctcgccacattcactgcctttgtgcgcacgctactgcttccgtgccgcaacattcgccaactacacgaggtacgttaattaatcacgtgatgcggaagacaacccaagtcgaccacaggatcatgcagagattggacatctccgcaaaacaatgtcgtcagtcggaccaacctgaagggtagactgaacaagtgctaagacaaaggatggttgtcaagtgctacatatgtcgtgtgattggtgtaatacccaaaatactaactttaagaatatggggaattctcctatgttttagacaaacctattatctaacaatatattagaaacaagattcccttaaaaaaactctttggttgaattttatatttaataaaaatataataataacaacaaaagttatgtttcacatgaatagaaaacattagatttttaaatatgatatgattggatttttaactatttggatgtgtgaatcattttcttactcttcataattatgagcacttgtttatgtaagtaaagaaataaataataaagaataaaac

SEQ ID NO: 72730 - DNA, 1765 bp, Zea Mays
atcctgtggtgccgtctcgacctcggagtttttgatgagggaggaaaggaactatggtgctccaccgcgcgatggtccaggacgtggaagaggcggccgcggtggcaggactggcccgaggcgagattttggcgatgctgatgcccacggctttgagggggggtatggtggcggcggcggcggttttggggacggtggagttgctcgcggtgaaaatggtgagggtaggcaggcagagaggggccgtgggccccgccagccttaccgtggaggtgggcgacgtggtgggtacagcgatgggcaggctgggaatgagtttggacgtcctcgccgggcatatgagcgccacagcggcacaggccgtggctacgggatgaagcgtgaaggggctgggcgtggaaattggggaactgcaactgatgaaggccttgaacaggacactgtggatgctgttaatcctgaggagactactgccgtggtggaggatgagaagaaacctgaagatgcaccacagtctgaggttgagaaggacaaggagggcgcggagaatgaagaagaagaaaaggaacctgaggataaggagatgactttggaggaatatgaaaaggtactggaggaaaaacgaaaagctttactctcccttaaggctgaggagagaaaagttgaaattgacaaggagctacaggccatgcaacaactgtcagttaaaaaggatggcgatgaagtgtttatcaagctgggctctgacaaggacttgaaaaagaaagaaagtgctgaaagagaagaacggggcaagaagtccctgagcatcaacgagttcttgaagccagctgaaggcgaaaggtactataaccctagtggccgtggccgtggtaggggccgtggggggttccgtggtggttacaacggcggttatcggggaccagctgctgctccagcgatcgaagaccaggctcagttccctgccctggcctaagcacagctcgtgttctcgctcaagattgtgtcacttttgcggagtgcgtcagtcagtcctagtgttgttgctcccaagcttgctttccggattatgtgtatccaacattttctgatattatgtactggtgtgctcgtgattgcatggttttgctaagctcagctgaggggtgtcgtgttctgtttgcctggctgatggctgttgacagacttgtcacacatccttcgagcctgaccggtctccagatttatttacttttttcctcggatcagtcatgggaggaaatagtacaccattctttgcattagccattgagttgattacatcgttattttgtcagccatgtgcatatctagaggctaacatgttctttgatgtcgtcgagacggcggtccatgatctccgagacagcctgcaagaagacagtctcgcatcctcctccccgttccgccgcctcacggacgatctcttcgatggcggactccttggtcagggtctctctgcacatgatgctcccgatgtggaaggcggtgaggcccctctccacacccttcttcagcagcatggtggcgacgcgcagcgtgcgcgcgcactcgcgcgacacctcccacccgtggagcctcagcatagtcacgtcctcctccgcgtccagggaccgcacgtactccaccgtctcgtcgctgaagggctcccggcactgaggccagtagagccactcgaaagtgcagtcctcgaactgcatgccaggtcactccaagatgaagagaagtgggaacaaaaaatgaaaaa

SEQ ID NO: 72731 - DNA, 1960 bp, Zea Mays
ctcctctcctctcgccccgcctcgtcatgtcacgtctcccaaagtcccatctcgccttcgcttaaacataaaccacacccatcgcacccagccagccctcgccatccatggccaccaccgccgccatccacctgcgcccgctccgttccgtcgccgtctcctccgcgaggtcacgctcgctcctccacctcctcgcccggcccctctcctcttcccaatcgtcctacgcctaccgcccttcccctacagcgcccgccgccgccgcccccaaccatgtccaccaccctccccatcaccaccagtcggtgcctcccccaggaccccctccacagtggtccgcgcagggacatccgcctccgccgccccgtggctatgggcctccaccgccgcagcaccagcatgtgccgcctccgccaccacgcggctacggacctccaccaccgcctccacacggccacgtacctccgccgcctccgccgcgacacggccacgggcctccaccaccgggccagcacgtactgccgcccctgctaccacacggccacggacctccgccaccgggccagcacatgccaccgccacacggccacgggcctccaccaccgggccagcgcgtaccgccgcctccgccgccacacggccacggtcctccgccaccgggccagcacctaccgccgcctccaccaccacacggccacggtcctccacccccgcaccagcaggcaccgccgccgcctgatcctgtggcggggcctggggagctgatgggactgtgccgggaggggcgggtaaaggatgccgtggagcttctctccaagggtgcgcgcaccgacctggacaccttctacgagctcgcggccacctgctccaaccctaagctgctggaggagctcaggaaggtgcacgacttcttcctccgctcgcccttccgcggcgacctccgggtcaacaacatgctgctcgcgatgtatgccaagtgcgcagccatgccacatgcccgcaggacgtttgacaatatgcctgaccgcgacatggactcgtggcacatcatgatcgacggctactctgtcaatggacttggggacgaggcgctgcgtctgttcgagctgatgaaggagtgtatggcacccacaagtcagacctacctgcttgtgctcaatgcctgtgccaactcagaggccatcgaggaggcgctcctttactttgatgccatgtccagggaccatggcattgagcctggtgtggagcactatgttgggatcattgaggtcttggggaagtcagggcatctcaacgaggctctggagttcattgagaagctgcctttcgagcccaatgccatggtgtgggagtcactcttgaacctggcccggatgaatggagacattgaccttgaggaccgggcagaggagttgttggtgtcgcttgatccatccaaggcaaatcctaagaagctcccaaccccacctcccaagaggcgcctgggaattaacatgcttgatgggaggaacaagctagtagagtacaggctgccaccaaagattgaaaagaaggtggtcaatgagcagaggtatgtcccagacacaagatatgtgctccatgacattgaccaggaggccaaggaacaggcattgctgtaccacagtgagaggctggcaattgcttatggtctgattagcactccagcaagaactccacttcgtatcattaagaacctgaggatatgtggtgactgccacaacgccatcaagatcatgtcaaggatcgttgggagagagcttattgtgagggacaacaagaggttccaccacttcaaagatggaaagtgctcctgtggagattattggtgataatggattaaagccgctcttctatcctttatatggagctgctggcagccatggtttcagttgataataagcaatatgaaggcctgattgagattgcctgctgctggagc

SEQ ID NO: 72732 - DNA, 633 bp, Zea Mays
cgctggcctattagtcctagcacatcagcagcgtccatccgcggcgcccgcgctagaaaagagtccatctcctccctccctggctcggctgtcggctcccttcgccaccgccttcacctccttccctcaccttccagagcccactgttccccggcggcggcagagatgaacgtgtggaactacgtcgtcacggcgcacaagcccacaagcgtcagccattcctgcgtcggcaactttaccagccccaaccagctcaacctcattatcgcgaaatgcacccggatcgagatccatttgcttacccctcagggccttcagccgatgcttgatgtgcctatatatgggagaattgcaacgattgagctcttccggcctcataatgagactcaggattttcttttcattgctacggagaggtacaaattctgtgttctgcaatgggacacagaaaaatcagagctaatcaccaggaaaacaaaactggtgttctctatttcgtatggaaaataatgatttatttgtaacatggatttgtacaggggcagacgcaaggggtgggcaaggtgggccatggccccaccttaattttataacttcttatacctaggtttaaatatacattaaaataaaaaa

SEQ ID NO: 72733 - DNA, 3354 bp, Zea Mays
attggaatcatcgaccctgactgtagactcattggtcttcatctctatgacggcttatttaaggttataccatttgacaacaaagggcagctgaaggaagctttcaatatcagactggaagaacttcaagtactggacatcaaatttctgcatggttgtgttaaacctacaattgttgtcctctaccaggataataaagatgtgaggcatgttaagacttatgaagttgcactgaaggacaaagattttattgagggcccttggtctcagaataatgtagacaatggtgctggtttgttgatacctgtaccagctccacttggtggtgtgataataattggcgaggagcaaatagtttactgcaatgccaattctacatttaaagcaataccaataaaaacaagtaatctcttgcctacatctctttaaatttctttgtggtgcctacttcaggttggtaagtatcgtgtctacactaattcttttgcccttgatttccgtttttcgccagtccattattagagcttatggacgggttgacccagatggttctcgatatttacttggtgataatactggaattctgcatttacttgtccttacccatgaacgagaaagggttactggtttgaaaattgaatacctgggggagacttcgattgcatcatcgatttcatatcttgataatggcgttgtttatgttggttcacggtttggcgattcacagctggtgaagctgaacctccaagctgatgcaagtggttcatttgttgaaattctcgaacggtatgttaatcttggaccgattgtggacttctgcgtgattgaccttgataggcagggtcaaggtcaggtggtcacttgttctggggcatttaaagatggttcccttcgggtggttcggaatggtatagggattaatgagcaggcttcagtagaactccaaggcataaagggattatggtcattgaaatcttctttcaatgatccatatgacatgtaccttgttgtgagctttataagtgagacacgattcttggcaatgaacatggaagatgaacttgaagagaccgagatagaggggtttgatgcacaaactcagaccctgttttgtcaaaatgcgatcaatgaccttcttatacaggttctgttggcaaccggtggtggccatcttgtttacctagaaattagggatgctaaacttgttgaagtgaagcatgcacagttagaacatgagatttcttgtcttgatttgaacccaattggagagcatctagagtatagttccctagctgctgttgggatgtggacagatataagtgttagaatattttcacttccagatcttgtattaataaggaaagaaaatttgggtggagaaattgttcctcggtctgttctgctgtgcaccttggagggggtttcgtatttactttgtgctcttggggatggtaatctgttcagttttctgctgaatgcaagcacaggtgaactgactgatagaaaaaaggttaccctcgggacccaaccaatcagccttcgtacattctcatcaaagggtaccacccacgtgtttgcttcatcagataggccaactgtcatctatagcagcaataagaagcttctctatagcaatgtaaatttgaaagaggttaatcatatgtgccctttcaatacagccgcttttccagacagtcttgcaattgctaaagagggtgagctttcaattggaactattgatgatatccagaagcttcatatccgcacaatcccccttaatgaacaagcacgccgcatttgccaccaggagcaatcaaagacactagcattttgcagtttcaagtacaaccagagtgtggaggaaagtgagactcacttaatacgtctgctagatcatcagacttttgagtccctgtgtgtgtatcctctagaccagtatgaatgtggctgctccatcattagctgttcgtttgtggatgacaataatgtctattactgtgtgggaactgcatatgttatacctgaagaaaatgaaccaaccaagggccgaatccttgtatttgcagttgaagatggaagtttgcaattaattgtggagaaagaaaccaaaggagcagtttattcgttgaatgcattcaatgggaaattgttggctgctatcaaccagaagattcaattatacaagtggatgtcgcgcgaggatggttcacatgagctgcaatctgagtgtggccaccatgggcacatacttgccttgtacactcaaacacgtggtgacttcattgtggttggcgatctgatgaagtcaatttccttgctggtgtataagcatgaggaaagcgcgatcgaagagcgtgctagggattacaatgcaaactggatgactgcagttgagatgcttgatgatgaagtctatgttggggcggagaatggctataacttattcaccgtgcgcaagaacagtgatgctgccacagatgacgaaagggccaagcttgaggtcgttggggagtaccatctcggagagtttgtgaacagattccgccatggttcactcgtgatgcgccttccagactcagagatagggaagattcctacggtcatctttggcacaataaacggggtcattggcattatcgcctccctcccgcatgaccattacaccttccttgagaagttccagtccactcttgtcaagtacataaagggagttggaaacatgagccatgagcaatggcggtcgttccataacgacaagaagacagcggaggcacggaacttccttgatggtgacctgatcgagtcgttccttgaccttagccggagcaagatggaggtggtgtccaaggctatgggcgtttcggtggaggatctgtccaagattgtggaagagctgacgaggcttcactagtacatggatacgcagaagctttgcttgtaacttgatgcatgtacatcctctttttgccatctatttttgtgctgtagcagttccatgagctgcctcagcagttgccgcgggccgtgttggcccgaagctgtagcctgccctgctttattggttgactcggaatactttttgggttgtgccagtttgttgagattgttttttttcttttattctatgttgaatggaaagattagcggtgaatcctgtcatggtcctatctgaatatattggggtactaggagccagagagatgaccgaatgactgtcttgtaggacctggttcattccaggcccaattcaatcgggcagggtcagcaacccagccctttgtttaaaaaatgtatccggtgttcaaaggattgctcagatgcacatattaatgctgtatccagtgggtattgtaa

SEQ ID NO: 72734 - DNA, 3356 bp, Zea Mays
attggaatcatcgaccctgactgtagactcattggtcttcatctctatgacggcttatttaaggttataccatttgacaacaaagggcagctgaaggaagctttcaatatcagactggaagaacttcaagtactggacatcaaatttctgcatggttgtgttaaacctacaattgttgtcctctaccaggataataaagatgtgaggcatgttaagacttatgaagttgcactgaaggacaaagattttattgagggcccttggtctcagaataatgtagacaatggtgctggtttgttgatacctgtaccagctccacttggtggtgtgataataattggcgaggagcaaatagtttactgcaatgccaattctacatttaaagcaataccaataaaaacaagtaatctcttgcctacatctctttaaatttctttgtggtgcctacttcaggttggtaagtatcgtgtctacactaattcttttgcccttgatttccgtttttcgccagtccattattagagcttatggacgggttgacccagatggttctcgatatttacttggtgataatactggaattctgcatttacttgtccttacccatgaacgagaaagctggtgaagctgaacctccaagctgatgcaagtggttcatttgttgaaattctcgaacggtatgttaatcttggaccgattgtggacttctgcgtgattgaccttgataggcagggtcaaggtcaggtggtcacttgttctggggcatttaaagatggttcccttcgggtggttcggaatggtatagggattaatgagcaggcttcagtagaactccaaggcataaagggattatggtcattgaaatcttctttcaatgatccatatgacatgtaccttgttgtgagctttataagtgagacacgattcttggcaatgaacatggaagatgaacttgaagagaccgagatagaggggtttgatgcacaaactcagaccctgttttgtcaaaatgcgatcaatgaccttcttatacaggttactgctaattcggttcgattagtcagttgtacctcccgggagctagtggatcagtggaatgcaccagcaggattctcagtcaatgttgcttcagctaatgccagtcaggttctgttggcaaccggtggtggccatcttgtttacctagaaattagggatgctaaacttgttgaagtgaagcatgcacagttagaacatgagatttcttgtcttgatttgaacccaattggagagcatctagagtatagttccctagctgctgttgggatgtggacagatataagtgttagaatattttcacttccagatcttgtattaataaggaaagaaaatttgggtggagaaattgttcctcggtctgttctgctgtgcaccttggagggggtttcgtatttactttgtgctcttggggatggtaatctgttcagttttctgctgaatgcaagcacaggtgaactgactgatagaaaaaaggttaccctcgggacccaaccaatcagccttcgtacattctcatcaaagggtaccacccacgtgtttgcttcatcagataggccaactgtcatctatagcagcaataagaagcttctctatagcaatgtaaatttgaaagaggttaatcatatgtgccctttcaatacagccgcttttccagacagtcttgcaattgctaaagagggtgagctttcaattggaactattgatgatatccagaagcttcatatccgcacaatcccccttaatgaacaagcacgccgcatttgccaccaggagcaatcaaagacactagcattttgcagtttcaagtacaaccagagtgtggaggaaagtgagactcacttaatacgtctgctagatcatcagacttttgagtccctgtgtgtgtatcctctagaccagtatgaatgtggctgctccatcattagctgttcgtttgtggatgacaataatgtctattactgtgtgggaactgcatatgttatacctgaagaaaatgaaccaaccaagggccgaatccttgtatttgcagttgaagatggaagtttgcaattaattgtggagaaagaaaccaaaggagcagtttattcgttgaatgcattcaatgggaaattgttggctgctatcaaccagaagattcaattatacaagtggatgtcgcgcgaggatggttcacatgagctgcaatctgagtgtggccaccatgggcacatacttgccttgtacactcaaacacgtggtgacttcattgtggttggcgatctgatgaagtcaatttccttgctggtgtataagcatgaggaaagcgcgatcgaagagcgtgctagggattacaatgcaaactggatgactgcagttgagatgcttgatgatgaagtctatgttggggcggagaatggctataacttattcaccgtgcgcaagaacagtgatgctgccacagatgacgaaagggccaagcttgaggtcgttggggagtaccatctcggagagtttgtgaacagattccgccatggttcactcgtgatgcgccttccagactcagagatagggaagattcctacggtcatctttggcacaataaacggggtcattggcattatcgcctccctcccgcatgaccattacaccttccttgagaagttccagtccactcttgtcaagtacataaagggagttggaaacatgagccatgagcaatggcggtcgttccataacgacaagaagacagcggaggcacggaacttccttgatggtgacctgatcgagtcgttccttgaccttagccggagcaagatggaggtggtgtccaaggctatgggcgtttcggtggaggatctgtccaagattgtggaagagctgacgaggcttcactagtacatggatacgcagaagctttgcttgtaacttgatgcatgtacatcctctttttgccatctatttttgtgctgtagcagttccatgagctgcctcagcagttgccgcgggccgtgttggcccgaagctgtagcctgccctgctttattggttgactcggaatactttttgggttgtgccagtttgttgagattgttttttttcttttattctatgttgaatggaaagattagcggtgaatcctgtcatggtcctatctgaatatattggggtactaggagccagagagatgaccgaatgactgtcttgtaggacctggttcattccaggcccaattcaatcgggcagggtcagcaacccagccctttgtttaaaaaatgtatccggtgttcaaaggattgctcagatgcacatattaatgctgtatccagtgggtattgtaa

SEQ ID NO: 72735 - DNA, 3357 bp, Zea Mays
attggaatcatcgaccctgactgtagactcattggtcttcatctctatgacggcttatttaaggttataccatttgacaacaaagggcagctgaaggaagctttcaatatcagactggaagaacttcaagtactggacatcaaatttctgcatggttgtgttaaacctacaattgttgtcctctaccaggataataaagatgtgaggcatgttaagacttatgaagttgcactgaaggacaaagattttattgagggcccttggtctcagaataatgtagacaatggtgctggtttgttgatacctgtaccagctccacttggtggtgtgataataattggcgaggagcaaatagtttactgcaatgccaattctacatttaaagcaataccaataaaaacaatccattattagagcttatggacgggttgacccagatggttctcgatatttacttggtgataatactggaattctgcatttacttgtccttacccatgaacgagaaagggttactggtttgaaaattgaatacctgggggagacttcgattgcatcatcgatttcatatcttgataatggcgttgtttatgttggttcacggtttggcgattcacagctggtgaagctgaacctccaagctgatgcaagtggttcatttgttgaaattctcgaacggtatgttaatcttggaccgattgtggacttctgcgtgattgaccttgataggcagggtcaaggtcaggtggtcacttgttctggggcatttaaagatggttcccttcgggtggttcggaatggtatagggattaatgagcaggcttcagtagaactccaaggcataaagggattatggtcattgaaatcttctttcaatgatccatatgacatgtaccttgttgtgagctttataagtgagacacgattcttggcaatgaacatggaagatgaacttgaagagaccgagatagaggggtttgatgcacaaactcagaccctgttttgtcaaaatgcgatcaatgaccttcttatacaggttactgctaattcggttcgattagtcagttgtacctcccgggagctagtggatcagtggaatgcaccagcaggattctcagtcaatgttgcttcagctaatgccagtcaggttctgttggcaaccggtggtggccatcttgtttacctagaaattagggatgctaaacttgttgaagtgaagcatgcacagttagaacatgagatttcttgtcttgatttgaacccaattggagagcatctagagtatagttccctagctgctgttgggatgtggacagatataagtgttagaatattttcacttccagatcttgtattaataaggaaagaaaatttgggtggagaaattgttcctcggtctgttctgctgtgcaccttggagggggtttcgtatttactttgtgctcttggggatggtaatctgttcagttttctgctgaatgcaagcacaggtgaactgactgatagaaaaaaggttaccctcgggacccaaccaatcagccttcgtacattctcatcaaagggtaccacccacgtgtttgcttcatcagataggccaactgtcatctatagcagcaataagaagcttctctatagcaatgtaaatttgaaagaggttaatcatatgtgccctttcaatacagccgcttttccagacagtcttgcaattgctaaagagggtgagctttcaattggaactattgatgatatccagaagcttcatatccgcacaatcccccttaatgaacaagcacgccgcatttgccaccaggagcaatcaaagacactagcattttgcagtttcaagtacaaccagagtgtggaggaaagtgagactcacttaatacgtctgctagatcatcagacttttgagtccctgtgtgtgtatcctctagaccagtatgaatgtggctgctccatcattagctgttcgtttgtggatgacaataatgtctattactgtgtgggaactgcatatgttatacctgaagaaaatgaaccaaccaagggccgaatccttgtatttgcagttgaagatggaagtttgcaattaattgtggagaaagaaaccaaaggagcagtttattcgttgaatgcattcaatgggaaattgttggctgctatcaaccagaagattcaattatacaagtggatgtcgcgcgaggatggttcacatgagctgcaatctgagtgtggccaccatgggcacatacttgccttgtacactcaaacacgtggtgacttcattgtggttggcgatctgatgaagtcaatttccttgctggtgtataagcatgaggaaagcgcgatcgaagagcgtgctagggattacaatgcaaactggatgactgcagttgagatgcttgatgatgaagtctatgttggggcggagaatggctataacttattcaccgtgcgcaagaacagtgatgctgccacagatgacgaaagggccaagcttgaggtcgttggggagtaccatctcggagagtttgtgaacagattccgccatggttcactcgtgatgcgccttccagactcagagatagggaagattcctacggtcatctttggcacaataaacggggtcattggcattatcgcctccctcccgcatgaccattacaccttccttgagaagttccagtccactcttgtcaagtacataaagggagttggaaacatgagccatgagcaatggcggtcgttccataacgacaagaagacagcggaggcacggaacttccttgatggtgacctgatcgagtcgttccttgaccttagccggagcaagatggaggtggtgtccaaggctatgggcgtttcggtggaggatctgtccaagattgtggaagagctgacgaggcttcactagtacatggatacgcagaagctttgcttgtaacttgatgcatgtacatcctctttttgccatctatttttgtgctgtagcagttccatgagctgcctcagcagttgccgcgggccgtgttggcccgaagctgtagcctgccctgctttattggttgactcggaatactttttgggttgtgccagtttgttgagattgttttttttcttttattctatgttgaatggaaagattagcggtgaatcctgtcatggtcctatctgaatatattggggtactaggagccagagagatgaccgaatgactgtcttgtaggacctggttcattccaggcccaattcaatcgggcagggtcagcaacccagccctttgtttaaaaaatgtatccggtgttcaaaggattgctcagatgcacatattaatgctgtatccagtgggtattgtaa

SEQ ID NO: 72736 - DNA, 3451 bp, Zea Mays
gtcttcatctctatgacggcttatttaaggttataccatttgacaacaaagggcagctgaaggaagctttcaatatcagttatcattttcttctgttagactggaagaacttcaagtactggacatcaaatttctgcatggttgtgttaaacctacaattgttgtcctctaccaggataataaagatgtgaggcatgttaagacttatgaagttgcactgaaggacaaagattttattgagggcccttggtctcagaataatgtagacaatggtgctggtttgttgatacctgtaccagctccacttggtggtgtgataataattggcgaggagcaaatagtttactgcaatgccaattctacatttaaagcaataccaataaaaacaagtaatctcttgcctacatctctttaaatttctttgtggtgcctacttcaggttggtaagtatcgtgtctacactaattcttttgcccttgatttccgtttttcgccagtccattattagagcttatggacgggttgacccagatggttctcgatatttacttggtgataatactggaattctgcatttacttgtccttacccatgaacgagaaagggttactggtttgaaaattgaatacctgggggagacttcgattgcatcatcgatttcatatcttgataatggcgttgtttatgttggttcacggtttggcgattcacagctggtgaagctgaacctccaagctgatgcaagtggttcatttgttgaaattctcgaacggtatgttaatcttggaccgattgtggacttctgcgtgattgaccttgataggcagggtcaaggtcaggtggtcacttgttctggggcatttaaagatggttcccttcgggtggttcggaatggtatagggattaatgagcaggcttcagtagaactccaaggcataaagggattatggtcattgaaatcttctttcaatgatccatatgacatgtaccttgttgtgagctttataagtgagacacgattcttggcaatgaacatggaagatgaacttgaagagaccgagatagaggggtttgatgcacaaactcagaccctgttttgtcaaaatgcgatcaatgaccttcttatacaggttactgctaattcggttcgattagtcagttgtacctcccgggagctagtggatcagtggaatgcaccagcaggattctcagtcaatgttgcttcagctaatgccagtcaggttctgttggcaaccggtggtggccatcttgtttacctagaaattagggatgctaaacttgttgaagtgaagcatgcacagttagaacatgagatttcttgtcttgatttgaacccaattggagagcatctagagtatagttccctagctgctgttgggatgtggacagatataagtgttagaatattttcacttccagatcttgtattaataaggaaagaaaatttgggtggagaaattgttcctcggtctgttctgctgtgcaccttggagggggtttcgtatttactttgtgctcttggggatggtaatctgttcagttttctgctgaatgcaagcacaggtgaactgactgatagaaaaaaggttaccctcgggacccaaccaatcagccttcgtacattctcatcaaagggtaccacccacgtgtttgcttcatcagataggccaactgtcatctatagcagcaataagaagcttctctatagcaatgtaaatttgaaagaggttaatcatatgtgccctttcaatacagccgcttttccagacagtcttgcaattgctaaagagggtgagctttcaattggaactattgatgatatccagaagcttcatatccgcacaatcccccttaatgaacaagcacgccgcatttgccaccaggagcaatcaaagacactagcattttgcagtttcaagtacaaccagagtgtggaggaaagtgagactcacttaatacgtctgctagatcatcagacttttgagtccctgtgtgtgtatcctctagaccagtatgaatgtggctgctccatcattagctgttcgtttgtggatgacaataatgtctattactgtgtgggaactgcatatgttatacctgaagaaaatgaaccaaccaagggccgaatccttgtatttgcagttgaagatggaagtttgcaattaattgtggagaaagaaaccaaaggagcagtttattcgttgaatgcattcaatgggaaattgttggctgctatcaaccagaagattcaattatacaagtggatgtcgcgcgaggatggttcacatgagctgcaatctgagtgtggccaccatgggcacatacttgccttgtacactcaaacacgtggtgacttcattgtggttggcgatctgatgaagtcaatttccttgctggtgtataagcatgaggaaagcgcgatcgaagagcgtgctagggattacaatgcaaactggatgactgcagttgagatgcttgatgatgaagtctatgttggggcggagaatggctataacttattcaccgtgcgcaagaacagtgatgctgccacagatgacgaaagggccaagcttgaggtcgttggggagtaccatctcggagagtttgtgaacagattccgccatggttcactcgtgatgcgccttccagactcagagatagggaagattcctacggtcatctttggcacaataaacggggtcattggcattatcgcctccctcccgcatgaccattacaccttccttgagaagttccagtccactcttgtcaagtacataaagggagttggaaacatgagccatgagcaatggcggtcgttccataacgacaagaagacagcggaggcacggaacttccttgatggtgacctgatcgagtcgttccttgaccttagccggagcaagatggaggtggtgtccaaggctatgggcgtttcggtggaggatctgtccaagattgtggaagagctgacgaggcttcactagtacatggatacgcagaagctttgcttgtaacttgatgcatgtacatcctctttttgccatctatttttgtgctgtagcagttccatgagctgcctcagcagttgccgcgggccgtgttggcccgaagctgtagcctgccctgctttattggttgactcggaatactttttgggttgtgccagtttgttgagattgttttttttcttttattctatgttgaatggaaagattagcggtgaatcctgtcatggtcctatctgaatatattggggtactaggagccagagagatgaccgaatgactgtcttgtaggacctggttcattccaggcccaattcaatcgggcagggtcagcaacccagccctttgtttaaaaaatgtatccggtgttcaaaggattgctcagatgcacatattaatgctgtatccagtgggtattgtaa

SEQ ID NO: 72737 - DNA, 3254 bp, Zea Mays
caatatcaggactggaagaacttcaagtactggacatcaaatttctgcatggttgtgttaaacctacaattgttgtcctctaccaggataataaagatgtgaggcatgttaagacttatgaagttgcactgaaggacaaagattttattgagggcccttggtctcagaataatgtagacaatggtgctggtttgttgatacctgtaccagctccacttggtggtgtgataataattggcgaggagcaaatagtttactgcaatgccaattctacatttaaagcaataccaataaaaacaatccattattagagcttatggacgggttgacccagatggttctcgatatttacttggtgataatactggaattctgcatttacttgtccttacccatgaacgagaaagggttactggtttgaaaattgaatacctgggggagacttcgattgcatcatcgatttcatatcttgataatggcgttgtttatgttggttcacggtttggcgattcacagctggtgaagctgaacctccaagctgatgcaagtggttcatttgttgaaattctcgaacggtatgttaatcttggaccgattgtggacttctgcgtgattgaccttgataggcagggtcaaggtcaggtggtcacttgttctggggcatttaaagatggttcccttcgggtggttcggaatggtatagggattaatgagcaggcttcagtagaactccaaggcataaagggattatggtcattgaaatcttctttcaatgatccatatgacatgtaccttgttgtgagctttataagtgagacacgattcttggcaatgaacatggaagatgaacttgaagagaccgagatagaggggtttgatgcacaaactcagaccctgttttgtcaaaatgcgatcaatgaccttcttatacaggttactgctaattcggttcgattagtcagttgtacctcccgggagctagtggatcagtggaatgcaccagcaggattctcagtcaatgttgcttcagctaatgccagtcaggttctgttggcaaccggtggtggccatcttgtttacctagaaattagggatgctaaacttgttgaagtgaagcatgcacagttagaacatgagatttcttgtcttgatttgaacccaattggagagcatctagagtatagttccctagctgctgttgggatgtggacagatataagtgttagaatattttcacttccagatcttgtattaataaggaaagaaaatttgggtggagaaattgttcctcggtctgttctgctgtgcaccttggagggggtttcgtatttactttgtgctcttggggatggtaatctgttcagttttctgctgaatgcaagcacaggtgaactgactgatagaaaaaaggttaccctcgggacccaaccaatcagccttcgtacattctcatcaaagggtaccacccacgtgtttgcttcatcagataggccaactgtcatctatagcagcaataagaagcttctctatagcaatgtaaatttgaaagaggttaatcatatgtgccctttcaatacagccgcttttccagacagtcttgcaattgctaaagagggtgagctttcaattggaactattgatgatatccagaagcttcatatccgcacaatcccccttaatgaacaagcacgccgcatttgccaccaggagcaatcaaagacactagcattttgcagtttcaagtacaaccagagtgtggaggaaagtgagactcacttaatacgtctgctagatcatcagacttttgagtccctgtgtgtgtatcctctagaccagtatgaatgtggctgctccatcattagctgttcgtttgtggatgacaataatgtctattactgtgtgggaactgcatatgttatacctgaagaaaatgaaccaaccaagggccgaatccttgtatttgcagttgaagatggaagtttgcaattaattgtggagaaagaaaccaaaggagcagtttattcgttgaatgcattcaatgggaaattgttggctgctatcaaccagaagattcaattatacaagtggatgtcgcgcgaggatggttcacatgagctgcaatctgagtgtggccaccatgggcacatacttgccttgtacactcaaacacgtggtgacttcattgtggttggcgatctgatgaagtcaatttccttgctggtgtataagcatgaggaaagcgcgatcgaagagcgtgctagggattacaatgcaaactggatgactgcagttgagatgcttgatgatgaagtctatgttggggcggagaatggctataacttattcaccgtgcgcaagaacagtgatgctgccacagatgacgaaagggccaagcttgaggtcgttggggagtaccatctcggagagtttgtgaacagattccgccatggttcactcgtgatgcgccttccagactcagagatagggaagattcctacggtcatctttggcacaataaacggggtcattggcattatcgcctccctcccgcatgaccattacaccttccttgagaagttccagtccactcttgtcaagtacataaagggagttggaaacatgagccatgagcaatggcggtcgttccataacgacaagaagacagcggaggcacggaacttccttgatggtgacctgatcgagtcgttccttgaccttagccggagcaagatggaggtggtgtccaaggctatgggcgtttcggtggaggatctgtccaagattgtggaagagctgacgaggcttcactagtacatggatacgcagaagctttgcttgtaacttgatgcatgtacatcctctttttgccatctatttttgtgctgtagcagttccatgagctgcctcagcagttgccgcgggccgtgttggcccgaagctgtagcctgccctgctttattggttgactcggaatactttttgggttgtgccagtttgttgagattgttttttttcttttattctatgttgaatggaaagattagcggtgaatcctgtcatggtcctatctgaatatattggggtactaggagccagagagatgaccgaatgactgtcttgtaggacctggttcattccaggcccaattcaatcgggcagggtcagcaacccagccctttgtttaaaaaatgtatccggtgttcaaaggattgctcagatgcacatattaatgctgtatccagtgggtattgtaa

SEQ ID NO: 72738 - DNA, 2267 bp, Zea Mays
caagaaatagggagcttatcaaattatttcttgtgtacatgcaattgcaatctaaaggttctgttggcaaccggtggtggccatcttgtttacctagaaattagggatgctaaacttgttgaagtgaagcatgcacagttagaacatgagatttcttgtcttgatttgaacccaattggagagcatctagagtatagttccctagctgctgttgggatgtggacagatataagtgttagaatattttcacttccagatcttgtattaataaggaaagaaaatttgggtggagaaattgttcctcggtctgttctgctgtgcaccttggagggggtttcgtatttactttgtgctcttggggatggtaatctgttcagttttctgctgaatgcaagcacaggtgaactgactgatagaaaaaaggttaccctcgggacccaaccaatcagccttcgtacattctcatcaaagggtaccacccacgtgtttgcttcatcagataggccaactgtcatctatagcagcaataagaagcttctctatagcaatgtaaatttgaaagaggttaatcatatgtgccctttcaatacagccgcttttccagacagtcttgcaattgctaaagagggtgagctttcaattggaactattgatgatatccagaagcttcatatccgcacaatcccccttaatgaacaagcacgccgcatttgccaccaggagcaatcaaagacactagcattttgcagtttcaagtacaaccagagtgtggaggaaagtgagactcacttaatacgtctgctagatcatcagacttttgagtccctgtgtgtgtatcctctagaccagtatgaatgtggctgctccatcattagctgttcgtttgtggatgacaataatgtctattactgtgtgggaactgcatatgttatacctgaagaaaatgaaccaaccaagggccgaatccttgtatttgcagttgaagatggaagtttgcaattaattgtggagaaagaaaccaaaggagcagtttattcgttgaatgcattcaatgggaaattgttggctgctatcaaccagaagattcaattatacaagtggatgtcgcgcgaggatggttcacatgagctgcaatctgagtgtggccaccatgggcacatacttgccttgtacactcaaacacgtggtgacttcattgtggttggcgatctgatgaagtcaatttccttgctggtgtataagcatgaggaaagcgcgatcgaagagcgtgctagggattacaatgcaaactggatgactgcagttgagatgcttgatgatgaagtctatgttggggcggagaatggctataacttattcaccgtgcgcaagaacagtgatgctgccacagatgacgaaagggccaagcttgaggtcgttggggagtaccatctcggagagtttgtgaacagattccgccatggttcactcgtgatgcgccttccagactcagagatagggaagattcctacggtcatctttggcacaataaacggggtcattggcattatcgcctccctcccgcatgaccattacaccttccttgagaagttccagtccactcttgtcaagtacataaagggagttggaaacatgagccatgagcaatggcggtcgttccataacgacaagaagacagcggaggcacggaacttccttgatggtgacctgatcgagtcgttccttgaccttagccggagcaagatggaggtggtgtccaaggctatgggcgtttcggtggaggatctgtccaagattgtggaagagctgacgaggcttcactagtacatggatacgcagaagctttgcttgtaacttgatgcatgtacatcctctttttgccatctatttttgtgctgtagcagttccatgagctgcctcagcagttgccgcgggccgtgttggcccgaagctgtagcctgccctgctttattggttgactcggaatactttttgggttgtgccagtttgttgagattgttttttttcttttattctatgttgaatggaaagattagcggtgaatcctgtcatggtcctatctgaatatattggggtactaggagccagagagatgaccgaatgactgtcttgtaggacctggttcattccaggcccaattcaatcgggcagggtcagcaacccagccctttgtttaaaaaatgtatccggtgttcaaaggattgctcagatgcacatattaatgctgtatccagtgggtattgtaa

SEQ ID NO: 72739 - DNA, 1700 bp, Zea Mays
cccatgacctctctctgtggagggtggctgcagtcaggcagtcttgcaattgctaaagagggtgagctttcaattggaactattgatgatatccagaagcttcatatccgcacaatcccccttaatgaacaagcacgccgcatttgccaccaggagcaatcaaagacactagcattttgcagtttcaagtacaaccagagtgtggaggaaagtgagactcacttaatacgtctgctagatcatcagacttttgagtccctgtgtgtgtatcctctagaccagtatgaatgtggctgctccatcattagctgttcgtttgtggatgacaataatgtctattactgtgtgggaactgcatatgttatacctgaagaaaatgaaccaaccaagggccgaatccttgtatttgcagttgaagatggaagtttgcaattaattgtggagaaagaaaccaaaggagcagtttattcgttgaatgcattcaatgggaaattgttggctgctatcaaccagaagattcaattatacaagtggatgtcgcgcgaggatggttcacatgagctgcaatctgagtgtggccaccatgggcacatacttgccttgtacactcaaacacgtggtgacttcattgtggttggcgatctgatgaagtcaatttccttgctggtgtataagcatgaggaaagcgcgatcgaagagcgtgctagggattacaatgcaaactggatgactgcagttgagatgcttgatgatgaagtctatgttggggcggagaatggctataacttattcaccgtgcgcaagaacagtgatgctgccacagatgacgaaagggccaagcttgaggtcgttggggagtaccatctcggagagtttgtgaacagattccgccatggttcactcgtgatgcgccttccagactcagagatagggaagattcctacggtcatctttggcacaataaacggggtcattggcattatcgcctccctcccgcatgaccattacaccttccttgagaagttccagtccactcttgtcaagtacataaagggagttggaaacatgagccatgagcaatggcggtcgttccataacgacaagaagacagcggaggcacggaacttccttgatggtgacctgatcgagtcgttccttgaccttagccggagcaagatggaggtggtgtccaaggctatgggcgtttcggtggaggatctgtccaagattgtggaagagctgacgaggcttcactagtacatggatacgcagaagctttgcttgtaacttgatgcatgtacatcctctttttgccatctatttttgtgctgtagcagttccatgagctgcctcagcagttgccgcgggccgtgttggcccgaagctgtagcctgccctgctttattggttgactcggaatactttttgggttgtgccagtttgttgagattgttttttttcttttattctatgttgaatggaaagattagcggtgaatcctgtcatggtcctatctgaatatattggggtactaggagccagagagatgaccgaatgactgtcttgtaggacctggttcattccaggcccaattcaatcgggcagggtcagcaacccagccctttgtttaaaaaatgtatccggtgttcaaaggattgctcagatgcacatattaatgctgtatccagtgggtattgtaa

SEQ ID NO: 72740 - DNA, 1801 bp, Zea Mays
ctggtggcggcccagcaatagatctggtggcccagctccctccctcgtgcagcgtggcttcagtctagtggcacgtcacatattctccgtttaccccataggcgaggtgttatctctctgtccagctctgaagctcacttagtcttgcaattgctaaagagggtgagctttcaattggaactattgatgatatccagaagcttcatatccgcacaatcccccttaatgaacaagcacgccgcatttgccaccaggagcaatcaaagacactagcattttgcagtttcaagtacaaccagagtgtggaggaaagtgagactcacttaatacgtctgctagatcatcagacttttgagtccctgtgtgtgtatcctctagaccagtatgaatgtggctgctccatcattagctgttcgtttgtggatgacaataatgtctattactgtgtgggaactgcatatgttatacctgaagaaaatgaaccaaccaagggccgaatccttgtatttgcagttgaagatggaagtttgcaattaattgtggagaaagaaaccaaaggagcagtttattcgttgaatgcattcaatgggaaattgttggctgctatcaaccagaagattcaattatacaagtggatgtcgcgcgaggatggttcacatgagctgcaatctgagtgtggccaccatgggcacatacttgccttgtacactcaaacacgtggtgacttcattgtggttggcgatctgatgaagtcaatttccttgctggtgtataagcatgaggaaagcgcgatcgaagagcgtgctagggattacaatgcaaactggatgactgcagttgagatgcttgatgatgaagtctatgttggggcggagaatggctataacttattcaccgtgcgcaagaacagtgatgctgccacagatgacgaaagggccaagcttgaggtcgttggggagtaccatctcggagagtttgtgaacagattccgccatggttcactcgtgatgcgccttccagactcagagatagggaagattcctacggtcatctttggcacaataaacggggtcattggcattatcgcctccctcccgcatgaccattacaccttccttgagaagttccagtccactcttgtcaagtacataaagggagttggaaacatgagccatgagcaatggcggtcgttccataacgacaagaagacagcggaggcacggaacttccttgatggtgacctgatcgagtcgttccttgaccttagccggagcaagatggaggtggtgtccaaggctatgggcgtttcggtggaggatctgtccaagattgtggaagagctgacgaggcttcactagtacatggatacgcagaagctttgcttgtaacttgatgcatgtacatcctctttttgccatctatttttgtgctgtagcagttccatgagctgcctcagcagttgccgcgggccgtgttggcccgaagctgtagcctgccctgctttattggttgactcggaatactttttgggttgtgccagtttgttgagattgttttttttcttttattctatgttgaatggaaagattagcggtgaatcctgtcatggtcctatctgaatatattggggtactaggagccagagagatgaccgaatgactgtcttgtaggacctggttcattccaggcccaattcaatcgggcagggtcagcaacccagccctttgtttaaaaaatgtatccggtgttcaaaggattgctcagatgcacatattaatgctgtatccagtgggtattgtaa

SEQ ID NO: 72741 - DNA, 6042 bp, Zea Mays
gtcccaggagaccgagtggctacggatagccagccacaggtccagcttgcccagacaacatccactagctagctgcagctggtgtggtgtatcttttttcttctctgtgctctagaagattagtattgtagggcttctgtgcagcacccaagcaggaattcagaaagaatgcctggaagcatccacatctcagccactcaaccaccagtcatcacccctctgtttctgcaagtcactgtgggcaacagagaatacagtggaaacatagaacaagatgctttatctttccccgttacatcacttcgggagagtatggtaataatgctgtacagtgcagacggggcattgatatcaaaatcagagctgaagacaaaagagattgtggagtcaggaactatggacacagtatttgctcttgatagcgggggagaaatagttcttcagattcagttcttgctcaacgatgatgaccgcaagcgaatccaagaaatgagaaattctgcgatgaagatgaagcagcaagggctgcttggggatggcaatgaactcaatttttcagacagcgcattgtctaaacggctgacggagaagatttccaacatccgaagcaaagcagctgaacgatctgagcttcagaagagcatgtcactggatgatttgcaagagcgggccgtgttccctggaatcgatgcggatccacgggtgaaggcctcaagggactcgttgctgcaagggggtgtaaggttggaagatcccggtggctccaagcagcggctgagccaggccgaagtcgaagccttggcatcgccggtggaaggggagaggcggcgcctaggcctggacgtagcatccggcggcgggcgaggggtcgtgggagaggcggagcaggaagtcagcgacggggcaggggcagtggatgcgatcagcacgtggccgccggacaggccgggccctggctccaagaaaggggacagcataccagagagcagcaaatcaagtagtgcagtgaagacgatgataagtagctttgaaggcaccaccaccccacagggtatcgtttcagaaaccgactcaggcagccgcagcacgcaggcaggcaaaacagccatcatccctgttgatgatcaccacaaagcttcaaatcacaggtctcagcatatactagtagaaacgatcgcacctgcacaactacaaactattaggacgccaaaagcagccgaaagcagaagccgacgcagagcaagcaagcagcacaacgagctgcatccaagaactaggaggaggtcacaggcaaagcagatgcagatgcagatgcagccaagggactacgtggagcgtcccttgaactatctggttgcgacgtcgagcacctggatacacccgcacatctgcgtcacgggcgcgaccaagcaactgaaagacctccttgagcttgagcacctcaacttccaacgcaccgctactaagggacagcaaggtacccgagagagaaaaagcgacgaatccattgccgccgccgctgctcgggctcgcagcggtggtttcctgatgataaacgggtggctgatagttcagggggtgcgtgctgcagttgtgctcacggtttgctgcggggccatgttcttcagcagcagcagcagatgaagaaatctagcagtgcctacccctaatttttgcatacacaagccacagccacaatgtaattgtcaagttttactgatggatctggctagcactgtaacttacttcaccgaccgacatattatgggtcccacatgcagaatacgacgacctctcctgctcctccgaatcctgaaaccaaccagatcacacgaaccaaaccaccgcctcctcccccgaccggagaggagcctcaccgccggcgcccatggcgacacgctacttgatcgtgtcgctgcccgtgcagtcgcccggcgccaccgccagctccctgtggtcgcgcctccaggactccatctcccgccactccttcgacaccccgctctaccgcttcaacgtcccggatctccgcgtcggcaccctcgactcgctcctcgcgctcagtgacgacctcgtcaagtccaatgtcttcgtggagggcgtgtcacacaagatccggaggcagatcgaggacctcgagcgcgccggaggggtcgagaccgggaccctcaccgtcgacggcgtccccgtcgacacctacctcactaggttcgtgtgggatgagggcaagtaccccacaatgtcccctctcaaggagatcgtcggcagcatacagtcacaggttgccaagatcgaggatgacatgaaggttcgagcatcggaatataataatgtaaggagccagcttagtgcgatcaacaggaagcaaagtgggagcggttcgtgatctttccaatctggtaaaaccggaggatatgatcacctcggaacatctcgtgacacttcttgcaattgttcccaagtactcccaaaaagactggttgtcaagctatgagaaaattgacacattcgtggtacctaggtcatctaaaaagctctatgaagacaatgaatatgctctctacactgtaacactgtttgctaaggttgttgacaattttaaggtccgtgctcgcgagaagggttttcaggtccgtgattttgagtacagtcctgaagcacaggaaagtcggaagcaggagatggagaagctactgcaagaccaagaagccatgaggaccactcttcttcaatggtgctatgccagctacagcgaggtattcagttcctggatgcacttctgtgctgtgcgtgtctttgtagagagcatccttagatatggtctccctccatcattcctgtctgctgttcttgcaccatctacaaagagcgagaagaaagtaaggagcatcttagaggagctctgcggcaatgcccatagtatttattggaaatccgaagacgacgtaggcgtcgccggtctgggaggtgaaacagaggcgcacccttacgtctccttcaccataaattttgtctgagaccggcatgttcctggccgtctgcggcccaggcaatatttcgagcagaactgccataaattctttgttgatttgtcggttcatgtgctcctgtaattcacatcacagagagaccagccgatcaataatgtagtttctgaggacatgtttccctgcagtattgtaccttgggagcgcattgtaaatggcctggaacagttgtctactggatttgtttatttatttacaataaaagccatgtgaaaataagtaactaaaatttggattgtcagttgatgaaaaatggaatgtggagctagctaggctctgggtttgtggcgcagacgatttttttccagtggaatgtgtacgttctggttctggagagcttcctatcctaccggccaggccatctctaccttgagccccttgcaattgaacatcacgaaactgggtgaaccagaatagattggcgtgtttggaacgcatggctgacaaattaaacccaagtcttatggaattttctcagttcccgaattctcgagccaagaggagcgagcagtactggatgccgagaactgccagccgtcgtccccgcgccgccgcggcgtccgggcgtttacaccacccatgcacgcacggacgaggtacccttcatcgtcgtcgtcgccgccgccgccgcccgctccaaaaccagaaagcggatgccactccaaggaagggcagctcctttccacactagtctcgctcgggccgacagcgatgtctccgtgcgcctgctcctcctcctgctgctgctcttcctcctcgcgcgcgctcacacccacctaacctataacccgctccgcctagctccttcctacccgttacctgctgcggagcggagacgacgaccacttccacctcctcccccccttccgcacccaatcccatccccctttccaaattccaatttccagcaggccgcccgcgatgcccaagccggcgacggcgaaccggcgccggaagcgcggcggcggcggcggcgaggggggcgccgccgatgaacaggccagcagcaagaggaggcccgccaccagcgtgctcacctccctggacgtcaacgacgccccgcgcccggagctccccctcttccagctgagccgacctcgccagcaggcggaacaggacgacgaagaggaggaggtgaccggtgggggcggaggaggaggagcggggtcgtcgttgtcatccgtggtcaacggccacgggcagagcccgcaccagcagcggcggctgtgggtcaaggaccggtcgcgcgcgtggtgggagcagtgcagcagcgccgactacccggaggcggacttccggtccgccttccggatggggcgcgccaccttcgcgatgctgtgcgacgcgctgggcgcggccgtggccaaggaggacaccgcgctccgcgccgccatccccgtccggcagcgcgtggcggtgtgcgtgtggcggctcgccacgggggagccgctccgcctcgtgtccaagcgcttcggcctcggcatctccacctgccacaagctggtcctggaggtctgcgccgccatccggggcctcctgatgccgcgcttcctccgctggcccgatgacgccgccgccgaggcgttcaagtcccggttccaggcggagtccgggatccccagcgtggtgggcgccatctacaccacccacatccccatcatcgcgcccaaggtgtcggtgaccgcctacttcaaccgccggcacacggagcgcaaccacaagacgtcctactccatcacgctgcagggggtggtggaccccgacggcgccttcaccgacgtctgcatcggctggcccgggtccatgcccgacgaccaggtgctggagcggtcggcgctgcagcagcgcgcggcggccgggatgatggcggggtcctgggtggtgggcggcgtcagcttcccgctcacggagtgggtgctggccccctacgcgcaggccaacctgacgtgggcgcagcacgccttcaacgagaaggtggcggaggtccggcgcgtcgccgtggacgccttcgcgcgcctcaagggccggtgggcgtgcctgcagaagcgcacggaggtgaagctgcaggacctcccggtggtgctgggcgcctgctgcgtgctgcacaacatctgcgagtcgcgcggggagggcatggaccccgcgctccgatgcgacatcgacgacgacgagacggtgccggagaaccccgtgcggtcggacggcgccaccaaggctagggacgacatcgcgcacaacctgctccacagcggacgagccggcaccaaattcttctgaattctctcagtcggttcgttcgttccatcagattcttctactatgctgctgctgctactctgtctcccgactccctctcctttcattggattggaaccgtccatggaattgatcattcgttgggttgtttgaactgtactgggaagtgggaagatcacccgcaatccgtcatcctcatcctcgtagaacgctgaacacacggagagaaaggtagatcaaagacaaagagtgggttgggtttgcttttgatcataggatttttagtctagtagcacgtggtacagttgttgaacaaacctacgtatccaagagccaagtcaaagaaacagcaacaagaagcagtagcacatctcaatccgtgcgttttccttgtgttttacctatggcattggcatgatcatgtaaaacaatattttgggatgaccgtatggccaaaatgctgaacgtgttgccgatcgggccgatccgatcgatatccactggtcgttaacaataacatgtttggatgagctggtcgaaccggacgttaatgactgactttcgatttttatttatgaattatttatttttatgtttaagttatgtatttttatttacaaaatatgtattttttattattatgtttgattcatgtagtttctaaatgtttttatgaattatgtaatgttattcgtttaactttttaagaattaagtaaacaaatgcatttgtatgagct

SEQ ID NO: 72742 - DNA, 5965 bp, Zea Mays
gtcccaggagaccgagtggctacggatagccagccacaggtccagcttgcccagacaacatccactagctagctgcagctggtgtggtgtatcttttttcttctctgtgctctagaagattagtattgtagggcttctgtgcagcacccaagcaggaattcagaaagaatgcctggaagcatccacatctcagccactcaaccaccagtcatcacccctctgtttctgcaagtcactgtgggcaacagagaatacagtggaaacatagaacaagatgctttatctttccccgttacatcacttcgggagagtatggtaataatgctgtacagtgcagacggggcattgatatcaaaatcagagctgaagacaaaagagattgtggagtcaggaactatggacacagtatttgctcttgatagcgggggagaaatagttcttcagattcagttcttgctcaacgatgatgaccgcaagcgaatccaagaaatgagaaattctgcgatgaagatgaagcagcaagggctgcttggggatggcaatgaactcaatttttcagacagcgcattgtctaaacggctgacggagaagatttccaacatccgaagcaaagcagctgaacgatctgagcttcagaagagcatgtcactggatgatttgcaagagcgggccgtgttccctggaatcgatgcggatccacgggtgaaggcctcaagggactcgttgctgcaagggggtgtaaggttggaagatcccggtggctccaagcagcggctgagccaggccgaagtcgaagccttggcatcgccggtggaaggggagaggcggcgcctaggcctggacgtagcatccggcggcgggcgaggggtcgtgggagaggcggagcaggaagtcagcgacggggcaggggcagtggatgcgatcagcacgtggccgccggacaggccgggccctggctccaagaaaggggacagcataccagagagcagcaaatcaagtagtgcagtgaagacgatgataagtagctttgaaggcaccaccaccccacagggtatcgtttcagaaaccgactcaggcagccgcagcacgcaggcaggcaaaacagccatcatccctgttgatgatcaccacaaagcttcaaatcacaggtctcagcatatactagtagaaacgatcgcacctgcacaactacaaactattaggacgccaaaagcagccgaaagcagaagccgacgcagagcaagcaagcagcacaacgagctgcatccaagaactaggaggaggtcacaggcaaagcagatgcagatgcagatgcagccaagggactacgtggagcgtcccttgaactatctggttgcgacgtcgagcacctggatacacccgcacatctgcgtcacgggcgcgaccaagcaactgaaagacctccttgagcttgagcacctcaacttccaacgcaccgctactaagggacagcaaggtacccgagagagaaaaagcgacgaatccattgccgccgccgctgctcgggctcgcagcggtggtttcctgatgataaacgggtggctgatagttcagggggtgcgtgctgcagttgtgctcacggtttgctgcggggccatgttcttcagcagcagcagcagatgaagaaatctagcagtgcctacccctaatttttgcatacacaagccacagccacaataatacgacgacctctcctgctcctccgaatcctgaaaccaaccagatcacacgaaccaaaccaccgcctcctcccccgaccggagaggagcctcaccgccggcgcccatggcgacacgctacttgatcgtgtcgctgcccgtgcagtcgcccggcgccaccgccagctccctgtggtcgcgcctccaggactccatctcccgccactccttcgacaccccgctctaccgcttcaacgtcccggatctccgcgtcggcaccctcgactcgctcctcgcgctcagtgacgacctcgtcaagtccaatgtcttcgtggagggcgtgtcacacaagatccggaggcagatcgaggacctcgagcgcgccggaggggtcgagaccgggaccctcaccgtcgacggcgtccccgtcgacacctacctcactaggttcgtgtgggatgagggcaagtaccccacaatgtcccctctcaaggagatcgtcggcagcatacagtcacaggttgccaagatcgaggatgacatgaaggttcgagcatcggaatataataatgtaaggagccagcttagtgcgatcaacaggaagcaaagtgggagcttagcggttcgtgatctttccaatctggtaaaaccggaggatatgatcacctcggaacatctcgtgacacttcttgcaattgttcccaagtactcccaaaaagactggttgtcaagctatgagaaaattgacacattcgtggtacctaggtcatctaaaaagctctatgaagacaatgaatatgctctctacactgtaacactgtttgctaaggttgttgacaattttaaggtccgtgctcgcgagaagggttttcaggtccgtgattttgagtacagtcctgaagcacaggaaagtcggaagcaggagatggagaagctactgcaagaccaagaagccatgaggaccactcttcttcaatggtgctatgccagctacagcgaggtattcagttcctggatgcacttctgtgctgtgcgtgtctttgtagagagcatccttagatatggtctccctccatcattcctgtctgctgttcttgcaccatctacaaagagcgagaagaaagtaaggagcatcttagaggagctctgcggcaatgcccatagtatttattggaaatccgaagacgacgtaggcgtcgccggtctgggaggtgaaacagaggcgcacccttacgtctccttcaccataaattttgtctgagaccggcatgttcctggccgtctgcggcccaggcaatatttcgagcagaactgccataaattctttgttgatttgtcggttcatgtgctcctgtaattcacatcacagagagaccagccgatcaataatgtagtttctgaggacatgtttccctgcagtattgtaccttgggagcgcattgtaaatggcctggaacagttgtctactggatttgtttatttatttacaataaaagccatgtgaaaataagtaactaaaatttggattgtcagttgatgaaaaatggaatgtggagctagctaggctctgggtttgtggcgcagacgatttttttccagtggaatgtgtacgttctggttctggagagcttcctatcctaccggccaggccatctctaccttgagccccttgcaattgaacatcacgaaactgggtgaaccagaatagattggcgtgtttggaacgcatggctgacaaattaaacccaagtcttatggaattttctcagttcccgaattctcgagccaagaggagcgagcagtactggatgccgagaactgccagccgtcgtccccgcgccgccgcggcgtccgggcgtttacaccacccatgcacgcacggacgaggtacccttcatcgtcgtcgtcgccgccgccgccgcccgctccaaaaccagaaagcggatgccactccaaggaagggcagctcctttccacactagtctcgctcgggccgacagcgatgtctccgtgcgcctgctcctcctcctgctgctgctcttcctcctcgcgcgcgctcacacccacctaacctataacccgctccgcctagctccttcctacccgttacctgctgcggagcggagacgacgaccacttccacctcctcccccccttccgcacccaatcccatccccctttccaaattccaatttccagcaggccgcccgcgatgcccaagccggcgacggcgaaccggcgccggaagcgcggcggcggcggcggcgaggggggcgccgccgatgaacaggccagcagcaagaggaggcccgccaccagcgtgctcacctccctggacgtcaacgacgccccgcgcccggagctccccctcttccagctgagccgacctcgccagcaggcggaacaggacgacgaagaggaggaggtgaccggtgggggcggaggaggaggagcggggtcgtcgttgtcatccgtggtcaacggccacgggcagagcccgcaccagcagcggcggctgtgggtcaaggaccggtcgcgcgcgtggtgggagcagtgcagcagcgccgactacccggaggcggacttccggtccgccttccggatggggcgcgccaccttcgcgatgctgtgcgacgcgctgggcgcggccgtggccaaggaggacaccgcgctccgcgccgccatccccgtccggcagcgcgtggcggtgtgcgtgtggcggctcgccacgggggagccgctccgcctcgtgtccaagcgcttcggcctcggcatctccacctgccacaagctggtcctggaggtctgcgccgccatccggggcctcctgatgccgcgcttcctccgctggcccgatgacgccgccgccgaggcgttcaagtcccggttccaggcggagtccgggatccccagcgtggtgggcgccatctacaccacccacatccccatcatcgcgcccaaggtgtcggtgaccgcctacttcaaccgccggcacacggagcgcaaccacaagacgtcctactccatcacgctgcagggggtggtggaccccgacggcgccttcaccgacgtctgcatcggctggcccgggtccatgcccgacgaccaggtgctggagcggtcggcgctgcagcagcgcgcggcggccgggatgatggcggggtcctgggtggtgggcggcgtcagcttcccgctcacggagtgggtgctggccccctacgcgcaggccaacctgacgtgggcgcagcacgccttcaacgagaaggtggcggaggtccggcgcgtcgccgtggacgccttcgcgcgcctcaagggccggtgggcgtgcctgcagaagcgcacggaggtgaagctgcaggacctcccggtggtgctgggcgcctgctgcgtgctgcacaacatctgcgagtcgcgcggggagggcatggaccccgcgctccgatgcgacatcgacgacgacgagacggtgccggagaaccccgtgcggtcggacggcgccaccaaggctagggacgacatcgcgcacaacctgctccacagcggacgagccggcaccaaattcttctgaattctctcagtcggttcgttcgttccatcagattcttctactatgctgctgctgctactctgtctcccgactccctctcctttcattggattggaaccgtccatggaattgatcattcgttgggttgtttgaactgtactgggaagtgggaagatcacccgcaatccgtcatcctcatcctcgtagaacgctgaacacacggagagaaaggtagatcaaagacaaagagtgggttgggtttgcttttgatcataggatttttagtctagtagcacgtggtacagttgttgaacaaacctacgtatccaagagccaagtcaaagaaacagcaacaagaagcagtagcacatctcaatccgtgcgttttccttgtgttttacctatggcattggcatgatcatgtaaaacaatattttgggatgaccgtatggccaaaatgctgaacgtgttgccgatcgggccgatccgatcgatatccactggtcgttaacaataacatgtttggatgagctggtcgaaccggacgttaatgactgactttcgatttttatttatgaattatttatttttatgtttaagttatgtatttttatttacaaaatatgtattttttattattatgtttgattcatgtagtttctaaatgtttttatgaattatgtaatgttattcgtttaactttttaagaattaagtaaacaaatgcatttgtatgagct

SEQ ID NO: 72743 - DNA, 6101 bp, Zea Mays
gccagccacaggtccagcttgcccagacaacatccactagctagctgcagctggtgtggtgtatcttttttcttctctgtgctctagaagattagtattgtagggcttctgtgcagcacccaagcaggaattcagaaagaatgcctggaagcatccacatctcagccactcaaccaccagtcatcacccctctgtttctgcaagtcactgtgggcaacagagaatacagtggaaacatagaacaagatgctttatctttccccgttacatcacttcgggagagtatggtaataatgctgtacagtgcagacggggcattgatatcaaaatcagagctgaagacaaaagagattgtggagtcaggaactatggacacagtatttgctcttgatagcgggggagaaatagttcttcagattcagttcttgctcaacgatgatgaccgcaagcgaatccaagaaatggaaattctgcgatgaagatgaagcagcaagggctgcttggggatggcaatgaactcaatttttcaggtaaactagtgacgtttgcttaattcatagtgtgtcttacgtttgctcaactggttgggtgcagcttcaagtcctttttctactcgaacttgggtgtctgttttctttgttaataatggaagagcgcagagttcattcatcaatgttagttcttatcggcgacttgttagacagcgcattgtctaaacggctgacggagaagatttccaacatccgaagcaaagcagctgaacgatctgagcttcagaagagcatgtcactggatgatttgcaagagcgggccgtgttccctggaatcgatgcggatccacgggtgaaggcctcaagggactcgttgctgcaagggggtgtaaggttggaagatcccggtggctccaagcagcggctgagccaggccgaagtcgaagccttggcatcgccggtggaaggggagaggcggcgcctaggcctggacgtagcatccggcggcgggcgaggggtcgtgggagaggcggagcaggaagtcagcgacggggcaggggcagtggatgcgatcagcacgtggccgccggacaggccgggccctggctccaagaaaggggacagcataccagagagcagcaaatcaagtagtgcagtgaagacgatgataagtagctttgaaggcaccaccaccccacagggtatcgtttcagaaaccgactcaggcagccgcagcacgcaggcaggcaaaacagccatcatccctgttgatgatcaccacaaagcttcaaatcacaggtctcagcatatactagtagaaacgatcgcacctgcacaactacaaactattaggacgccaaaagcagccgaaagcagaagccgacgcagagcaagcaagcagcacaacgagctgcatccaagaactaggaggaggtcacaggcaaagcagatgcagatgcagatgcagccaagggactacgtggagcgtcccttgaactatctggttgcgacgtcgagcacctggatacacccgcacatctgcgtcacgggcgcgaccaagcaactgaaagacctccttgagcttgagcacctcaacttccaacgcaccgctactaagggacagcaaggtacccgagagagaaaaagcgacgaatccattgccgccgccgctgctcgggctcgcagcggtggtttcctgatgataaacgggtggctgatagttcagggggtgcgtgctgcagttgtgctcacggtttgctgcggggccatgttcttcagcagcagcagcagatgaagaaatctagcagtgcctacccctaatttttgcatacacaagccacagccacaataatacgacgacctctcctgctcctccgaatcctgaaaccaaccagatcacacgaaccaaaccaccgcctcctcccccgaccggagaggagcctcaccgccggcgcccatggcgacacgctacttgatcgtgtcgctgcccgtgcagtcgcccggcgccaccgccagctccctgtggtcgcgcctccaggactccatctcccgccactccttcgacaccccgctctaccgcttcaacgtcccggatctccgcgtcggcaccctcgactcgctcctcgcgctcagtgacgacctcgtcaagtccaatgtcttcgtggagggcgtgtcacacaagatccggaggcagatcgaggacctcgagcgcgccggaggggtcgagaccgggaccctcaccgtcgacggcgtccccgtcgacacctacctcactaggttcgtgtgggatgagggcaagtaccccacaatgtcccctctcaaggagatcgtcggcagcatacagtcacaggttgccaagatcgaggatgacatgaaggttcgagcatcggaatataataatgtaaggagccagcttagtgcgatcaacaggaagcaaagtgggagcggttcgtgatctttccaatctggtaaaaccggaggatatgatcacctcggaacatctcgtgacacttcttgcaattgttcccaagtactcccaaaaagactggttgtcaagctatgagaaaattgacacattcgtggtacctaggtcatctaaaaagctctatgaagacaatgaatatgctctctacactgtaacactgtttgctaaggttgttgacaattttaaggtccgtgctcgcgagaagggttttcaggtccgtgattttgagtacagtcctgaagcacaggaaagtcggaagcaggagatggagaagctactgcaagaccaagaagccatgaggaccactcttcttcaatggtgctatgccagctacagcgaggtattcagttcctggatgcacttctgtgctgtgcgtgtctttgtagagagcatccttagatatggtctccctccatcattcctgtctgctgttcttgcaccatctacaaagagcgagaagaaagtaaggagcatcttagaggagctctgcggcaatgcccatagtatttattggaaatccgaagacgacgtaggcgtcgccggtctgggaggtgaaacagaggcgcacccttacgtctccttcaccataaattttgtctgagaccggcatgttcctggccgtctgcggcccaggcaatatttcgagcagaactgccataaattctttgttgatttgtcggttcatgtgctcctgtaattcacatcacagagagaccagccgatcaataatgtagtttctgaggacatgtttccctgcagtattgtaccttgggagcgcattgtaaatggcctggaacagttgtctactggatttgtttatttatttacaataaaagccatgtgaaaataagtaactaaaatttggattgtcagttgatgaaaaatggaatgtggagctagctaggctctgggtttgtggcgcagacgatttttttccagtggaatgtgtacgttctggttctggagagcttcctatcctaccggccaggccatctctaccttgagccccttgcaattgaacatcacgaaactgggtgaaccagaatagattggcgtgtttggaacgcatggctgacaaattaaacccaagtcttatggaattttctcagttcccgaattctcgagccaagaggagcgagcagtactggatgccgagaactgccagccgtcgtccccgcgccgccgcggcgtccgggcgtttacaccacccatgcacgcacggacgaggtacccttcatcgtcgtcgtcgccgccgccgccgcccgctccaaaaccagaaagcggatgccactccaaggaagggcagctcctttccacactagtctcgctcgggccgacagcgatgtctccgtgcgcctgctcctcctcctgctgctgctcttcctcctcgcgcgcgctcacacccacctaacctataacccgctccgcctagctccttcctacccgttacctgctgcggagcggagacgacgaccacttccacctcctcccccccttccgcacccaatcccatccccctttccaaattccaatttccagcaggccgcccgcgatgcccaagccggcgacggcgaaccggcgccggaagcgcggcggcggcggcggcgaggggggcgccgccgatgaacaggccagcagcaagaggaggcccgccaccagcgtgctcacctccctggacgtcaacgacgccccgcgcccggagctccccctcttccagctgagccgacctcgccagcaggcggaacaggacgacgaagaggaggaggtgaccggtgggggcggaggaggaggagcggggtcgtcgttgtcatccgtggtcaacggccacgggcagagcccgcaccagcagcggcggctgtgggtcaaggaccggtcgcgcgcgtggtgggagcagtgcagcagcgccgactacccggaggcggacttccggtccgccttccggatggggcgcgccaccttcgcgatgctgtgcgacgcgctgggcgcggccgtggccaaggaggacaccgcgctccgcgccgccatccccgtccggcagcgcgtggcggtgtgcgtgtggcggctcgccacgggggagccgctccgcctcgtgtccaagcgcttcggcctcggcatctccacctgccacaagctggtcctggaggtctgcgccgccatccggggcctcctgatgccgcgcttcctccgctggcccgatgacgccgccgccgaggcgttcaagtcccggttccaggcggagtccgggatccccagcgtggtgggcgccatctacaccacccacatccccatcatcgcgcccaaggtgtcggtgaccgcctacttcaaccgccggcacacggagcgcaaccacaagacgtcctactccatcacgctgcagggggtggtggaccccgacggcgccttcaccgacgtctgcatcggctggcccgggtccatgcccgacgaccaggtgctggagcggtcggcgctgcagcagcgcgcggcggccgggatgatggcggggtcctgggtggtgggcggcgtcagcttcccgctcacggagtgggtgctggccccctacgcgcaggccaacctgacgtgggcgcagcacgccttcaacgagaaggtggcggaggtccggcgcgtcgccgtggacgccttcgcgcgcctcaagggccggtgggcgtgcctgcagaagcgcacggaggtgaagctgcaggacctcccggtggtgctgggcgcctgctgcgtgctgcacaacatctgcgagtcgcgcggggagggcatggaccccgcgctccgatgcgacatcgacgacgacgagacggtgccggagaaccccgtgcggtcggacggcgccaccaaggctagggacgacatcgcgcacaacctgctccacagcggacgagccggcaccaaattcttctgaattctctcagtcggttcgttcgttccatcagattcttctactatgctgctgctgctactctgtctcccgactccctctcctttcattggattggaaccgtccatggaattgatcattcgttgggttgtttgaactgtactgggaagtgggaagatcacccgcaatccgtcatcctcatcctcgtagaacgctgaacacacggagagaaaggtagatcaaagacaaagagtgggttgggtttgcttttgatcataggatttttagtctagtagcacgtggtacagttgttgaacaaacctacgtatccaagagccaagtcaaagaaacagcaacaagaagcagtagcacatctcaatccgtgcgttttccttgtgttttacctatggcattggcatgatcatgtaaaacaatattttgggatgaccgtatggccaaaatgctgaacgtgttgccgatcgggccgatccgatcgatatccactggtcgttaacaataacatgtttggatgagctggtcgaaccggacgttaatgactgactttcgatttttatttatgaattatttatttttatgtttaagttatgtatttttatttacaaaatatgtattttttattattatgtttgattcatgtagtttctaaatgtttttatgaattatgtaatgttattcgtttaactttttaagaattaagtaaacaaatgcatttgtatgagct

SEQ ID NO: 72744 - DNA, 5952 bp, Zea Mays
agacaacatccactagctagctgcagctggtgtggtgtatcttttttcttctctgtgctctagaagattagtattgtagggcttctgtgcagcacccaagcaggaattcagaaagaatgcctggaagcatccacatctcagccactcaaccaccagtcatcacccctctgtttctgcaagtcactgtgggcaacagagaatacagtggaaacatagaacaagatgctttatctttccccgttacatcacttcgggagagtatggtaataatgctgtacagtgcagacggggcattgatatcaaaatcagagctgaagacaaaagagattgtggagtcaggaactatggacacagtatttgctcttgatagcgggggagaaatagttcttcagattcagttcttgctcaacgatgatgaccgcaagcgaatccaagaaatgcttcaagtcctttttctactcgaacttgggtgtctgttttctttgttaataatggaagagcgcagagttcattcatcaatgttagttcttatcggcgacttgttagacagcgcattgtctaaacggctgacggagaagatttccaacatccgaagcaaagcagctgaacgatctgagcttcagaagagcatgtcactggatgatttgcaagagcgggccgtgttccctggaatcgatgcggatccacgggtgaaggcctcaagggactcgttgctgcaagggggtgtaaggttggaagatcccggtggctccaagcagcggctgagccaggccgaagtcgaagccttggcatcgccggtggaaggggagaggcggcgcctaggcctggacgtagcatccggcggcgggcgaggggtcgtgggagaggcggagcaggaagtcagcgacggggcaggggcagtggatgcgatcagcacgtggccgccggacaggccgggccctggctccaagaaaggggacagcataccagagagcagcaaatcaagtagtgcagtgaagacgatgataagtagctttgaaggcaccaccaccccacagggtatcgtttcagaaaccgactcaggcagccgcagcacgcaggcaggcaaaacagccatcatccctgttgatgatcaccacaaagcttcaaatcacaggtctcagcatatactagtagaaacgatcgcacctgcacaactacaaactattaggacgccaaaagcagccgaaagcagaagccgacgcagagcaagcaagcagcacaacgagctgcatccaagaactaggaggaggtcacaggcaaagcagatgcagatgcagatgcagccaagggactacgtggagcgtcccttgaactatctggttgcgacgtcgagcacctggatacacccgcacatctgcgtcacgggcgcgaccaagcaactgaaagacctccttgagcttgagcacctcaacttccaacgcaccgctactaagggacagcaaggtacccgagagagaaaaagcgacgaatccattgccgccgccgctgctcgggctcgcagcggtggtttcctgatgataaacgggtggctgatagttcagggggtgcgtgctgcagttgtgctcacggtttgctgcggggccatgttcttcagcagcagcagcagatgaagaaatctagcagtgcctacccctaatttttgcatacacaagccacagccacaataatacgacgacctctcctgctcctccgaatcctgaaaccaaccagatcacacgaaccaaaccaccgcctcctcccccgaccggagaggagcctcaccgccggcgcccatggcgacacgctacttgatcgtgtcgctgcccgtgcagtcgcccggcgccaccgccagctccctgtggtcgcgcctccaggactccatctcccgccactccttcgacaccccgctctaccgcttcaacgtcccggatctccgcgtcggcaccctcgactcgctcctcgcgctcagtgacgacctcgtcaagtccaatgtcttcgtggagggcgtgtcacacaagatccggaggcagatcgaggacctcgagcgcgccggaggggtcgagaccgggaccctcaccgtcgacggcgtccccgtcgacacctacctcactaggttcgtgtgggatgagggcaagtaccccacaatgtcccctctcaaggagatcgtcggcagcatacagtcacaggttgccaagatcgaggatgacatgaaggttcgagcatcggaatataataatgtaaggagccagcttagtgcgatcaacaggaagcaaagtgggagcttagcggttcgtgatctttccaatctggtaaaaccggaggatatgatcacctcggaacatctcgtgacacttcttgcaattgttcccaagtactcccaaaaagactggttgtcaagctatgagaaaattgacacattcgtggtacctaggtcatctaaaaagctctatgaagacaatgaatatgctctctacactgtaacactgtttgctaaggttgttgacaattttaaggtccgtgctcgcgagaagggttttcaggtccgtgattttgagtacagtcctgaagcacaggaaagtcggaagcaggagatggagaagctactgcaagaccaagaagccatgaggaccactcttcttcaatggtgctatgccagctacagcgaggtattcagttcctggatgcacttctgtgctgtgcgtgtctttgtagagagcatccttagatatggtctccctccatcattcctgtctgctgttcttgcaccatctacaaagagcgagaagaaagtaaggagcatcttagaggagctctgcggcaatgcccatagtatttattggaaatccgaagacgacgtaggcgtcgccggtctgggaggtgaaacagaggcgcacccttacgtctccttcaccataaattttgtctgagaccggcatgttcctggccgtctgcggcccaggcaatatttcgagcagaactgccataaattctttgttgatttgtcggttcatgtgctcctgtaattcacatcacagagagaccagccgatcaataatgtagtttctgaggacatgtttccctgcagtattgtaccttgggagcgcattgtaaatggcctggaacagttgtctactggatttgtttatttatttacaataaaagccatgtgaaaataagtaactaaaatttggattgtcagttgatgaaaaatggaatgtggagctagctaggctctgggtttgtggcgcagacgatttttttccagtggaatgtgtacgttctggttctggagagcttcctatcctaccggccaggccatctctaccttgagccccttgcaattgaacatcacgaaactgggtgaaccagaatagattggcgtgtttggaacgcatggctgacaaattaaacccaagtcttatggaattttctcagttcccgaattctcgagccaagaggagcgagcagtactggatgccgagaactgccagccgtcgtccccgcgccgccgcggcgtccgggcgtttacaccacccatgcacgcacggacgaggtacccttcatcgtcgtcgtcgccgccgccgccgcccgctccaaaaccagaaagcggatgccactccaaggaagggcagctcctttccacactagtctcgctcgggccgacagcgatgtctccgtgcgcctgctcctcctcctgctgctgctcttcctcctcgcgcgcgctcacacccacctaacctataacccgctccgcctagctccttcctacccgttacctgctgcggagcggagacgacgaccacttccacctcctcccccccttccgcacccaatcccatccccctttccaaattccaatttccagcaggccgcccgcgatgcccaagccggcgacggcgaaccggcgccggaagcgcggcggcggcggcggcgaggggggcgccgccgatgaacaggccagcagcaagaggaggcccgccaccagcgtgctcacctccctggacgtcaacgacgccccgcgcccggagctccccctcttccagctgagccgacctcgccagcaggcggaacaggacgacgaagaggaggaggtgaccggtgggggcggaggaggaggagcggggtcgtcgttgtcatccgtggtcaacggccacgggcagagcccgcaccagcagcggcggctgtgggtcaaggaccggtcgcgcgcgtggtgggagcagtgcagcagcgccgactacccggaggcggacttccggtccgccttccggatggggcgcgccaccttcgcgatgctgtgcgacgcgctgggcgcggccgtggccaaggaggacaccgcgctccgcgccgccatccccgtccggcagcgcgtggcggtgtgcgtgtggcggctcgccacgggggagccgctccgcctcgtgtccaagcgcttcggcctcggcatctccacctgccacaagctggtcctggaggtctgcgccgccatccggggcctcctgatgccgcgcttcctccgctggcccgatgacgccgccgccgaggcgttcaagtcccggttccaggcggagtccgggatccccagcgtggtgggcgccatctacaccacccacatccccatcatcgcgcccaaggtgtcggtgaccgcctacttcaaccgccggcacacggagcgcaaccacaagacgtcctactccatcacgctgcagggggtggtggaccccgacggcgccttcaccgacgtctgcatcggctggcccgggtccatgcccgacgaccaggtgctggagcggtcggcgctgcagcagcgcgcggcggccgggatgatggcggggtcctgggtggtgggcggcgtcagcttcccgctcacggagtgggtgctggccccctacgcgcaggccaacctgacgtgggcgcagcacgccttcaacgagaaggtggcggaggtccggcgcgtcgccgtggacgccttcgcgcgcctcaagggccggtgggcgtgcctgcagaagcgcacggaggtgaagctgcaggacctcccggtggtgctgggcgcctgctgcgtgctgcacaacatctgcgagtcgcgcggggagggcatggaccccgcgctccgatgcgacatcgacgacgacgagacggtgccggagaaccccgtgcggtcggacggcgccaccaaggctagggacgacatcgcgcacaacctgctccacagcggacgagccggcaccaaattcttctgaattctctcagtcggttcgttcgttccatcagattcttctactatgctgctgctgctactctgtctcccgactccctctcctttcattggattggaaccgtccatggaattgatcattcgttgggttgtttgaactgtactgggaagtgggaagatcacccgcaatccgtcatcctcatcctcgtagaacgctgaacacacggagagaaaggtagatcaaagacaaagagtgggttgggtttgcttttgatcataggatttttagtctagtagcacgtggtacagttgttgaacaaacctacgtatccaagagccaagtcaaagaaacagcaacaagaagcagtagcacatctcaatccgtgcgttttccttgtgttttacctatggcattggcatgatcatgtaaaacaatattttgggatgaccgtatggccaaaatgctgaacgtgttgccgatcgggccgatccgatcgatatccactggtcgttaacaataacatgtttggatgagctggtcgaaccggacgttaatgactgactttcgatttttatttatgaattatttatttttatgtttaagttatgtatttttatttacaaaatatgtattttttattattatgtttgattcatgtagtttctaaatgtttttatgaattatgtaatgttattcgtttaactttttaagaattaagtaaacaaatgcatttgtatgagct

SEQ ID NO: 72745 - DNA, 2630 bp, Zea Mays
cttttttcttctctgtgctctagaagattagtattgtagggcttctgtgcagcacccaagcaggaattcagaaagaatgcctggaagcatccacatctcagccactcaaccaccagtcatcacccctctgtttctgcaagtcactgtgggcaacagagaatacagtggaaacatagaacaagatgctttatctttccccgttacatcacttcgggagagtatggtaataatgctgtacagtgcagacggggcattgatatcaaaatcagagctgaagacaaaagagattgtggagtcaggaactatggacacagtatttgctcttgatagcgggggagaaatagttcttcagattcagttcttgctcaacgatgatgaccgcaagcgaatccaagaaatgagaaattctgcgatgaagatgaagcagcaagggctgcttggggatggcaatgaactcaatttttcagacagcgcattgtctaaacggctgacggagaagatttccaacatccgaagcaaagcagctgaacgatctgagcttcagaagagcatgtcactggatgatttgcaagagcgggccgtgttccctggaatcgatgcggatccacgggtgaaggcctcaagggactcgttgctgcaagggggtgtaaggttggaagatcccggtggctccaagcagcggctgagccaggccgaagtcgaagccttggcatcgccggtggaaggggagaggcggcgcctaggcctggacgtagcatccggcggcgggcgaggggtcgtgggagaggcggagcaggaagtcagcgacggggcaggggcagtggatgcgatcagcacgtggccgccggacaggccgggccctggctccaagaaaggggacagcataccagagagcagcaaatcaagtagtgcagtgaagacgatgataagtagctttgaaggcaccaccaccccacagggtatcgtttcagaaaccgactcaggcagccgcagcacgcaggcaggcaaaacagccatcatccctgttgatgatcaccacaaagcttcaaatcacaggtctcagcatatactagtagaaacgatcgcacctgcacaactacaaactattaggacgccaaaagcagccgaaagcagaagccgacgcagagcaagcaagcagcacaacgagctgcatccaagaactaggaggaggtcacaggcaaagcagatgcagatgcagatgcagccaagggactacgcggagtccgggatccccagcgtggtgggcgccatctacaccacccacatccccatcatcgcgcccaaggtgtcggtgaccgcctacttcaaccgccggcacacggagcgcaaccacaagacgtcctactccatcacgctgcagggggtggtggaccccgacggcgccttcaccgacgtctgcatcggctggcccgggtccatgcccgacgaccaggtgctggagcggtcggcgctgcagcagcgcgcggcggccgggatgatggcggggtcctgggtggtgggcggcgtcagcttcccgctcacggagtgggtgctggccccctacgcgcaggccaacctgacgtgggcgcagcacgccttcaacgagaaggtggcggaggtccggcgcgtcgccgtggacgccttcgcgcgcctcaagggccggtgggcgtgcctgcagaagcgcacggaggtgaagctgcaggacctcccggtggtgctgggcgcctgctgcgtgctgcacaacatctgcgagtcgcgcggggagggcatggaccccgcgctccgatgcgacatcgacgacgacgagacggtgccggagaaccccgtgcggtcggacggcgccaccaaggctagggacgacatcgcgcacaacctgctccacagcggacgagccggcaccaaattcttctgaattctctcagtcggttcgttcgttccatcagattcttctactatgctgctgctgctactctgtctcccgactccctctcctttcattggattggaaccgtccatggaattgatcattcgttgggttgtttgaactgtactgggaagtgggaagatcacccgcaatccgtcatcctcatcctcgtagaacgctgaacacacggagagaaaggtagatcaaagacaaagagtgggttgggtttgcttttgatcataggatttttagtctagtagcacgtggtacagttgttgaacaaacctacgtatccaagagccaagtcaaagaaacagcaacaagaagcagtagcacatctcaatccgtgcgttttccttgtgttttacctatggcattggcatgatcatgtaaaacaatattttgggatgaccgtatggccaaaatgctgaacgtgttgccgatcgggccgatccgatcgatatccactggtcgttaacaataacatgtttggatgagctggtcgaaccggacgttaatgactgactttcgatttttatttatgaattatttatttttatgtttaagttatgtatttttatttacaaaatatgtattttttattattatgtttgattcatgtagtttctaaatgtttttatgaattatgtaatgttattcgtttaactttttaagaattaagtaaacaaatgcatttgtatgagct

SEQ ID NO: 72746 - DNA, 2255 bp, Zea Mays
gggctatctcccgtcgcttccagccattgccgtcccctctctctctccataagccagccactccgctcgctgcctcgctctaccgaccaccgtgcgcgcgcggcttccactcgcgccggcctgcctgcctgcctgcggccgcaggcggcttccgttgccgccagggcaccgcccgtgacaccctgatctcccctcacctactcctggattcgatcccatccagcccgtcccgtccctctcccacccttttcagatctgcctgcgagcccccgccacgcacccccatgcccatgcccatgaccccccgacgcgaggccactactgccaatggctccctgccgtgaccgagcccatggaggacctcgccccgggggccctcgcgctcttcgccgccgtcgctgacttcatagacgactccgctcccgctgccgccggggccgggatgccaccgccggagcccgagtccgcgcccgggagtccctgctccgactgcagcagcgtcgccaccgccgacttcgagggcttcgccgacctcgcctccacgctcgtgctcgacgacctcgtctcccccgcctccgcctccgcctccgccagctcgctccccgcctccgggcccagggccgccaggagcgtcttcgcgctcgactgcgtgccgcgctggggactccactccgtgtgcggccgacggcccgagatggaggacgccgcccgcgtgctcccaaccttcttccacgtcccgctctggatgctcgccggcgacgcgcccgtcgacggcctcgaccgggcatccttccgcctccccgcgcacttcttcgccgtctacgacggccacggcggccttcaggtcgccaactactgccgggacagaatgcacgaggtactggccgaggggctcaccagggcagagcaggccgtgtccgacgctgacttgagtggccttgaccctagtactcacgagcactgggagaaggtctttgtggactgcttcagccgtgttgatgcagaggtgggaggagacgcggcgaccggaaccaagcctgtggctccagacacagtggggtcaacagcggtggttgcgctcgtctgctcatcgcatgtcatcgttgccaactgcggcgactcgagggcggtgctctgccggggcaagcagcccctgccgctgtccgtggaccataaaccaaacagggaagatgagtatgcgaggatcgaggcccaggggggcaaggtcatcaactggaacggctaccgagttctcggtgttcttgccatgtcccggtcaattggtacctgaagccatatataatcccagtccctgaggtcacaattgtcgcccgtgcaaaggatgatgagtgcctaattcttgcaagcgatggcctgtgggatgtaatgtcaaacgaggaggtatgtgatgctgctcgcaagcgcatactgctgtggcacaagaagaacggcgacgactcagcgtcagcccaaagaagcggtgattcggcagatgaagcagctcaagcagctgctgaatatttgtcgaagctggccctccagaaggggagcaaggacaacattaccgtcattgtagtcgacctcaagtcacatagaaagttcaagagcagaacataaccacggattcggtaagacttggacagtaacaatagacgctaggaaggttgagaaaatgctcctgtttaccctttttttttctttttctttcccacaaccatataggctgccacgtttgatcagggtacagattcatacacagatgtaatctggttggagactgggctggctaggtaaggtggtcgattctagggtccaaatcttagaaataacatacatatgtagattccaacaagtagttcactgattgggtttggggcattgtttctgttattaacaggtaaaggtacaatagaaactgccacccctgaactacctaattgagcactgtatctgtgctactggtgttttgacgtttccgcgcccggcgctgtgtctttccgtcctgctcttcgctgtcctcctgagtcgcctccgtgttcttgttgtggttcgtcggtccagtgctcacattcccattccccttcccttgaagaccagcttgtccccaagctggagcagctggaaatctggcatgcagagcgtccgagtcttcctaggtggaaagttcaggatccatcccagaccagcaaaccttgagctgagtaatgtgttcaccaccgcgatcaatcatgcgactctggagcactttggtagga

SEQ ID NO: 72747 - DNA, 4431 bp, Zea Mays
aaaagatccctttggcaacccaattcgagttccatcgcaccgcatcatcaccccacgcaggtagggttttccttcctttcggcctcgccgcgtcgatctccgtcaatccacccgcccgccccctacccaaaccctagggcttccaaggtccaagcttgccgttgatggggcgcaagaagaacgtcgccatcgacgacgacgagtacttctttccgcaggacgacgcggccgacccagccccgcccccgcccgcccccgccgccgccgacaaagagaagtccaagaagggcggcaagaagggaaagaaggggggcaaggctgccgcgcccgacgacgacgactacgagccccctcccccgccgccgccggccgccgacgaggacgatgacggcgagcccatcaacctcgtcttcaccggcaagaaaaagaagaagaagggcgccactcccgccgctcccttcagcgccttcagcgccctcggcgaggagggcgaggaccaggatgaggaggaccccgccccgtctgccgcagccgagccggaggccatcaacgatccggcggaggacgacgatgacgtcgtcgatttcgatttcagcaaggccaagaagaaaaagaagaaggacaagggacctcgctcggcacctgccaaagacgaggatgtcgagcctgctccgccacccccacctgtggctgaggaggaggatgaggagcccccagtgattgccgcagcagctgcgaagaagccgcagaagaagaagaaaaagaagggtgcgtttatgatggatggtgagaatgtcgaccagatccttgcggggatggaggatcctcagctcatggatgagcctgaaccagaggaggtgaaagctcaggattctgtggctgcccctgatgcggatgatgccacgggaaagaaatcaaagaagaagaaaaagaagggagggtttacgatggatgtggatggtgaggagtttgaccagatccttgcagttatagatgaccttccgcctcctgaggaggagcctgagcccaaggaccccaaggatgagggtactgcagctactgctgcccttgtggatgatgctgaagggaagaaatcgaagaagaaaaagaagaaaagtggaaggacagcgaaggaagaagaggagttggacaagattcttgctgagcttgatggagtccctccagtggaggaggacaaacccactcaggcaccacaatctgctgctttggccaaggaggacgttggtgctgcagaggatggtaatgtggaggacaaagctgaggaaggaggagaggtggaatctgctgctgccaagaagaagaagaagaagaaggaaaaggagaaggagaaaaaggctgcagcaaagggagcggagtctaagaaaggggaggagcaagaggcacctaaaggcaaggttgacatgaagaagctccctaaacatgttcgtgagatgcaggaagcacttgccagaaggaaggaagctgaggagcgacaaaagagagaggaggaagagcgattgcggaaggaggaggaagagcgtctgcgacgtgaggaggaggagaggaaagcagaggaagcaaagaggaggaggaaggagagggaaaaggagaagctgctcaagaagaaacaggagggtaaactcttgactgggaagcagaaggaggaagcaaagaggttagaagccatgaggagacagtttcttgagcagagtgaactccaaaaggctgaggatgctgcccctgagaccaagaagaggccaatatatgattctaagaaaaagaaagctcaatcaaaggccacagagactgcaaaagtagtcgaagaacaacaggaagaactcaatgaagttaacaatgacgaggaagaatatgtgctcgtggatcaggaatctcaatctcaggttgaggaatctgatgagaaaactgaacctgaccaggagactgaagagccaaaaccagaagaggacgaggaagatgaggatgagtgggatgcaaagagctgggatgatattgatgtcaacttgcctaagataagcgcttttgatgaggaagaggcaaagcctattgtcaagaaggctgagcctgtccagaagcaggagaataataaagctcaacctgcaattcctgctgccaaaaagcttgttccttctgttgcagactctaaaaagagtgaaactgatgatgtgggtgccagtaatggaaatgttaagaggcacaaaaagaaaggacctgtgaaagaggataactctaagagtggtagtgacctcagatcaccaatctgctgcatccttgggcacgtcgatactggaaagacaaagctactagattgtattaggcgcactaatgtccaagaaggcgaagctgggggtattacccaacagatcggagcaacatacttccctactgaaaacattagagagagaactagggagttgaaagctgatgctacactcaaggttccaggcctgcttgttattgatacccctgggcatgagtcgttcagtaatctgcgttcgagaggttcaagtttgtgtgatattgccattttagttgttgacatcatgcatgggcttgaacctcagacaattgaatccctgaatcttttgaagagtcgagatgcagtgttcattgttgctttgaataaggttgatcgtctctatggttggaagaaatgtccaaatgctcctattgtgaaggctttaaaacaacaaaatgaagatgttaagagggagttcaatatgagactcacagatattgttacacaattcaagatgcaaggagtgaatactgctttgtactacaagaacaaggagatggaagatacctttaacatagtgcctacgagtgctgtaagtggtgaaggtattcctgatttgcttctgttactggttcaatggactcagaagacaatggaagaaaaactcacttttgttgatgaagtccagtgtactgtactggaagtcaaggttgttgaaggccatggtactacaattgatgttgttttggtcaatggtatactccatgaaggagatcaaatagttgtttgtggcatgcagggacccattgtgacaactgtcagggctttgttaacaccacacccaatgagagagcttcgagttaagggcacctacatacatcataaggagatcagagctgcacaaggagtcaaaatatctgctcagggtctcgaacatgcaattgcagggacagccctttacgtgttaggacctgatgatgatttagacaaactgaatgaagctgttatggaagagatgacacgggttaggagccggattgacaggagtggtgaaggtgtctatgtacaggcatctacccttgggtctttggaagctctcactgagttcttgaagagccctgctgtgaatattcccttctgtgatttcagtatagggccagtgcataagaaggatgttatgaaggctagtgtcatgcttgagagaaagaaagaatatgcaactatcttggcctttgatgtcaaagtgatgcctgatgcccgcgatctcgcagaagagtccggtgtgaggatctttgtggcagatataatataccatctgtttgatcaatttacagcatacattaagaacctcaaggaagagaagaagaaagaaagcgctgaagaagctgtgttcccttgtgttcttaagattatgccaaactgtgtcttcaacaagaaggacccaatcgttttgggtgttgatgtccttgaaggaatagccaaggtgggaactcctctctgcatacccagtaaagaatttattgatattgggaagattgcctcagttgaaatcaaccacaagcaagttgatatggctacaaaaggccaaaaggttgctattaagattattgcgaacaattctgatgagcagcagaggagcttcggcagacactttgatatggaagatgagcttgtcagccggatatcaagaagatctattgatattttgaaacagaactacagggaggatttgacaactgaagactggaaacttgttgtaaagttgaaatcaatattgaagatacaatgaaaagccccctcccctaacacacctgcccatgaatttgggagttgtggttctgtggcgccacacctatctctagttctctacaccggagttccccagggagggttaccaattttgatacgcctctcaccaacgaattgtgtaatactacatgctatggaaaatctgtgctgtttacgacatggggaggccttgccttggctagtttgggaactcagatcctctctaggattgaagggaacgagggggaagggaaattagtttgtttccctgtattttccttagtctcgagagtatgcatttgagttctcaaactagccctaaaagttgtggctttacatcttgacaagaagagattaatagcttgacaagaagagattatagatcc

SEQ ID NO: 72748 - DNA, 4515 bp, Zea Mays
cctttggcaacccaattcgagttccatcgcaccgcatcatcaccccacgcaggtagggttttccttcctttcggcctcgccgcgtcgatctccgtcaatccacccgcccgccccctacccaaaccctagggcttccaaggtccaagcttgccgttgatggggcgcaagaagaacgtcgccatcgacgacgacgagtacttctttccgcaggacgacgcggccgacccagccccgcccccgcccgcccccgccgccgccgacaaagagaagtccaagaagggcggcaagaagggaaagaaggggggcaaggctgccgcgcccgacgacgacgactacgagccccctcccccgccgccgccggccgccgacgaggacgatgacggcgagcccatcaacctcgtcttcaccggcaagaaaaagaagaagaagggcgccactcccgccgctcccttcagcgccttcagcgccctcggcgaggagggcgaggaccaggatgaggaggaccccgccccgtctgccgcagccgagccggaggccatcaacgatccggcggaggacgacgatgacgtcgtcgatttcgatttcagcaaggccaagaagaaaaagaagaaggacaagggacctcgctcggcacctgccaaagacgaggatgtcgagcctgctccgccacccccacctgtggctgaggaggaggatgaggagcccccagtgattgccgcagcagctgcgaagaagccgcagaagaagaagaaaaagaagggtgcgtttatgatggatggtgagaatgtcgaccagatccttgcggggatggaggatcctcagctcatggatgagcctgaaccagaggaggtgaaagctcaggattctgtggctgcccctgatgcggatgatgccacgggaaagaaatcaaagaagaagaaaaagaagggagggtttacgatggatgtggatggtgaggagtttgaccagatccttgcagttatagatgaccttccgcctcctgaggaggagcctgagcccaaggaccccaaggatgagggtactgcagctactgctgcccttgtggatgatgctgaagggaagaaatcgaagaagaaaaagaagaaaagtggaaggacagcgaaggaagaagaggagttggacaagattcttgctgagcttgatggagtccctccagtggaggaggacaaacccactcaggcaccacaatctgctgctttggccaaggaggacgttggtgctgcagaggatggtaatgtggaggacaaagctgaggaaggaggagaggtggaatctgctgctgccaagaagaagaagaagaagaaggaaaaggagaaggagaaaaaggctgcagcaaagggagcggagtctaagaaaggggaggagcaagaggcacctaaaggcaaggttgacatgaagaagctccctaaacatgttcgtgagatgcaggaagcacttgccagaaggaaggaagctgaggagcgacaaaagagagaggaggaagagcgattgcggaaggaggaggaagagcgtctgcgacgtgaggaggaggagaggaaagcagaggaagcaaagaggaggaggaaggagagggaaaaggagaagctgctcaagaagaaacaggagggtaaactcttgactgggaagcagaaggaggaagcaaagaggttagaagccatgaggagacagtttcttgagcagagtgaactccaaaaggctgaggatgctgcccctgagaccaagaagaggccaatatatgattctaagaaaaagaaagctcaatcaaaggccacagagactgcaaaagtagtcgaagaacaacaggaagaactcaatgaagttaacaatgacgaggaagaatatgtgctcgtggatcaggaatctcaatctcaggttgaggaatctgatgagaaaactgaacctgaccaggagactgaagagccaaaaccagaagaggacgaggaagatgaggatgagtgggatgcaaagagctgggatgatattgatgtcaacttgcctaagataagcgcttttgatgaggaagaggcaaagcctattgtcaagaaggctgagcctgtccagaagcaggagaataataaagctcaacctgcaattcctgctgccaaaaagcttgttccttctgttgcagactctaaaaagagtgaaactgatgatgtgggtgccagtaatggaaatgttaagaggcacaaaaagaaaggacctgtgaaagaggataactctaagagtggtagtgacctcagatcaccaatctgctgcatccttgggcacgtcgatactggaaagacaaagctactagattgtattaggcgcactaatgtccaagaaggcgaagctgggggtattacccaacagatcggagcaacatacttccctactgaaaacattagagagagaactagggagttgaaagctgatgctacactcaaggttccaggcctgcttgttattgatacccctgggcatgagtcgttcagtaatctgcgttcgagaggttcaagtttgtgtgatattgccattttagttgttgacatcatgcatgggcttgaacctcagacaattgaatccctgaatcttttgaagagtcgagatgcagtgttcattgttgctttgaataaggttgatcgtctctatggttggaagaaatgtccaaatgctcctattgtgaaggctttaaaacaacaaaatgaagatgttaagagggagttcaatatgagactcacagatattgttacacaattcaagatgcaaggagtgaatactgctttgtactacaagaacaaggagatggaagatacctttaacatagtgcctacgagtgctgtaagtggtgaaggtattcctgatttgcttctgttactggttcaatggactcagaagacaatggaagaaaaactcacttttgttgatgaagtccagtgtactgtactggaagtcaaggttgttgaaggccatggtactacaattgatgttgttttggtcaatggtatactccatgaaggagatcaaatagttgtttgtggcatgcagggacccattgtgacaactgtcagggctttgttaacaccacacccaatgagagagcttcgagttaagggcacctacatacatcataaggagatcagagctgcacaaggagtcaaaatatctgctcagggtctcgaacatgcaattgcagggacagccctttacgtgttaggacctgatgatgatttagacaaactgaatgaagctgttatggaagagatgacacgggttaggagccggattgacaggagtggtgaaggtgtctatgtacaggcatctacccttgggtctttggaagctctcactgagttcttgaagagccctgctgtgaatattcccttctgtgatttcagtatagggccagtgcataagaaggatgttatgaaggctagtgtcatgcttgagagaaagaaagaatatgcaactatcttggcctttgatgtcaaagtgatgcctgatgcccgcgatctcgcagaagagtccggtgtgaggatctttgtggcagatataatataccatctgtttgatcaatttacagcatacattaagaacctcaaggaagagaagaagaaagaaagcgctgaagaagctgtgttcccttgtgttcttaagattatgccaaactgtgtcttcaacaagaaggacccaatcgttttgggtgttgatgtccttgaaggaatagccaaggtgggaactcctctctgcatacccagtaaagaatttattgatattgggaagattgcctcagttgaaatcaaccacaagcaagttgatatggctacaaaaggccaaaagattattgcgaacaattctgatgagcagcagaggagcttcggcagacactttgatatggaagatgagcttgtcagccggatatcaagaagatctattgatattttgaaacagaactacagggaggatttgacaactgaagactggaaacttgttgtaaagttgaaatcaatattgaagatacaatgaaaagccccctcccctaacacacctgcccatgaatttgggagttgtggttctgtggcgccacacctatctctagttctctacaccggagttccccagggagggttaccaattttgatacggtttgatttttgtaatttgctcggaaggcgcttcattttacaaccacattccgtaataacataatattttgtgtttgtttctgtacttttcatgaactctgaagcctctcaccaacgaattgtgtaatactacatgctatggaaaatctgtgctgtttacgacatggggaggccttgccttggctagtttgggaactcagatcctctctaggattgaagggaacgagggggaagggaaattagtttgtttccctgtattttccttagtctcgagagtatgcatttgagttctcaaactagccctaaaagttgtggctttacatcttgacaagaagagattaatagcttgacaagaagagattatagatcc

SEQ ID NO: 72749 - DNA, 1438 bp, Zea Mays
cagcaagatactcttggattgtcagggcacctacatacatcataaggagatcagagctgcacaaggagtcaaaatatctgctcagggtctcgaacatgcaattgcagggacagccctttacgtgttaggacctgatgatgatttagacaaactgaatgaagctgttatggaagagatgacacgggttaggagccggattgacaggagtggtgaaggtgtctatgtacaggcatctacccttgggtctttggaagctctcactgagttcttgaagagccctgctgtgaatattcccttctgtgatttcagtatagggccagtgcataagaaggatgttatgaaggctagtgtcatgcttgagagaaagaaagaatatgcaactatcttggcctttgatgtcaaagtgatgcctgatgcccgcgatctcgcagaagagtccggtgtgaggatctttgtggcagatataatataccatctgtttgatcaatttacagcatacattaagaacctcaaggaagagaagaagaaagaaagcgctgaagaagctgtgttcccttgtgttcttaagattatgccaaactgtgtcttcaacaagaaggacccaatcgttttgggtgttgatgtccttgaaggaatagccaaggtgggaactcctctctgcatacccagtaaagaatttattgatattgggaagattgcctcagttgaaatcaaccacaagcaagttgatatggctacaaaaggccaaaaggttgctattaagattattgcgaacaattctgatgagcagcagaggagcttcggcagacactttgatatggaagatgagcttgtcagccggatatcaagaagatctattgatattttgaaacagaactacagggaggatttgacaactgaagactggaaacttgttgtaaagttgaaatcaatattgaagatacaatgaaaagccccctcccctaacacacctgcccatgaatttgggagttgtggttctgtggcgccacacctatctctagttctctacaccggagttccccagggagggttaccaattttgatacggtttgatttttgtaatttgctcggaaggcgcttcattttacaaccacattccgtaataacataatattttgtgtttgtttctgtacttttcatgaactctgaagcctctcaccaacgaattgtgtaatactacatgctatggaaaatctgtgctgtttacgacatggggaggccttgccttggctagtttgggaactcagatcctctctaggattgaagggaacgagggggaagggaaattagtttgtttccctgtattttccttagtctcgagagtatgcatttgagttctcaaactagccctaaaagttgtggctttacatcttgacaagaagagattaatagcttgacaagaagagattatagatcc

SEQ ID NO: 72750 - DNA, 944 bp, Zea Mays
gaagaaacttcctcttgctcggccatgggcagaggccccggaccggcgttcctgcccccatctcagcaatgggtctgcaagtctgagcactgtttgaaaggcgtccagacggcggtccaacacgtatctccatatcagcaggagcttgagtgggaactcctctctgcatacccagtaaagaatttattgatattgggaagattgcctcagttgaaatcaaccacaagcaagttgatatggctacaaaaggccaaaaggttgctattaagattattgcgaacaattctgatgagcagcagaggagcttcggcagacactttgatatggaagatgagcttgtcagccggatatcaagaagatctattgatattttgaaacagaactacagggaggatttgacaactgaagactggaaacttgttgtaaagttgaaatcaatattgaagatacaatgaaaagccccctcccctaacacacctgcccatgaatttgggagttgtggttctgtggcgccacacctatctctagttctctacaccggagttccccagggagggttaccaattttgatacggtttgatttttgtaatttgctcggaaggcgcttcattttacaaccacattccgtaataacataatattttgtgtttgtttctgtacttttcatgaactctgaagcctctcaccaacgaattgtgtaatactacatgctatggaaaatctgtgctgtttacgacatggggaggccttgccttggctagtttgggaactcagatcctctctaggattgaagggaacgagggggaagggaaattagtttgtttccctgtattttccttagtctcgagagtatgcatttgagttctcaaactagccctaaaagttgtggctttacatcttgacaagaagagattaatagcttgacaagaagagattatagatcc

SEQ ID NO: 72751 - DNA, 438 bp, Zea Mays
atggctatgcctgagcctgtctcgcctcagtatctgcctgggtcgcttgagacggctgaaaccttacagatagagccaactaaatctctgaaggtctattaccgcagagggtcaagagcgaatcaatctcaagacagtcatcaagttggaacaggaagagatttgcttgtgatagaaaatgggcatgaacctgatccaggacctgacgccttgacaaccatgggtgctccgtctgagacaagaaaggatgagttcctcaacaaaatctgtagaagacctgatgtttttctgttgataccaaaccgaaacagtaagaaagcagttctccctctccaacatcatatgctgctgcgccaagacggagccgacacgtcgctggagcaagggttgaattcagcatgcaagattggggtggcagggccaccaaaaaggccatga

SEQ ID NO: 72752 - DNA, 469 bp, Zea Mays
gagagatggagcatcccatggacaccgaagagactaaaaatgaagcacggggtcatcacctccagcctaagccagaggttcccctgccaggagtggccgagtcagtggggcacgctccagcctcgtacaaccattgcccacagaggccaacaacgcctcaggcgagaccctggggcgccgaattgggcctaaaaaaggcgtgtgaaggaggatgacacgtacctcaccggcgcgcggacctagggttagggtttgggtagaggagggcgagcagccgcggaggtgtgcagacgggtcgcaggggcactggggaagtcttccggaggattgtgcagcggagaaccgcgaggtggacgccggaggtgggcgtggcaacggtggggttgggctgggcgcggaggcgggaaggtgcgcgtggagagggaagcaattcacaggcctgcgcgctgttgtccggggcgggtgcggg

SEQ ID NO: 72753 - DNA, 1152 bp, Zea Mays
ctcgatgcttagtgttccattccagtacaattccgcgatcatctagggttggaaaccaaacacattgttgccctaatcacacttggtgctcatctagttggggctgcacaaaacgctgacttgtgcttctccccaatgccactatgagccaacacctgcaactccctcggtgtttgctgttgccgcttcttgtgccaccgccgctgtaccggcaactcccttggctttcgctgccaccgacgttgccgcttcttgtggcgccgctgctgtacctgcacctccctcggtgtttgctgttgccgcttcttgtgccgccgccgctgtaccggcaactcccttggctttcgctgccaccgacgttgccgcttcttgtggcaccgctgctgtacctgcacctccctcggtgttcgctgttgccgcttcttgtgccaccgctgctgtacctgcaactcccttggctttccctgccgcctcttgtgcaactcccttggctctggctgccggtgtcttctgcggcaccttggcagccttcttctgcttattgttactattgtccacctgtggcagtaatttcttgatctgcgctccagacagtgtctcatgctcaagaagggcgttcgctagcatatgaagctccttatcgtgagttgtcagaattgcctttgcgttattgtacgccttctccagaatttccttcacctccttatcaatcacacttgtttggccgctaacactattctcactgtaggaaacaagacccacacgcttactcataccatacttggtcaccatggctcttgccagcctagtcgcgtagtttaggtcagacgaggaaccggtggttacctcgctttccccaaatataagctcctcagccactcttcctcccatgcacacatccagcctcgccagcatctgctttcttgaaacgctatgctggtccttctctgggagctgtataaccataccaagagaaactcccctcggaacaattgtagccttgtgaacagggtgagcgccctctgtgtggatcgcaacaagggcatgccctccctcgtgatacgcagtaatcttcctggattcatcagatataactgctgatttgcgctcactgcccatcatgatcctgtccttcgcatattcaaggtcctg

SEQ ID NO: 72754 - DNA, 1898 bp, Zea Mays
caacttggccccaaatcgtggagtggaaaccctactcgtccccttccgcatcgccgcccaattcccccacccaattcccactctccgctcgacagatccatacatgatgggagaggccaaggagaacgacgtttatgaggaggagctcctggactacgaggaggacgacgacaagacggtcgatggctccgctgctaagcccaccggagaggtcgcaaagaagggctacgtcgggatccacagttccggtttcagagacttcctgctcaagccagagctgctccgtgctatccaggattgtggttttgagcatccttccgaagtgcaacacgagtgtatccctcaagccattcttggaatggatgtcatctgtcaagctaaatctgggatggggaaaactgctgtttttgtcctttcatccctccaacaaattgaccctgttgcgggtcaggtagcagcacttgtactgtgccacacaagggaactggcttatcagatatgccacgaatttgagaggttcagcaaatatcttactgaagttaaagttgctgtcttctatggaggtgttcacatcaggaagcataaagatttgttgaagaatgaatgccctcatattgtggttggcacgcctggtaggatacttgctcttgccagggataaggatctctccttgaagaatgtgaggcacttcattcttgatgaatgtgacaaaatgctggaatcacttgacatgcggagagatgttcaggagatcttcaaaatgactcctcatgataagcaagtcatgatgttttcagcaacgctcagcaaggagatccgtcctgtatgcaagaaatttatgcaagatccgatggaaatatatgttgatgatgaggcaaagttgaccctccatggtcttgtacagcggaaactgaatgatctcttggacgctcttgatttcaaccaagttgtgatattcgtgaagagtgttagcagagctgccgaactgaataagttactttgtgaatgcaacttcccatcaatctgcattcattctggaatgactcaggaagaaaggctaacaagatataagaacttcaaggaaggccacaagagaattcttgtggctacagatttagttggcaggggcattgacattgagcgtgtcaacattgtgataaactatgacatgccagactcagctgatacttatttgcacagggttggaagggctggacgttttggcacgaagggacttgcaattacctttgtttcctctgcttcggattctgatgttcttaaccaggtgcaagaaaggtttgaggtagacataaaggaactgcctgagcaaattgacacctcgacctacatgccatcataaatgggaaggacaactgagaagagaggaggataggggagtgagcagccgtctggagatggttacctttgaactatccgatctggaggatttgatttgcctcctttgtgtactttaaaaagggcagccaggatgatgatctgtattttaagacaatgctgtctgtttgggtttaggattttgctttgtcgaaaactagcacacttattgtactactgagcagcatatttgttttcatccctgggttaaatgatgcgtctaaacacttctgctggcctgaaaagagcaccaccgtcttggtctcccagcagcaggcagcattgactcgctaaaaggttacaattctcagatgcggatgagccagtcgtattcagcagcctgtagttacaattctcagatgccgatgagccagtcgtattcggcattctgtgttttgtttggttatcttttgctgagccttggaaacagtttctgtttttgcaaaagcgaaaaacaaacgcaaattaattgaagtggtgaaaaattaatggttccttttacc

SEQ ID NO: 72755 - DNA, 2049 bp, Zea Mays
caacttggccccaaatcgtggagtggaaaccctactcgtccccttccgcagccgtcgccgcccaattcccccacccaattcccactctccgctcgacagatccatacatgatgggagaggccaaggagaacgacgtttatgaggaggagctcctggactacgaggaggacgacgacaagacggtcgatggctccgctgctaagcccaccggagaggtcgcaaagaagggctacgtcgggatccacagttccggtttcagagacttcctgctcaagccagagctgctccgtgctatccaggattgtggttttgagcatccttccgaaggtacactttcttctttggagcagaacatggtaacactttccattaacatggatccagaaggttaaacttttactcactgggttgctgctccaatttcttttggttccacatcagtgcaacacgagtgtatccctcaagccattcttggaatggatgtcatctgtcaagctaaatctgggatggggaaaactgctgtttttgtcctttcatccctccaacaaattgaccctgttgcgggtcaggtagcagcacttgtactgtgccacacaagggaactggcttatcagatatgccacgaatttgagaggttcagcaaatatcttactgaagttaaagttgctgtcttctatggaggtgttcacatcaggaagcataaagatttgttgaagaatgaatgccctcatattgtggttggcacgcctggtaggatacttgctcttgccagggataaggatctctccttgaagaatgtgaggcacttcattcttgatgaatgtgacaaaatgctggaatcacttgacatgcggagagatgttcaggagatcttcaaaatgactcctcatgataagcaagtcatgatgttttcagcaacgctcagcaaggagatccgtcctgtatgcaagaaatttatgcaagatccgatggaaatatatgttgatgatgaggcaaagttgaccctccatggtcttgtacagcactatataaaacttagcgaggcagagaagaaccggaaactgaatgatctcttggacgctcttgatttcaaccaagttgtgatattcgtgaagagtgttagcagagctgccgaactgaataagttactttgtgaatgcaacttcccatcaatctgcattcattctggaatgactcaggaagaaaggctaacaagatataagaacttcaaggaaggccacaagagaattcttgtggctacagatttagttggcaggggcattgacattgagcgtgtcaacattgtgataaactatgacatgccagactcagctgatacttatttgcacagggttggaagggctggacgttttggcacgaagggacttgcaattacctttgtttcctctgcttcggattctgatgttcttaaccaggtgcaagaaaggtttgaggtagacataaaggaactgcctgagcaaattgacacctcgacctacatgccatcataaatgggaaggacaactgagaagagaggaggataggggagtgagcagccgtctggagatggttacctttgaactatccgatctggaggatttgatttgcctcctttgtgtactttaaaaagggcagccaggatgatgatctgtattttaagacaatgctgtctgtttgggtttaggattttgctttgtcgaaaactagcacacttattgtactactgagcagcatatttgttttcatccctgggttaaatgatgcgtctaaacacttctgctggcctgaaaagagcaccaccgtcttggtctcccagcagcaggcagcattgactcgctaaaaggttacaattctcagatgcggatgagccagtcgtattcagcagcctgtagttacaattctcagatgccgatgagccagtcgtattcggcattctgtgttttgtttggttatcttttgctgagccttggaaacagtttctgtttttgcaaaagcgaaaaacaaacgcaaattaattgaagtggtgaaaaattaatggttccttttacc

SEQ ID NO: 72756 - DNA, 4546 bp, Zea Mays
cttggttctgtgtggtttgattcatacgcaggcatcgaccgaccggaatcacatagcacatggagtcatggtggatgcttcttgtttctctttcacctcagctgcctttcccttgcctactggactctgggagtagtagtaggagtgtacatctctgtctctctctctctctctctctctctctctctctctctctctctctatctctctctctctgttcctccatttttcaccactctgtttgccaggcagacagcacagcgcattaattcactcgtccctccccagctcccagctcccatgccagcgcagtagatgctgcgagctaccacaccgaatacccacccatgctgcacacgatacgattgcagtcgcggtctcgctgctgtgggagtccctctgctctactgccgtgagagttgagacagcagacagacagcatggtgtggaagagctggggcgctgcgccatcgctgctgctgctgcgcattgctctgctcctcctcggcgctgcggcgccactctgctccggcgccggcgacgtcgccctcagtttcgcagccaccccgcgccgcgtctccaggtccacgtccgccgccttcgccttgcgggtcctgcgcgccaccggagggccttgcgccgactgcgtcgttacctgccagttggacggcgaggcagcgtcgctctgcggtgggacggcggcggcgagctatgcggggctcagggacggcaaccacagcttcacggcgtgcgcgagcacgacgtcagcttcgaactcgtcgtccagccccagccccacccccacctgcgccacctacgcttgggatgttgacactgtccccccgacggcgtccgtgtcggcggggccggcgttcacgagcgcgtcctccaccgtgtcggcgctcgtctccttctccgagccctgccccggccgcggtggattcgtctgcaacgccacctactgcaatctcatcgtgtacggctccggcagtgtggatccgtcgacgctccaggtgctgagccccggcctgcgctactccgtggccgtcgccatctcgccggacgccgagtacggccgcctcgtcctcgtcatgggcaggggcttctgcacggacgccgccggacacccgttcaccaggacgcccaactccactttcaccctgcgcttcgatcgaaggagcgactccatgaacatcaccgccaccgttgccgagaagatggtgcagatacagggcgtcaccaggctggttcaggccagcaacgaggaagagggcctgaggatatacctggccttcgcccagccggtgctcaactcgtcggagcagatcctgcgcgcgcttacagcgactgacgccgtcgccgtgcacctcacacccaccaacagaagcaccctcggcaaccgccgcttcggctacgttgtgaagaagatgtctgacgccgccgccattgtgagcgttgcctgcgacacaagctctattatcagcaggcaagggactccggtggttccagcagagccattcacgtttctttatgatacacagagaccttgggttaagctcggcacatcgactcggcggaccagctcacgcgacatcctcgtcctcatcaagtttgcaaagcctgtgttcaacttcagctcctcggcagtgcagctttcatgaagccagtaagagcatatacacgctgcagatacaggccgtcggtcagctggtatcggttcaggtagctgagaacgcggccatggacgtcgccgggaaccccaacctagcatcagaccgtcttcaagtcaggcactattctgtgcccgcgtcatcttcttggatcgcggcgatcaccaccgtcgtatttctgacaactgctgccgttgccgcgctcctcaccgtctccacgtcgtctctcgtcgctgccggagctgtctcgaggccctcttcctacatgatctcggagccatcaagaaatgtgctgaggatggcgtgccacatccaaatctttgctctgtcaagatggctgtcggccaacctgccgatcgagtactacgagttcgcaaagggggtagagtggagcataccctacatgcgtcttccatgggaaggcccagccgcagatccgtacctggggtactccacgatgcctgccatcgcgtactcggagtcggagctgctcgacaggagcgccgtcggcggcgctgcaaacatctcctcctatcgtcctcgagcacagcaaggtcagccggtgacgccagcgcagatcatcccgtcggatccggtattcccgacggagatccctgaagatgggaaacccacaccgccggtgcaaactccgggaggagacgccacgccgccggtgatgccagtgcagaccccgttgccgttggacgggatgccgctgacggcaatggagtaccgttccttcttcgagaacccggacatgaagcctgaggcacaaatcatcatgaagctacaagatttggatgggtggaagtacttcggcaggaacatgttctggctgggtgtcatcggcggcggcctcatcctcctgcacctcctcaccctcctctacttcaagctgaggtacagagacagggagcggcggcggcatggctacgccgcactgcttctccccaggctggagatcatggtcgtcgtcctggcgatgccgtgcgtcgcccaagcggcggcggcgctcatcaggggcgggaccacgtgcggcctggtggtcgggatcgtgctcaccgccgtcctgacgtcggtcctggtggccctgctgctgttcctgtctctgggcatcaccatgggcaagctgctgcagtacagggaggtgcaccatgaggaggggcaggaggagtaccactggtaccaggatctggcccgccgcacgctgggcgccggcaagcgcgggcagtggacgtggaaggacccgcgccgcgccgcctgcctgcccaggcttggcccgctcttcgaggacctgcgcggcccgcccaagtacacgcgtggcggtggaggcggcaagcgccgcgccgaaggcggcggaccagagcggcgggtcatcgcgtcggaggacgagaacgaggggtcgagggcgcccttggtgcagcagctcctcggcgtgctccgcatctacttgacgctgctggagtcggtgaagcgcgtggcggtgggcatcgtggccggcgcgcacgcgtcgtcggggcggtcgtcccgcgcgcacgccgtggcggtgctgtccgtcgcctcgttccagctcctgttcatgctgctcgggaagcccttcgtcaagaagcgggtgcagctggtggagaccctgtcggtggccagcgaggtggccgtgttcgcggcgtgcctggcgctcatcgacaggacggcatcgagtggcgggtggctgcccgacggcgaggcgcgcggcgtggggctggcgatgctgggcgccttcgtgctggggttcgcggcgcaggtgtgcaacgagtggaacgcgctgtaccggcaggcgcggctgctgagcgccgaccggagctccttcctggacggcgccaagacagcgggcctgggcctgctcgtgctggtgctgccgtcgtctgcgctcggcgaccaccgggatccgccacctcccgacggcggtggaggagccggggagagcgtgtcagcgtcgacggcggccgacgggggcaggggcgggagctccaacaacgagcggtggtggcttgggcagctgtgggagatggcgaaggctagcttcagcaaggagagtaatgcgatgacgtctagaattggctctggctcgcagatctcaaacagagctagtgctactactccaacaagtgcaggtgttgcgactgatactccgacaccgtcctcaagtgctgctgctgctggtactccaacacctatagatggaggtacagataatgtggttgtagctggggaagatggtaatgtaactgttggaagcaaaagaaagctcaaatctgatgtatggctagagtttgaacaagtgacagtaggaggcaaattaaaagctgaatgcaattggtgtaaaaagcattttgttggagatagtaaatctgacacaactcacttgcgtagtcatcttaaaacttgtcaatctaagcagtgtcaaaagggcctaaagcaatcaatattgaagttgggcaaaaatgagaagggaggagctgtagttgagaagtatgtttttgatcaagtggttgctagaaaagaacttgcgctaatgatctgtgtgcatgagtacccactttctatggttgatcatgttgggttcagaagattttgtgcagcactacaaccccttttcaaagtagtgtccagaaacactattaaaaaagacatattggatatgtatgaggtgcaaagactttctttagtgaattccttccaacagtgccaatctcgaattgctgtaactactgatatgtggacagcaaaccaccaaaagaaaggatacatgtcggttacagtacattttatcaatgatgattggaagctgaaatcttttcttttgaggtaatattttgtttcgtttcatgttctctact

SEQ ID NO: 72757 - DNA, 4475 bp, Zea Mays
tttcacctcagctgcctttcccttgcctactggactctgggagtagtagtaggagtgtacatctctgtctctctctctctctctctctctctctctctctctctctctctctatctctctctctctgttcctccatttttcaccactctgtttgccaggcagacagcacagcgcattaattcactcgtccctccccagctcccagctcccatgccagcgcagtagatgctgcgagctaccacaccgaatacccacccatgctgcacacgatacgattgcagtcgcggtctcgctgctgtgggagtccctctgctctactgccgtgagagttgagacagcagacagacagcatggtgtggaagagctggggcgctgcgccatcgctgctgctgctgcgcattgctctgctcctcctcggcgctgcggcgccactctgctccggcgccggcgacgtcgccctcagtttcgcagccaccccgcgccgcgtctccaggtccacgtccgccgccttcgccttgcgggtcctgcgcgccaccggagggccttgcgccgactgcgtcgttacctgccagttggacggcgaggcagcgtcgctctgcggtgggacggcggcggcgagctatgcggggctcagggacggcaaccacagcttcacggcgtgcgcgagcacgacgtcagcttcgaactcgtcgtccagccccagccccacccccacctgcgccacctacgcttgggatacactgtccccccgacggcgtccgtgtcggcggggccggcgttcacgagcgcgtcctccaccgtgtcggcgctcgtctccttctccgagccctgccccggccgcggtggattcgtctgcaacgccacctactgcaatctcatcgtgtacggctccggcagtgtggatccgtcgacgctccaggtgctgagccccggcctgcgctactccgtggccgtcgccatctcgccggacgccgagtacggccgcctcgtcctcgtcatgggcaggggcttctgcacggacgccgccggacacccgttcaccaggacgcccaactccactttcaccctgcgcttcgatcgaaggagcgactccatgaacatcaccgccaccgttgccgagaagatggtgcagatacagggcgtcaccaggctggttcaggccagcaacgaggaagagggcctgaggatatacctggccttcgcccagccggtgctcaactcgtcggagcagatcctgcgcgcgcttacagcgactgacgccgtcgccgtgcacctcacacccaccaacagaagcaccctcggcaaccgccgcttcggctacgttgtgaagaagatgtctgacgccgccgccattgtgagcgttgcctgcgacacaagctctattatcagcaggcaagggactccggtggttccagcagagccattcacgtttctttatgatacacagagaccttgggttaagctcggcacatcgactcggcggaccagctcacgcgacatcctcgtcctcatcaagtttgcaaagcctgtgttcaacttcagctcctcggcagtgcaggtgtctgggggcaatgtgttgagctttcatgaagccagtaagagcatatacacgctgcagatacaggccgtcggtcagctggtatcggttcaggtagctgagaacgcggccatggacgtcgccgggaaccccaacctagcatcagaccgtcttcaagtcaggcactattctgtgcccgcgtcatcttcttggatcgcggcgatcaccaccgtcgtatttctgacaactgctgccgttgccgcgctcctcaccgtctccacgtcgtctctcgtcgctgccggagctgtctcgaggccctcttcctacatgatctcggagccatcaagaaatgtgctgaggatggcgtgccacatccaaatctttgctctgtcaagatggctgtcggccaacctgccgatcgagtactacgagttcgcaaagggggtagagtggagcataccctacatgcgtcttccatgggaaggcccagccgcagatccgtacctggggtactccacgatgcctgccatcgcgtactcggagtcggagctgctcgacaggagcgccgtcggcggcgctgcaaacatctcctcctatcgtcctcgagcacagcaaggtcagccggtgacgccagcgcagatcatcccgtcggatccggtattcccgacggagatccctgaagatgggaaacccacaccgccggtgcaaactccgggaggagacgccacgccgccggtgatgccagtgcagaccccgttgccgttggacgggatgccgctgacggcaatggagtaccgttccttcttcgagaacccggacatgaagcctgaggcacaaatcatcatgaagctacaagatttggatgggtggaagtacttcggcaggaacatgttctggctgggtgtcatcggcggcggcctcatcctcctgcacctcctcaccctcctctacttcaagctgaggtacagagacagggagcggcggcggcatggctacgccgcactgcttctccccaggctggagatcatggtcgtcgtcctggcgatgccgtgcgtcgcccaagcggcggcggcgctcatcaggggcgggaccacgtgcggcctggtggtcgggatcgtgctcaccgccgtcctgacgtcggtcctggtggccctgctgctgttcctgtctctgggcatcaccatgggcaagctgctgcagtacagggaggtgcaccatgaggaggggcaggaggagtaccactggtaccaggatctggcccgccgcacgctgggcgccggcaagcgcgggcagtggacgtggaaggacccgcgccgcgccgcctgcctgcccaggcttggcccgctcttcgaggacctgcgcggcccgcccaagtacacgcgtggcggtggaggcggcaagcgccgcgccgaaggcggcggaccagagcggcgggtcatcgcgtcggaggacgagaacgaggggtcgagggcgcccttggtgcagcagctcctcggcgtgctccgcatctacttgacgctgctggagtcggtgaagcgcgtggcggtgggcatcgtggccggcgcgcacgcgtcgtcggggcggtcgtcccgcgcgcacgccgtggcggtgctgtccgtcgcctcgttccagctcctgttcatgctgctcgggaagcccttcgtcaagaagcgggtgcagctggtggagaccctgtcggtggccagcgaggtggccgtgttcgcggcgtgcctggcgctcatcgacaggacggcatcgagtggcgggtggctgcccgacggcgaggcgcgcggcgtggggctggcgatgctgggcgccttcgtgctggggttcgcggcgcaggtgtgcaacgagtggaacgcgctgtaccggcaggcgcggctgctgagcgccgaccggagctccttcctggacggcgccaagacagcgggcctgggcctgctcgtgctggtgctgccgtcgtctgcgctcggcgaccaccgggatccgccacctcccgacggcggtggaggagccggggagagcgtgtcagcgtcgacggcggccgacgggggcaggggcgggagctccaacaacgagcggtggtggcttgggcagctgtgggagatggcgaaggctagcttcagcaaggagagtaatgcgatgacgtctagaattggctctggctcgcagatctcaaacagagctagtgctactactccaacaagtgcaggtgttgcgactgatactccgacaccgtcctcaagtgctgctgctgctggtactccaacacctatagatggaggtacagataatgtggttgtagctggggaagatggtaatgtaactgttggaagcaaaagaaagctcaaatctgatgtatggctagagtttgaacaagtgacagtaggaggcaaattaaaagctgaatgcaattggtgtaaaaagcattttgttggagatagtaaatctgacacaactcacttgcgtagtcatcttaaaacttgtcaatctaagcagtgtcaaaagggcctaaagcaatcaatattgaagttgggcaaaaatgagaagggaggagctgtagttgagaagtatgtttttgatcaagtggttgctagaaaagaacttgcgctaatgatctgtgtgcatgagtacccactttctatggttgatcatgttgggttcagaagattttgtgcagcactacaaccccttttcaaagtagtgtccagaaacactattaaaaaagacatattggatatgtatgaggtgcaaagactttctttagtgaattccttccaacagtgccaatctcgaattgctgtaactactgatatgtggacagcaaaccaccaaaagaaaggatacatgtcggttacagtacattttatcaatgatgattggaagctgaaatcttttcttttgaggtaatattttgtttcgtttcatgttctctact

SEQ ID NO: 72758 - DNA, 4837 bp, Zea Mays
ctttcccttgcctactggactctgggagtagtagtaggagtgtacatctctgtctctctctctctctctctctctctctctctctctctctctctctatctctctctctctgttcctccatttttcaccactctgtttgccaggcagacagcacagcgcattaattcactcgtccctccccagctcccagctcccatgccagcgcagtagatgctgcgagctaccacaccgaatacccacccatgctgcacacgatacgattgcagtcgcggtctcgctgctgtgggagtccctctgctctactgccgtgagagttgagacagcagacagacagcatggtgtggaagagctggggcgctgcgccatcgctgctgctgctgcgcattgctctgctcctcctcggcgctgcggcgccactctgctccggcgccggcgacgtcgccctcagtttcgcagccaccccgcgccgcgtctccaggtccacgtccgccgccttcgccttgcgggtcctgcgcgccaccggagggccttgcgccgactgcgtcgttacctgccaggtaccacgatatacgcccggcattgctgcctgcctgcctgcctcaagcacacacggcgcagatgagcgctcaccatgcatgcatggctgcttccttgttcgtcgccctcctcctggctacttcatctgcagccatccttcttgtcctctcctagcaacgtacggaaccatatgtgctaggtggtgggttgattgaatttgatgcaggaacagcaacactaaggatcggtcggtcgatgcttgcttgtgtttgcatgtcatgtacgtccatgcagttggacggcgaggcagcgtcgctctgcggtgggacggcggcggcgagctatgcggggctcagggacggcaaccacagcttcacggcgtgcgcgagcacgacgtcagcttcgaactcgtcgtccagccccagccccacccccacctgcgccacctacgcttgggatgttggttgagtaacaaacaaaacctggctgcctgcctgccgccttcttctccgctgtgcatgtgacgactgtgaataatgacgcgagctctgcgccgttgcagacactgtccccccgacggcgtccgtgtcggcggggccggcgttcacgagcgcgtcctccaccgtgtcggcgctcgtctccttctccgagccctgccccggccgcggtggattcgtctgcaacgccacctactgcaatctcatcgtgtacggctccggcagtgtggatccgtcgacgctccaggtgctgagccccggcctgcgctactccgtggccgtcgccatctcgccggacgccgagtacggccgcctcgtcctcgtcatgggcaggggcttctgcacggacgccgccggacacccgttcaccaggacgcccaactccactttcaccctgcgcttcgatcgaaggagcgactccatgaacatcaccgccaccgttgccgagaagatggtgcagatacagggcgtcaccaggctggttcaggccagcaacgaggaagagggcctgaggatatacctggccttcgcccagccggtgctcaactcgtcggagcagatcctgcgcgcgcttacagcgactgacgccgtcgccgtgcacctcacacccaccaacagaagcaccctcggcaaccgccgcttcggctacgttgtgaagaagatgtctgacgccgccgccattgtgagcgttgcctgcgacacaagctctattatcagcaggcaagggactccggtggttccagcagagccattcacgtttctttatgatacacagagaccttgggttaagctcggcacatcgactcggcggaccagctcacgcgacatcctcgtcctcatcaagtttgcaaagcctgtgttcaacttcagctcctcggcagtgcaggtgtctgggggcaatgtgttgagctttcatgaagccagtaagagcatatacacgctgcagatacaggccgtcggtcagctggtatcggttcaggtagctgagaacgcggccatggacgtcgccgggaaccccaacctagcatcagaccgtcttcaagtcaggcactattctgtgcccgcgtcatcttcttggatcgcggcgatcaccaccgtcgtatttctgacaactgctgccgttgccgcgctcctcaccgtctccacgtcgtctctcgtcgctgccggagctgtctcgaggccctcttcctacatgatctcggagccatcaagaaatgtgctgaggatggcgtgccacatccaaatctttgctctgtcaagatggctgtcggccaacctgccgatcgagtactacgagttcgcaaagggggtagagtggagcataccctacatgcgtcttccatgggaaggcccagccgcagatccgtacctggggtactccacgatgcctgccatcgcgtactcggagtcggagctgctcgacaggagcgccgtcggcggcgctgcaaacatctcctcctatcgtcctcgagcacagcaaggtcagccggtgacgccagcgcagatcatcccgtcggatccggtattcccgacggagatccctgaagatgggaaacccacaccgccggtgcaaactccgggaggagacgccacgccgccggtgatgccagtgcagaccccgttgccgttggacgggatgccgctgacggcaatggagtaccgttccttcttcgagaacccggacatgaagcctgaggcacaaatcatcatgaagctacaagatttggatgggtggaagtacttcggcaggaacatgttctggctgggtgtcatcggcggcggcctcatcctcctgcacctcctcaccctcctctacttcaagctgaggtacagagacagggagcggcggcggcatggctacgccgcactgcttctccccaggctggagatcatggtcgtcgtcctggcgatgccgtgcgtcgcccaagcggcggcggcgctcatcaggggcgggaccacgtgcggcctggtggtcgggatcgtgctcaccgccgtcctgacgtcggtcctggtggccctgctgctgttcctgtctctgggcatcaccatgggcaagctgctgcagtacagggaggtgcaccatgaggaggggcaggaggagtaccactggtaccaggatctggcccgccgcacgctgggcgccggcaagcgcgggcagtggacgtggaaggacccgcgccgcgccgcctgcctgcccaggcttggcccgctcttcgaggacctgcgcggcccgcccaagtacacgcgtggcggtggaggcggcaagcgccgcgccgaaggcggcggaccagagcggcgggtcatcgcgtcggaggacgagaacgaggggtcgagggcgcccttggtgcagcagctcctcggcgtgctccgcatctacttgacgctgctggagtcggtgaagcgcgtggcggtgggcatcgtggccggcgcgcacgcgtcgtcggggcggtcgtcccgcgcgcacgccgtggcggtgctgtccgtcgcctcgttccagctcctgttcatgctgctcgggaagcccttcgtcaagaagcgggtgcagctggtggagaccctgtcggtggccagcgaggtggccgtgttcgcggcgtgcctggcgctcatcgacaggacggcatcgagtggcgggtggctgcccgacggcgaggcgcgcggcgtggggctggcgatgctgggcgccttcgtgctggggttcgcggcgcaggtgtgcaacgagtggaacgcgctgtaccggcaggcgcggctgctgagcgccgaccggagctccttcctggacggcgccaagacagcgggcctgggcctgctcgtgctggtgctgccgtcgtctgcgctcggcgaccaccgggatccgccacctcccgacggcggtggaggagccggggagagcgtgtcagcgtcgacggcggccgacgggggcaggggcgggagctccaacaacgagcggtggtggcttgggcagctgtgggagatggcgaaggctagcttcagcaaggagagtaatgcgatgacgtctagaattggctctggctcgcagatctcaaacagagctagtgctactactccaacaagtgcaggtgttgcgactgatactccgacaccgtcctcaagtgctgctgctgctggtactccaacacctatagatggaggtacagataatgtggttgtagctggggaagatggtaatgtaactgttggaagcaaaagaaagctcaaatctgatgtatggctagagtttgaacaagtgacagtaggaggcaaattaaaagctgaatgcaattggtgtaaaaagcattttgttggagatagtaaatctgacacaactcacttgcgtagtcatcttaaaacttgtcaatctaagcagtgtcaaaagggcctaaagcaatcaatattgaagttgggcaaaaatgagaagggaggagctgtagttgagaagtatgtttttgatcaagtggttgctagaaaagaacttgcgctaatgatctgtgtgcatgagtacccactttctatggttgatcatgttgggttcagaagattttgtgcagcactacaaccccttttcaaagtagtgtccagaaacactattaaaaaagacatattggatatgtatgaggtgcaaagactttctttagtgaattccttccaacagtgccaatctcgaattgctgtaactactgatatgtggacagcaaaccaccaaaagaaaggatacatgtcggttacagtacattttatcaatgatgattggaagctgaaatcttttcttttgaggtaatattttgtttcgtttcatgttctctact

SEQ ID NO: 72759 - DNA, 4807 bp, Zea Mays
ggagtgtacatctctgtctctctctctctctctctctctctctctctctctctctctctctatctctctctctctgttcctccatttttcaccactctgtttgccaggcagacagcacagcgcattaattcactcgtccctccccagctcccagctcccatgccagcgcagtagatgctgcgagctaccacaccgaatacccacccatgctgcacacgatacgattgcagtcgcggtctcgctgctgtgggagtccctctgctctactgccgtgagagttgagacagcagacagacagcatggtgtggaagagctggggcgctgcgccatcgctgctgctgctgcgcattgctctgctcctcctcggcgctgcggcgccactctgctccggcgccggcgacgtcgccctcagtttcgcagccaccccgcgccgcgtctccaggtccacgtccgccgccttcgccttgcgggtcctgcgcgccaccggagggccttgcgccgactgcgtcgttacctgccaggtaccacgatatacgcccggcattgctgcctgcctgcctgcctcaagcacacacggcgcagatgagcgctcaccatgcatgcatggctgcttccttgttcgtcgccctcctcctggctacttcatctgcagccatccttcttgtcctctcctagcaacgtacggaaccatatgtgctaggtggtgggttgattgaatttgatgcaggaacagcaacactaaggatcggtcggtcgatgcttgcttgtgtttgcatgtcatgtacgtccatgcagttggacggcgaggcagcgtcgctctgcggtgggacggcggcggcgagctatgcggggctcagggacggcaaccacagcttcacggcgtgcgcgagcacgacgtcagcttcgaactcgtcgtccagccccagccccacccccacctgcgccacctacgcttgggatgttggttgagtaacaaacaaaacctggctgcctgcctgccgccttcttctccgctgtgcatgtgacgactgtgaataatgacgcgagctctgcgccgttgcagacactgtccccccgacggcgtccgtgtcggcggggccggcgttcacgagcgcgtcctccaccgtgtcggcgctcgtctccttctccgagccctgccccggccgcggtggattcgtctgcaacgccacctactgcaatctcatcgtgtacggctccggcagtgtggatccgtcgacgctccaggtgctgagccccggcctgcgctactccgtggccgtcgccatctcgccggacgccgagtacggccgcctcgtcctcgtcatgggcaggggcttctgcacggacgccgccggacacccgttcaccaggacgcccaactccactttcaccctgcgcttcgatcgaaggagcgactccatgaacatcaccgccaccgttgccgagaagatggtgcagatacagggcgtcaccaggctggttcaggccagcaacgaggaagagggcctgaggatatacctggccttcgcccagccggtgctcaactcgtcggagcagatcctgcgcgcgcttacagcgactgacgccgtcgccgtgcacctcacacccaccaacagaagcaccctcggcaaccgccgcttcggctacgttgtgaagaagatgtctgacgccgccgccattgtgagcgttgcctgcgacacaagctctattatcagcaggcaagggactccggtggttccagcagagccattcacgtttctttatgatacacagagaccttgggttaagctcggcacatcgactcggcggaccagctcacgcgacatcctcgtcctcatcaagtttgcaaagcctgtgttcaacttcagctcctcggcagtgcagcttattacaaacaccttgggttgtttcagctttcatgaagccagtaagagcatatacacgctgcagatacaggccgtcggtcagctggtatcggttcaggtagctgagaacgcggccatggacgtcgccgggaaccccaacctagcatcagaccgtcttcaagtcaggcactattctgtgcccgcgtcatcttcttggatcgcggcgatcaccaccgtcgtatttctgacaactgctgccgttgccgcgctcctcaccgtctccacgtcgtctctcgtcgctgccggagctgtctcgaggccctcttcctacatgatctcggagccatcaagaaatgtgctgaggatggcgtgccacatccaaatctttgctctgtcaagatggctgtcggccaacctgccgatcgagtactacgagttcgcaaagggggtagagtggagcataccctacatgcgtcttccatgggaaggcccagccgcagatccgtacctggggtactccacgatgcctgccatcgcgtactcggagtcggagctgctcgacaggagcgccgtcggcggcgctgcaaacatctcctcctatcgtcctcgagcacagcaaggtcagccggtgacgccagcgcagatcatcccgtcggatccggtattcccgacggagatccctgaagatgggaaacccacaccgccggtgcaaactccgggaggagacgccacgccgccggtgatgccagtgcagaccccgttgccgttggacgggatgccgctgacggcaatggagtaccgttccttcttcgagaacccggacatgaagcctgaggcacaaatcatcatgaagctacaagatttggatgggtggaagtacttcggcaggaacatgttctggctgggtgtcatcggcggcggcctcatcctcctgcacctcctcaccctcctctacttcaagctgaggtacagagacagggagcggcggcggcatggctacgccgcactgcttctccccaggctggagatcatggtcgtcgtcctggcgatgccgtgcgtcgcccaagcggcggcggcgctcatcaggggcgggaccacgtgcggcctggtggtcgggatcgtgctcaccgccgtcctgacgtcggtcctggtggccctgctgctgttcctgtctctgggcatcaccatgggcaagctgctgcagtacagggaggtgcaccatgaggaggggcaggaggagtaccactggtaccaggatctggcccgccgcacgctgggcgccggcaagcgcgggcagtggacgtggaaggacccgcgccgcgccgcctgcctgcccaggcttggcccgctcttcgaggacctgcgcggcccgcccaagtacacgcgtggcggtggaggcggcaagcgccgcgccgaaggcggcggaccagagcggcgggtcatcgcgtcggaggacgagaacgaggggtcgagggcgcccttggtgcagcagctcctcggcgtgctccgcatctacttgacgctgctggagtcggtgaagcgcgtggcggtgggcatcgtggccggcgcgcacgcgtcgtcggggcggtcgtcccgcgcgcacgccgtggcggtgctgtccgtcgcctcgttccagctcctgttcatgctgctcgggaagcccttcgtcaagaagcgggtgcagctggtggagaccctgtcggtggccagcgaggtggccgtgttcgcggcgtgcctggcgctcatcgacaggacggcatcgagtggcgggtggctgcccgacggcgaggcgcgcggcgtggggctggcgatgctgggcgccttcgtgctggggttcgcggcgcaggtgtgcaacgagtggaacgcgctgtaccggcaggcgcggctgctgagcgccgaccggagctccttcctggacggcgccaagacagcgggcctgggcctgctcgtgctggtgctgccgtcgtctgcgctcggcgaccaccgggatccgccacctcccgacggcggtggaggagccggggagagcgtgtcagcgtcgacggcggccgacgggggcaggggcgggagctccaacaacgagcggtggtggcttgggcagctgtgggagatggcgaaggctagcttcagcaaggagagtaatgcgatgacgtctagaattggctctggctcgcagatctcaaacagagctagtgctactactccaacaagtgcaggtgttgcgactgatactccgacaccgtcctcaagtgctgctgctgctggtactccaacacctatagatggaggtacagataatgtggttgtagctggggaagatggtaatgtaactgttggaagcaaaagaaagctcaaatctgatgtatggctagagtttgaacaagtgacagtaggaggcaaattaaaagctgaatgcaattggtgtaaaaagcattttgttggagatagtaaatctgacacaactcacttgcgtagtcatcttaaaacttgtcaatctaagcagtgtcaaaagggcctaaagcaatcaatattgaagttgggcaaaaatgagaagggaggagctgtagttgagaagtatgtttttgatcaagtggttgctagaaaagaacttgcgctaatgatctgtgtgcatgagtacccactttctatggttgatcatgttgggttcagaagattttgtgcagcactacaaccccttttcaaagtagtgtccagaaacactattaaaaaagacatattggatatgtatgaggtgcaaagactttctttagtgaattccttccaacagtgccaatctcgaattgctgtaactactgatatgtggacagcaaaccaccaaaagaaaggatacatgtcggttacagtacattttatcaatgatgattggaagctgaaatcttttcttttgaggtaatattttgtttcgtttcatgttctctact

SEQ ID NO: 72760 - DNA, 1795 bp, Zea Mays
ccgtcgccgtgtcggacgggacgggagcatcaggcggcgcagagcagtttcctctttccccttcttcttcaactctcctcttcctcctcacgcacctgcttcatcaactacatacatatatatacaggcagcattaccatggatcctccatggctgctcttgattatgtcctcaggactcaggtaataccctagctagcatgggccgagatcaagctgcatcgcatctgatcgggcaggggccggagttcctgatgaacaagatacatatataggtagtagaaactaaacagattaaagacacatatgcagtggcttcagctaatcttcaagactgcaaacgtaaggatacagagctagctgcttgaggtgggatcatgcaagactgcttaattacctacctatagcttaacttgaagcgcctgctgcagtttgtgcaaaactgcagcttcattttctctttcagctcataccttgagctgtttatttatttttgggatgtcgattatatgcgacgaatcagtcgaatttcaccttcattaattcagttggtcccacagttagcactctctgctgacagtgcaagcttcagggacgaagatgcaatgaaggtgctctctgcctcctaaaacgggtacgtccaagcatcaggatcatgtgcatgactcgcagccgacaagaggaatcggatcatggaggccactgcagttaaaatatacagaagcgcaagttttcactgtcatgtcggatggtgcggcggcatgcaggcgtgggttgccactgatgcccacatgacgctcctcggggcctgcaattgattatatgctcacttgcaactaactcactcactaataatacttactcctgtcctgcagctctgtctgcttaagcctgtagctagctctagctatataaagagacatggccatgtcaagctgcctgaaccaacatatcgcagcaagctaagctaacctattctgccattgccgcttctgtcgcacaagttagtaaggaagcctgaggatgaagaccaaggcggctgggagccgagcagccgctggagctggagggttcggcagatctctcagggagcagagggccaaggtgtacatcgccatgagatgcgtcgtcatgctcctcaggtggcatgactgatctctatgcactgactcactgatccggcaagaattttgacgtctgagcatagcattctttgttttcttcttgcttgcttgttctccggttaccagaatggtagggagagcaggcaggccaggtgatgtatgtaactgcagttgtagagaactctagctagagatggatggtgctaacagattcatcagataatgtaactgctgtattcagattctttgtccaagctacagtaaactatctctcccctcagtcctccccacagctctcttgaattctatctgtgtgtgtgtgtcccctgtgacatgaacaaccaacaaccaaagcaaaagcaatggagcagggccgtgatcattttcatccattctgtacaggctaagctcctactgtgactaccgctgtagagaactctcgagcacagagagcgagtccgacccttcatgcttgctctgcgcgggcgtcgtcctcctcgaatgccgcttcgtcggcacgatcacctcctcctccatccacccatcgtcgtccatcaccgagtacctgtcgtcgccttcgtcccccttgaacaccgggtgcaggtacgagttggccaggtacgccttcagatccaagttgggctcccgggcgcgttctagggtgtccttctt

SEQ ID NO: 72761 - DNA, 1498 bp, Zea Mays
gaatttccaaatcagagcactcttttgtggatggacaaatttctgatgactagagttgctagctagctggctggctgtttatgcgccgtcgcagtcgccgccgccgtctccccacaatcgaaaagagaagaagaagaagaagaaaatgggaacttggtacagccatccatggtatcagaatatgacctgggaggagaaggggacctgttcaaagctccagaagccatcatcgaggaaccgctgctcagcctcgatcctgtcgcagctgccttttcaatgatggctggcaatggaagtgctgtcatggatcaaactattaaggacgcaggcatcggcaccatccaaaatgaccccctcctgagtgaggtgctgtacgagtgcgagaaggaactcatggagaagtccacaatcgaagagacaatttctgaacttatggatgttaagattcctatgctgcaagttgaagaaatcccaagccaagctgaacaggttcttatacagaaccagcagctcccggccatggagaaagagaagcaatccgttcctgaatgctcgctccaaaaaagtgttagttctggatgcctcaactcagcagattggatgaatggacctgccaggccaaactttctagacttccaggggctggactttgaggcagcatttgggctgaggagagcttacagcgaaaggagacattcagaaccttggagccaacacgcctcgaccagcagcaaatgtttgtgtgaccatcagtgacctcaagaccgaagaaaggaagcaaaagctttccaggtataggaagaagaagatcaagcggaactttggcaggaagatcaagtacgcgtgcaggaaggctctggcagacagccagccaagagtgcgagggagatttgccaagatcgaagaatgcgacctgctgaagccaagcaagtagatccaagtatgcttggttttggcttctagctaggcgccgctccatcgtccttaccttgtgcgctggagaggcgccgcgatgcccgtcggaattcattcaattgacctctcctgtttctctcgggcagcatgctgtgtaataataatctcctccgggcccttgggtgcgagtgaagagctgaaaatttggtatggtagtctagcccccctgtactgtacaaaaggcttgaagatggtaataaaactcagctcccctcttgcttgcttggcattttttttaatgttatctgaatctgactgttagcattgtgctcctgaacatggatcattgggcaacaggaggaaaggtaacagaatatgatcatggtttcatattgtcctatcatgatggcattctgtccgtcaaataataataatgtctaatcccacagctctagaataatatgtacccccaaaaacaagaccaagctatcatgatggtatggatatggtgtaatatagatccaaaatctcatcgcaagtaatgtctaatcacacagctccagaatagcatctaccctctcac

SEQ ID NO: 72762 - DNA, 409 bp, Zea Mays
attcatatgaaacacacttcgttataccgaagttcagatgttttgagcaacttcgacaaggcagactccaagccaaggggaaattctcctcctcctcctccccagctgcggcagctaccaagcgtggaaccaccaccagcagcagcagaggtagaggtagagggaaggccgacaagaaggtctactccttgcccggccagaagttcgatcctccggaggagagggagcctctcaggattttctacgagtcactgtccaagcagatcccctccagtgagatggctgaattctggtatgcattatgctttctcccctcacccgatggacgatcagtatttagtagtaaattcttatgctgcaaagaaatacctttcttggattggactgacatgctaacgttcaaagtagc

SEQ ID NO: 72763 - DNA, 726 bp, Zea Mays
atagtccactaaaggcaagaagtaggagagagaaacaaacctacgtgcatatacgacgatttaaaagaagtataaggattttttaaaggaaccacggtgaaaacgagaaagagtacatactcctttagagaagttagatttgtagataaaaaaagctgcttaaacgactactgtaatagcaaaatactcgaacggaacgaagatttggcatcacccaccccctagctggcgtttcttaatttcacgtggagcgaatgctgctcctgctcggcatcggctgctctgctgccgtggcccgtgcgtgggatttagctcaggaacccacgcctgacatcccctcttcctccccggccggcgatgtcgtcttcgtcttccgcgctggccaaaggccaaggggaaattctcctcctcctcctccccagctgcggcagctaccaagcgtggaaccaccaccagcagcagcagaggtagaggtagagggaaggccgacaagaaggtctactccttgcccggccagaagttcgatcctccggaggagagggagcctctcaggattttctacgagtcactgtccaagcagatcccctccagtgagatggctgaattctggtatgcattatgctttctcccctcacccgatggacgatcagtatttagtagtaaattcttatgctgcaaagaaatacctttcttggattggactgacatgctaacgttcaaagtagc

SEQ ID NO: 72764 - DNA, 2210 bp, Zea Mays
ctttcctccaaaatctccgccgggtccgtcctctcccgcttccgcttcccctcagccgtcacctccccgctcccaccgccaccaatcgcactcgcagtggctgttggcgtgcgctcgcgtccaaaccaagcaaaccccacaaatcctaccttccgccggcgtcgccaccggccgtgctccctccctccggccccggttgaccctagcctcgcatcaccctaaccctacccccctcccgccgctgccagagcaggggaaaaagatgccgcgcgagatcatcacgatccaggtggggcaatgcgggaaccagatcgggatggagttctggaagcagctctgcctcgagcacggcatcggcaaggacggcctcctcgaggacttcgccactcaggggggcgacaggaaggatgtcttcttttaccaggctgatgatcagcacttcatacccaggtctctgcttattgacctggagccgagagtgatcaatgggattcagaacagcgagtacaggaacctgtacaaccatgagaacatatttgttgctgagcacggtggtggtgccgggaacaactgggccagtgggtatcatcagggtgaacaatttgttgatgatatcatggacatggttgacagagaagctgatggaagtgatagccttgagggttttgtcctgtgccactctattgctggtggaactggttcaggtatgggttcttatctattggagacactgaatgatcgatacagtaaaaagcttgtgcagacatatagtgttttcccaaatcaggtggaaacaagtgatgttgtcgtccaaccttacaactcacttttgactctgaagcggctgacactgaatgctgactgtgtggttgttcttgacaatacggctcttaataggattgccgtcgagcgccttcatctatcaaatcctacgtttgcacaaacaaactctttggtctccacggttatgtctgcaagcacaactactttaaggtatcctggatatatgaacaatgatctggttggccttcttgcctccttgattcccactccaaggtgtcattttttgatgacaggttatactccgttgactgtcgagcgccaggttaacatgatacgcaaaacgacggtattggatgttatgagaagacttctgcagacaaagaatataatggtgtcatcatatgctcgaacaaaagaagctagccaggctaaatacatctccatattgaacatcattcaaggggaggtggaccctacacaggttcacgagagcctgcaaagaatacgcgaaaggaagcttgttaactttatagactgggcacctgcaagcattcaggttgctttgtcaagaaaatccccttatgttcaaacaacccacagggttagtggtctgatgttagcaaatcatacaagcatccgtcatttattcagcaaatgcctgggacaatatgaaaagctaaggaaaaagcaggcttttcttgacaactacaggaagttcccaatgtttgcggacaatgatctatctgaatttgatgaatctcgagagataatagagagcctagttgatgaatacaaggcctgcgagtcgcctgactacatcaaatggggaatggaggaccctggagaggcaaatgttgtggcggcacttgactctaagttggtagtgtaaatataaagtgttgtgcagcaatccacgcaactgaggaagtgctgtctacaatctacattcaagtcatgttggtcatccagaccaaatatgctactgtcacatctagtagtcatcagtttgacgccgcctgcttctatagatccaatcggagtgcagccaaagagagcagtctatgggacgtgtcccacctaaagtgaagacctgcaaaggacaccaccattgggagtctatcggacgtgtcgcacctaaagtggagacctgcaaaggacacgaccattgggcatgacaactcgagcagtagcaactgcttagaaggttaatattcataacaatggtcacatagaagcaccacggtggaatggctccatctgctcgtggatttgtaaaagcgaaagtagtggtccccacaagggcggagccaggattatgatagaagaggggccgaccaattcatcaatactgtatgataaaataatattgtatattgttatcaagtttaagcactcagcatgaaataaaaattctagatctttacaaa

SEQ ID NO: 72765 - DNA, 1854 bp, Zea Mays
ctctcccgcttccgcttcccctcagccgtcacctccccgctcccaccgccaccaatcgcactcgcagtggctgttggcgtgcgctcgcgtccaaaccaagcaaaccccacaaatcctaccttccgccggcgtcgccaccggccgtgctccctccctccggccccggttgaccctagcctcgcatcaccctaaccctacccccctcccgccgctgccagagcaggggaaaaagatgccgcgcgagatcatcacgatccaggtggggcaatgcgggaaccagatcgggatggagttctggaagcagctctgcctcgagcacggcatcggcaaggacggcctcctcgaggacttcgccactcaggtctctgcttattgacctggagccgagagtgatcaatgggattcagaacagcgagtacaggaacctgtacaaccatgagaacatatttgttgctgagcacggtggtggtgccgggaacaactgggccagtgggtatcatcagggtgaacaatttgttgatgatatcatggacatggttgacagagaagctgatggaagtgatagccttgagggttttgtcctgtgccactctattgctggtggaactggttcaggtatgggttcttatctattggagacactgaatgatcgatacagtaaaaagcttgtgcagacatatagtgttttcccaaatcaggattgccgtcgagcgccttcatctatcaaatcctacgtttgcacaaacaaactctttggtctccacggttatgtctgcaagcacaactactttaaggtatcctggatatatgaacaatgatctggttggccttcttgcctccttgattcccactccaaggtgtcattttttgatgacaggttatactccgttgactgtcgagcgccaggttaacatgatacgcaaaacgacggtattggatgttatgagaagacttctgcagacaaagaatataatggtgtcatcatatgctcgaacaaaagaagctagccaggctaaatacatctccatattgaacatcattcaaggggaggtggaccctacacaggttcacgagagcctgcaaagaatacgcgaaaggaagcttgttaactttatagactgggcacctgcaagcattcaggttgctttgtcaagaaaatccccttatgttcaaacaacccacagggttagtggtctgatgttagcaaatcatacaagcatccgtcatttattcagcaaatgcctgggacaatatgaaaagctaaggaaaaagcaggcttttcttgacaactacaggaagttcccaatgtttgcgataatagagagcctagttgatgaatacaaggcctgcgagtcgcctgactacatcaaatggggaatggaggaccctggagaggcaaatgttgtggcggcacttgactctaagttggtagtgtaaatataaagtgttgtgcagcaatccacgcaactgaggaagtgctgtctacaatctacattcaagtcatgttggtcatccagaccaaatatgctactgtcacatctagtagtcatcagtttgacgccgcctgcttctatagatccaatcggagtgcagccaaagtgggttttgacgttatttcgacctcaaatttgcctttagtctgtgctatgtatatttcgaaacccacttcctctggcctgttttcatttctttagggctagtttggtaacaccatttttccaagggatttttattttctcaagtgaaattagttcattttcccaaacgaaaattgaaatctcttgggaaaatgttgttcgcaaactatcccttactatatttattgagaatctcccttcgtgcgttgcctcctgc

SEQ ID NO: 72766 - DNA, 1665 bp, Zea Mays
ctctcccgcttccgcttcccctcagccgtcacctccccgctcccaccgccaccaatcgcactcgcagtggctgttggcgtgcgctcgcgtccaaaccaagcaaaccccacaaatcctaccttccgccggcgtcgccaccggccgtgctccctccctccggccccggttgaccctagcctcgcatcaccctaaccctacccccctcccgccgctgccagagcaggggaaaaagatgccgcgcgagatcatcacgatccaggtggggcaatgcgggaaccagatcgggatggagttctggaagcagctctgcctcgagcacggcatcggcaaggacggcctcctcgaggacttcgccactcagggtgaacaatttgttgatgatatcatggacatggttgacagagaagctgatggaagtgatagccttgagggttttgtcctgtgccactctattgctggtggaactggttcaggtatgggttcttatctattggagacactgaatgatcgatacagtaaaaagcttgtgcagacatatagtgttttcccaaatcaggattgccgtcgagcgccttcatctatcaaatcctacgtttgcacaaacaaactctttggtctccacggttatgtctgcaagcacaactactttaaggttatactccgttgactgtcgagcgccaggttaacatgatacgcaaaacgacggtattggatgttatgagaagacttctgcagacaaagaatataatggtgtcatcatatgctcgaacaaaagaagctagccaggctaaatacatctccatattgaacatcattcaaggggaggtggaccctacacaggttcacgagagcctgcaaagaatacgcgaaaggaagcttgttaactttatagactgggcacctgcaagcattcaggttgctttgtcaagaaaatccccttatgttcaaacaacccacagggttagtggtctgatgttagcaaatcatacaagcatccgtcatttattcagcaaatgcctgggacaatatgaaaagctaaggaaaaagcaggcttttcttgacaactacaggaagttcccaatgtttgcggacaatgatctatctgaatttgatgaatctcgagagataatagagagcctagttgatgaatacaaggcctgcgagtcgcctgactacatcaaatggggaatggaggaccctggagaggcaaatgttgtggcggcacttgactctaagttggtagtgtaaatataaagtgttgtgcagcaatccacgcaactgaggaagtgctgtctacaatctacattcaagtcatgttggtcatccagaccaaatatgctactgtcacatctagtagtcatcagtttgacgccgcctgcttctatagatccaatcggagtgcagccaaagtgggttttgacgttatttcgacctcaaatttgcctttagtctgtgctatgtatatttcgaaacccacttcctctggcctgttttcatttctttagggctagtttggtaacaccatttttccaagggatttttattttctcaagtgaaattagttcattttcccaaacgaaaattgaaatctcttgggaaaatgttgttcgcaaactatcccttactatatttattgagaatctcccttcgtgcgttgcctcctgc

SEQ ID NO: 72767 - DNA, 1655 bp, Zea Mays
ctctcccgcttccgcttcccctcagccgtcacctccccgctcccaccgccaccaatcgcactcgcagtggctgttggcgtgcgctcgcgtccaaaccaagcaaaccccacaaatcctaccttccgccggcgtcgccaccggccgtgctccctccctccggccccggttgaccctagcctcgcatcaccctaaccctacccccctcccgccgctgccagagcaggggaaaaagatgccgcgcgagatcatcacgatccaggtggggcaatgcgggaaccagatcgggatggagttctggaagcagctctgcctcgagcacggcatcggcaaggacggcctcctcgaggacttcgccactcagggtgaacaatttgttgatgatatcatggacatggttgacagagaagctgatggaagtgatagccttgagggttttgtcctgtgccactctattgctggtggaactggttcaggtatgggttcttatctattggagacactgaatgatcgatacagtaaaaagcttgtgcagacatatagtgttttcccaaatcaggattgccgtcgagcgccttcatctatcaaatcctacgtttgcacaaacaaactctttggtctccacggttatgtctgcaagcacaactactttaaggttatactccgttgactgtcgagcgccaggttaacatgatacgcaaaacgacggtattggatgttatgagaagacttctgcagacaaagaatataatggtgtcatcatatgctcgaacaaaagaagctagccaggctaaatacatctccatattgaacatcattcaaggggaggtggaccctacacaggttcacgagagcctgcaaagaatacgcgaaaggaagcttgttaactttatagactgggcacctgcaagcattcaggttgctttgtcaagaaaatccccttatgttcaaacaacccacagggttagtggtctgatgttagcaaatcatacaagcatccgtcatttattcagcaaatgcctgggacaatatgaaaagctaaggaaaaagcaggcttttcttgacaactacaggaagttcccaatgtttgcggacaatgatctatctgaatttgatgaatctcgagagataatagagagcctagttgatgaatacaaggcctgcgagtcgcctgactacatcaaatggggaatggaggaccctggagaggcaaatgttgtggcggcacttgactctaagttggtagtgtaaatataaagcaatccacgcaactgaggaagtgctgtctacaatctacattcaagtcatgttggtcatccagaccaaatatgctactgtcacatctagtagtcatcagtttgacgccgcctgcttctatagatccaatcggagtgcagccaaagtgggttttgacgttatttcgacctcaaatttgcctttagtctgtgctatgtatatttcgaaacccacttcctctggcctgttttcatttctttagggctagtttggtaacaccatttttccaagggatttttattttctcaagtgaaattagttcattttcccaaacgaaaattgaaatctcttgggaaaatgttgttcgcaaactatcccttactatatttattgagaatctcccttcgtgcgttgcctcctgc

SEQ ID NO: 72768 - DNA, 1856 bp, Zea Mays
ctctcccgcttccgcttcccctcagccgtcacctccccgctcccaccgccaccaatcgcactcgcagtggctgttggcgtgcgctcgcgtccaaaccaagcaaaccccacaaatcctaccttccgccggcgtcgccaccggccgtgctccctccctccggccccggttgaccctagcctcgcatcaccctaaccctacccccctcccgccgctgccagagcaggggaaaaagatgccgcgcgagatcatcacgatccaggtggggcaatgcgggaaccagatcgggatggagttctggaagcagctctgcctcgagcacggcatcggcaaggacggcctcctcgaggacttcgccactcaggggggcgacaggaaggatgtcttcttttaccaggctgatgatcagcacttcatacccaggtctctgcttattgacctggagccgagagtgatcaatgggattcagaacagcgagtacaggaacctgtacaaccatgagaacatatttgttgctgagcacggtggtggtgccgggaacaactgggccagtgggtatcatcagggtgaacaatttgttgatgatatcatggacatggttgacagagaagctgatggaagtgatagccttgagggttttgtcctgtgccactctattgctggtggaactggttcaggtatgggttcttatctattggagacactgaatgatcgatacagtaaaaagcttgtgcagacatatagtgttttcccaaatcaggattgccgtcgagcgccttcatctatcaaatcctacgtttgcacaaacaaactctttggtctccacggttatgtctgcaagcacaactactttaaggttatactccgttgactgtcgagcgccaggttaacatgatacgcaaaacgacggtattggatgttatgagaagacttctgcagacaaagaatataatggtgtcatcatatgctcgaacaaaagaagctagccaggctaaatacatctccatattgaacatcattcaaggggaggtggaccctacacaggttcacgagagcctgcaaagaatacgcgaaaggaagcttgttaactttatagactgggcacctgcaagcattcaggttgctttgtcaagaaaatccccttatgttcaaacaacccacagggttagtggtctgatgttagcaaatcatacaagcatccgtcatttattcagcaaatgcctgggacaatatgaaaagctaaggaaaaagcaggcttttcttgacaactacaggaagttcccaatgtttgcggacaatgatctatctgaatttgatgaatctcgagagataatagagagcctagttgatgaatacaaggcctgcgagtcgcctgactacatcaaatggggaatggaggaccctggagaggcaaatgttgtggcggcacttgactctaagttggtagtgtaaatataaagcaatccacgcaactgaggaagtgctgtctacaatctacattcaagtcatgttggtcatccagaccaaatatgctactgtcacatctagtagtcatcagtttgacgccgcctgcttctatagatccaatcggagtgcagccaaagtgggttttgacgttatttcgacctcaaatttgcctttagtctgtgctatgtatatttcgaaacccacttcctctggcctgttttcatttctttagggctagtttggtaacaccatttttccaagggatttttattttctcaagtgaaattagttcattttcccaaacgaaaattgaaatctcttgggaaaatgttgttcgcaaactatcccttactatatttattgagaatctcccttcgtgcgttgcctcctgc

SEQ ID NO: 72769 - DNA, 1913 bp, Zea Mays
ctctcccgcttccgcttcccctcagccgtcacctccccgctcccaccgccaccaatcgcactcgcagtggctgttggcgtgcgctcgcgtccaaaccaagcaaaccccacaaatcctaccttccgccggcgtcgccaccggccgtgctccctccctccggccccggttgaccctagcctcgcatcaccctaaccctacccccctcccgccgctgccagagcaggggaaaaagatgccgcgcgagatcatcacgatccaggtggggcaatgcgggaaccagatcgggatggagttctggaagcagctctgcctcgagcacggcatcggcaaggacggcctcctcgaggacttcgccactcaggggggcgacaggaaggatgtcttcttttaccaggctgatgatcagcacttcatacccaggtctctgcttattgacctggagccgagagtgatcaatgggattcagaacagcgagtacaggaacctgtacaaccatgagaacatatttgttgctgagcacggtggtggtgccgggaacaactgggccagtgggtatcatcagggtgaacaatttgttgatgatatcatggacatggttgacagagaagctgatggaagtgatagccttgagggttttgtcctgtgccactctattgctggtggaactggttcaggtatgggttcttatctattggagacactgaatgatcgatacagtaaaaagcttgtgcagacatatagtgttttcccaaatcaggattgccgtcgagcgccttcatctatcaaatcctacgtttgcacaaacaaactctttggtctccacggttatgtctgcaagcacaactactttaaggtatcctggatatatgaacaatgatctggttggccttcttgcctccttgattcccactccaaggtgtcattttttgatgacaggttatactccgttgactgtcgagcgccaggttaacatgatacgcaaaacgacggtattggatgttatgagaagacttctgcagacaaagaatataatggtgtcatcatatgctcgaacaaaagaagctagccaggctaaatacatctccatattgaacatcattcaaggggaggtggaccctacacaggttcacgagagcctgcaaagaatacgcgaaaggaagcttgttaactttatagactgggcacctgcaagcattcaggttgctttgtcaagaaaatccccttatgttcaaacaacccacagggttagtggtctgatgttagcaaatcatacaagcatccgtcatttattcagcaaatgcctgggacaatatgaaaagctaaggaaaaagcaggcttttcttgacaactacaggaagttcccaatgtttgcgataatagagagcctagttgatgaatacaaggcctgcgagtcgcctgactacatcaaatggggaatggaggaccctggagaggcaaatgttgtggcggcacttgactctaagttggtagtgtaaatataaagtgttgtgcagcaatccacgcaactgaggaagtgctgtctacaatctacattcaagtcatgttggtcatccagaccaaatatgctactgtcacatctagtagtcatcagtttgacgccgcctgcttctatagatccaatcggagtgcagccaaagtgggttttgacgttatttcgacctcaaatttgcctttagtctgtgctatgtatatttcgaaacccacttcctctggcctgttttcatttctttagggctagtttggtaacaccatttttccaagggatttttattttctcaagtgaaattagttcattttcccaaacgaaaattgaaatctcttgggaaaatgttgttcgcaaactatcccttactatatttattgagaatctcccttcgtgcgttgcctcctgc

SEQ ID NO: 72770 - DNA, 2121 bp, Zea Mays
ctctcccgcttccgcttcccctcagccgtcacctccccgctcccaccgccaccaatcgcactcgcagtggctgttggcgtgcgctcgcgtccaaaccaagcaaaccccacaaatcctaccttccgccggcgtcgccaccggccgtgctccctccctccggccccggttgaccctagcctcgcatcaccctaaccctacccccctcccgccgctgccagagcaggggaaaaagatgccgcgcgagatcatcacgatccaggtggggcaatgcgggaaccagatcgggatggagttctggaagcagctctgcctcgagcacggcatcggcaaggacggcctcctcgaggacttcgccactcaggtctctgcttattgacctggagccgagagtgatcaatgggattcagaacagcgagtacaggaacctgtacaaccatgagaacatatttgttgctgagcacggtggtggtgccgggaacaactgggccagtgggtatcatcagggtgaacaatttgttgatgatatcatggacatggttgacagagaagctgatggaagtgatagccttgagggttttgtcctgtgccactctattgctggtggaactggttcaggtatgggttcttatctattggagacactgaatgatcgatacagtaaaaagcttgtgcagacatatagtgttttcccaaatcaggtggaaacaagtgatgttgtcgtccaaccttacaactcacttttgactctgaagcggctgacactgaatgctgactgtgtggttgttcttgacaatacggctcttaataggattgccgtcgagcgccttcatctatcaaatcctacgtttgcacaaacaaactctttggtctccacggttatgtctgcaagcacaactactttaaggtatcctggatatatgaacaatgatctggttggccttcttgcctccttgattcccactccaaggtgtcattttttgatgacaggttatactccgttgactgtcgagcgccaggttaacatgatacgcaaaacgacggtattggatgttatgagaagacttctgcagacaaagaatataatggtgtcatcatatgctcgaacaaaagaagctagccaggctaaatacatctccatattgaacatcattcaaggggaggtggaccctacacaggttcacgagagcctgcaaagaatacgcgaaaggaagcttgttaactttatagactgggcacctgcaagcattcaggttgctttgtcaagaaaatccccttatgttcaaacaacccacagggttagtggtctgatgttagcaaatcatacaagcatccgtcatttattcagcaaatgcctgggacaatatgaaaagctaaggaaaaagcaggcttttcttgacaactacaggaagttcccaatgtttgcggacaatgatctatctgaatttgatgaatctcgagagataatagagagcctagttgatgaatacaaggcctgcgagtcgcctgactacatcaaatggggaatggaggaccctggagaggcaaatgttgtggcggcacttgactctaagttggtagtgtaaatataaagtgttgtgcagcaatccacgcaactgaggaagtgctgtctacaatctacattcaagtcatgttggtcatccagaccaaatatgctactgtcacatctagtagtcatcagtttgacgccgcctgcttctatagatccaatcggagtgcagccaaagagagcagtctatgggacgtgtcccacctaaagtgaagacctgcaaaggacaccaccattgggagtctatcggacgtgtcgcacctaaagtggagacctgcaaaggacacgaccattgggcatgacaactcgagcagtagcaactgcttagaaggttaatattcataacaatggtcacatagaagcaccacggtggaatggctccatctgctcgtggatttgtaaaagcgaaagtagtggtccccacaagggcggagccaggattatgatagaagaggggccgaccaattcatcaatactgtatgataaaataatattgtatattgttatcaagtttaagcactcagcatgaaataaaaattctagatctttacaaa

SEQ ID NO: 72771 - DNA, 1420 bp, Zea Mays
tttccttcgtttccgtccgtttccgttttcatcctacctgctcgagacagcccgcctaccgtccatatgcactcgtgctgtgtgctgtcacttccctttcttctttccctaatccccatctccccttctctcgctgctggtggcctgcgaatggcgggcggaagcggcgaggcggctatgtctccgccgtcctctagtgccagcgggaagcgcgggcgggacccggaggaggacgtgtacgtggacaatctccattcccacaaacggtatctcagcgaggtcggtcgcccatcccacgccctgctcctctgcgttccgtctcgcttgagtttcggtctgggtagttggttatcgggttctcgcttctcgggaaaggggtcgcgggttccgtgtggttccttggccaattcatcggatacagccgttgtcgattctcgagtcgattgtttggctcctccgtctgggctccagggtttgggtgttaattcctcgaattggatggttccttgataatggcatccagtctgaatggactgtctgttggggattcactgcctgacaacatcatggagtcccctgcaaggtcagagactgcttcctgctacagggatgagatattatcccaatactcaccgatgtcagaagactcggatgattaccggtgctatgacactcaattaaaccccagtgggaatcatcctgatgcgatgatcagcccttcaactagcccaatgtcatctcctcatcgacaccagagaccacaatcttctttgttaccttcaaacccataccctctcccaagctgctccctttcgtcagtagtctgctctcatgctcggcgtggctccgataatgaaggccggttcccgtcctcgccaaatgacatgtgccatgtagcagatttgaggcgaacagcactactgaggtcagtgcaaatgagggtgcagggaccccattcgtatgacctatcattcggcatcagacaaggacaagatcatgcacatgagcatgaaggggaacatgaccatgagcatgaacatctagaggacttggaagggacagaaggatcatcttgcaataagtcaatcgttaacgaagtcacgtacaaccagagacgtgaccatgattttggtcggtcagagcacgagatagattacatcaacaacagcacatcagatgattgtgtaagtgatctaaaatttaagcaagaagataagagccatagtaaatttgatatccctatgcacaaaaattcatagcacatggaacatatgtgttagttttttggattataactctacttaacttcattgtattcttgacggatgccttatctattgtccgtggttttagcatcagcgttctgaatagcgacattgtaatatttgagtgaaattaacctttggattgttgcgatgcc

SEQ ID NO: 72772 - DNA, 1754 bp, Zea Mays
tttccttcgtttccgtccgtttccgttttcatcctacctgctcgagacagcccgcctaccgtccatatgcactcgtgctgtgtgctgtcacttccctttcttctttccctaatccccatctccccttctctcgctgctggtggcctgcgaatggcgggcggaagcggcgaggcggctatgtctccgccgtcctctagtgccagcgggaagcgcgggcgggacccggaggaggacgtgtacgtggacaatctccattcccacaaacggtatctcagcgaggtcggtcgcccatcccacgccctgctcctctgcgttccgtctcgcttgagtttcggtctgggtagttggttatcgggttctcgcttctcgggaaaggggtcgcgggttccgtgtggttccttggccaattcatcggatacagccgttgtcgattctcgagtcgattgtttggctcctccgtctgggctccagggtttgggtgttaattcctcgaattggatggttccttggtgagggttcggatgatttcactgtttgcgtctgttgctgtattactcctctgcttttcttttggtttgtgcctctttggctccaacattgggtggtattaaaacctagttttggcctcaattcgtgcaatgttggcttactttccacttcccctactgtgtaattccttgggaaaaccaggtgatttggtaattcgaagccgcatattgctccgtatccatctctactcctctacaaatcagaatagctgagcaattagcgttctgatgttttgattagctatcctcttccctccctgtgtattgttcgttgacgataggctaacatttgcagataatggcatccagtctgaatggactgtctgttggggattcactgcctgacaacatcatggagtcccctgcaaggtcagagactgcttcctgctacagggatgagatattatcccaatactcaccgatgtcagaagactcggatgattaccggtgctatgacactcaattaaaccccagtgggaatcatcctgatgcgatgatcagcccttcaactagcccaatgtcatctcctcatcgacaccagagaccacaatcttctttgttaccttcaaacccataccctctcccaagctgctccctttcgtcagtagtctgctctcatgctcggcgtggctccgataatgaaggccggttcccgtcctcgccaaatgacatgtgccatgtagcagatttgaggcgaacagcactactgaggtcagtgcaaatgagggtgcagggaccccattcgtatgacctatcattcggcatcagacaaggacaagatcatgcacatgagcatgaaggggaacatgaccatgagcatgaacatctagaggacttggaagggacagaaggatcatcttgcaataagtcaatcgttaacgaagtcacgtacaaccagagacgtgaccatgattttggtcggtcagagcacgagatagattacatcaacaacagcacatcagatgattgtgtaagtgatctaaaatttaagcaagaagataagagccatagtaaatttgatatccctatgcacaaaaattcatagcacatggaacatatgtgttagttttttggattataactctacttaacttcattgtattcttgacggatgccttatctattgtccgtggttttagcatcagcgttctgaatagcgacattgtaatatttgagtgaaattaacctttggattgttgcgatgcc

SEQ ID NO: 72773 - DNA, 1658 bp, Zea Mays
attttttatcttacttttatccttagagatctgagaacatcgcttctcctattttcattgcatccacctttatgacacaaggtggcataccaccttcaacaaacccagcttctctactaaaggaagctatccatgtcatcagttgtggatatgaggacaaaactgaatggggaaaagagattggctggatctatggttcagtaacggaggatattctgactgggtttaaaatgcatgcaaggggctggcaatcaatctactgcatgccaccacgaccttgtttcaagggttctgcaccaatcaatctttccgatcgtcttaatcaggtgctccgttgggctcttgggtcagtggaaattctgcttagtagacattgtcctatctggtatggttacaatggacgattgaagcttttggagaggctggcttacatcaacactattgtatatccaatcacatccattccgcttattgcctattgtgtgcttcccgctatctgcctccttaccaataaatttatcattcctgagattagcaattatgctgggatgttcttcattcttcttttcgcctccatttttgccactggtatattggagcttagatggagtggtgttggcattgaagattggtggagaaatgagcagttttgggttattggtggcacctctgcccatctcttcgcagtgttccagggtctgctgaaagtgttggctgggattgataccaacttcacagttacctcaaaggcatctgatgaggatggcgactttgctgagctatatgtgttcaagtggaccagtttgctcattcctccgaccactgttcttgtcattaacctggtcggaatggtggctggaatttcttatgccattaacagtggctaccaatcctggggtccgctctttggaaagctgttcttctcgatctgggtgatcctccatctctaccccttcctcaagggtctcatgggaaggcagaaccgcacaccaacaatcgtcattgtctggtccatccttcttgcatctatcttctccttgctgtgggtgaagatcgatcctttcatctccccgacacagaaagctgctgccttggggcaatgtggcgtcaactgctgatcgagacagtgactcttatttgaagaggctcaatcaagatctgccccctcgtgtaaatacctgtcacctgaggaggctagatgggaattccttttgttgtaggtgaggatggatttgcatctaagttatgcctctgttcattagcttcttccgtgccggtgctgcagcggactaagaatcacggagcctttctaccttgcatgtagcgctagccagcagcgtaagatgtgaattttgaagttttgttatgcgtgcagtttattgttttagagtaaattatcatttgtttgtgggaactgttcacacgagcttatattggcaatgctgttatttatacacaaagactacattctttggaatgtgtgcagacagtcagaacactgtaatctattagcacaactatataaggcagctgttgtatcatctctattgtttctgatgggccctggggatatgtaattgcgaatgactagcaacattatattgttggctgattatcagctgttacatgtaattcctgaaaagcatggaggattggag

SEQ ID NO: 72774 - DNA, 1678 bp, Zea Mays
cctcaagcctcaacctccaaattctccctcgttgtcttaccgtgtcgttgttgccgggttttcttggcgagcgacggagccacagaaatggagtgcaatacgggcgcctaattttagcggcggggaggggagcgaagcctgggcagccactcgccggcctccaagaaaccgtcgccattttttcatccgagtgccgccgattttgatttcattattgtctgtcttcgtggggaaccaattcggttttgtttcggaagaagggagaggaggatgcagtgggcgggtctgagatcgcaggcgccggttcccacggcggcgtggacggggccgaggccaagaaccgcgaggtgcccgcagggtagattccccacagcgcgccgggcgctggtggcgtcggcagcggcctcggacgctaattcgagctcgaattcgccggggaaggacgaggagggggaggaggtggtgcgaagggagaaggaggagaaggcggtcgcgtcgcttctgatgagaagccagaagattacaaggaagcagcgaggttgagggactcgctgaggtccttcgaggagaaggagcctgtgttgtgcctccgccggttgatgaagaaggccattgaggaggagaggtttgaggatgctgctaaatacagagatgaattaaagattttggctccacactccctcctcaaatgttctagtgatgcaactactttggggataagagttcaagtcaggagcgtctatattgaaagccggagccagccattgaaagggcaattcttttttgcttatagaattagaattacgaatagttctcagcgccctgttcagcttctcaaaaggcactggattgttacagatggaaatggaaggacagaaaacatttggggagttggagtagtgggagaacaacctgtcatattcccgaagactggttttgagtactcttctgcatgcccattgagcactccaaatgggagaatggaaggtgactttgagatgaagcacatcgacaaggctggatcatcaacattcaatgttgcaattgcgccattctctctgtcaattcttggtgacgataatgatgttctgctatgaactacactgaggacttgcttgggagcaaatggattgaagggaattaagggggctacaatcccttactattcaattttgaatagtaagggattttagctcacaatccccttctgcaaacaagccctgagatttaaactagacacacaaacacaaatatttattgtaagtgatgtaattgagcgcaaggttcaggtggaactactatggttgacttatggctggagccaagtgccctggtgcaaggtcaggtagagttctctgggatgttgaatctggaccatgcgagtatcaattgtgaggcacaataggacatcctaccaattgtacttctaaatgtacagcatggaacttagagcttgctacatgtattatacagtacctttttatttttcccatcacggtatcaccttagttatcgcggcctttgattatattgtatatcagctcagcaaaatatggtgttttttgttggaactgcaatgtaagatgtttgatatgaccgttggtgcttcaaatggacacagtgacggtgcattgcattgcattttgcactcggcctggtcaccaagtgctactttcgt

SEQ ID NO: 72775 - DNA, 1713 bp, Zea Mays
cctcaagcctcaacctccaaattctccctcgttgtcttaccgtgtcgttgttgccgggttttcttggcgagcgacggagccacagaaatggagtgcaatacgggcgcctaattttagcggcggggaggggagcgaagcctgggcagccactcgccggcctccaagaaaccgtcgccattttttcatccgagtgccgccgattttgatttcattattgtctgtcttcgtggggaaccaattcggttttgtttcggaagaagggagaggaggatgcagtgggcgggtctgagatcgcaggcgccggttcccacggcggcgtggacggggccgaggccaagaaccgcgaggtgcccgcagggtagattccccacagcgcgccgggcgctggtggcgtcggcagcggcctcggacgctaattcgagctcgaattcgccggggaaggacgaggagggggaggaggtggtgcgaagggagaaggaggagaaggcggtcgcgtcgcttctgatgagaagccagaagtacgccatgctaaagcagcagctcgccgtggccgcccaatttgaggattacaaggaagcagcgaggttgagggactcgctgaggtccttcgaggagaaggagcctgtgttgtgcctccgccggttgatgaagaaggccattgaggaggagaggtttgaggatgctgctaaatacagagatgaattaaagattttggctccacactccctcctcaaatgttctagtgatgcaactactttggggataagagttcaagtcaggagcgtctatattgaaagccggagccagccattgaaagggcaattcttttttgcttatagaattagaattacgaatagttctcagcgccctgttcagcttctcaaaaggcactggattgttacagatggaaatggaaggacagaaaacatttgtagtgggagaacaacctgtcatattcccgaagactggttttgagtactcttctgcatgcccattgagcactccaaatgggagaatggaaggtgactttgagatgaagcacatcgacaaggctggatcatcaacattcaatgttgcaattgcgccattctctctgtcaattcttggtgacgataatgatgttctgctatgaactacactgaggacttgcttgggagcaaatggattgaagggaattaagggggctacaatcccttactattcaattttgaatagtaagggattttagctcacaatccccttctgcaaacaagccctgagatttaaactagacacacaaacacaaatatttattgtaagtgatgtaattgagcgcaaggttcaggtggaactactatggttgacttatggctggagccaagtgccctggtgcaaggtcaggtagagttctctgggatgttgaatctggaccatgcgagtatcaattgtgaggcacaataggacatcctaccaattgtacttctaaatgtacagcatggaacttagagcttgctacatgtattatacagtacctttttatttttcccatcacggtatcaccttagttatcgcggcctttgattatattgtatatcagctcagcaaaatatggtgttttttgttggaactgcaatgtaagatgtttgatatgaccgttggtgcttcaaatggacacagtgacggtgcattgcattgcattttgcactcggcctggtcaccaagtgctactttcgt

SEQ ID NO: 72776 - DNA, 1005 bp, Zea Mays
ccccaacttactatctgaggatgaatctgctaagaaacaggggataagagttcaagtcaggagcgtctatattgaaagccggagccagccattgaaagggcaattcttttttgcttatagaattagaattacgaatagttctcagcgccctgttcagcttctcaaaaggcactggattgttacagatggaaatggaaggacagaaaacatttggggagttggagtagtgggagaacaacctgtcatattcccgaagactggttttgagtactcttctgcatgcccattgagcactccaaatgggagaatggaaggtgactttgagatgaagcacatcgacaaggctggatcatcaacattcaatgttgcaattgcgccattctctctgtcaattcttggtgacgataatgatgttctgctatgaactacactgaggacttgcttgggagcaaatggattgaagggaattaagggggctacaatcccttactattcaattttgaatagtaagggattttagctcacaatccccttctgcaaacaagccctgagatttaaactagacacacaaacacaaatatttattgtaagtgatgtaattgagcgcaaggttcaggtggaactactatggttgacttatggctggagccaagtgccctggtgcaaggtcaggtagagttctctgggatgttgaatctggaccatgcgagtatcaattgtgaggcacaataggacatcctaccaattgtacttctaaatgtacagcatggaacttagagcttgctacatgtattatacagtacctttttatttttcccatcacggtatcaccttagttatcgcggcctttgattatattgtatatcagctcagcaaaatatggtgttttttgttggaactgcaatgtaagatgtttgatatgaccgttggtgcttcaaatggacacagtgacggtgcattgcattgcattttgcactcggcctggtcaccaagtgctactttcgt

SEQ ID NO: 72777 - DNA, 986 bp, Zea Mays
ctgaggatgaatctgctaagaaacaggggataagagttcaagtcaggagcgtctatattgaaagccggagccagccattgaaagggcaattcttttttgcttatagaattagaattacgaatagttctcagcgccctgttcagcttctcaaaaggcactggattgttacagatggaaatggaaggacagaaaacatttgttggagtagtgggagaacaacctgtcatattcccgaagactggttttgagtactcttctgcatgcccattgagcactccaaatgggagaatggaaggtgactttgagatgaagcacatcgacaaggctggatcatcaacattcaatgttgcaattgcgccattctctctgtcaattcttggtgacgataatgatgttctgctatgaactacactgaggacttgcttgggagcaaatggattgaagggaattaagggggctacaatcccttactattcaattttgaatagtaagggattttagctcacaatccccttctgcaaacaagccctgagatttaaactagacacacaaacacaaatatttattgtaagtgatgtaattgagcgcaaggttcaggtggaactactatggttgacttatggctggagccaagtgccctggtgcaaggtcaggtagagttctctgggatgttgaatctggaccatgcgagtatcaattgtgaggcacaataggacatcctaccaattgtacttctaaatgtacagcatggaacttagagcttgctacatgtattatacagtacctttttatttttcccatcacggtatcaccttagttatcgcggcctttgattatattgtatatcagctcagcaaaatatggtgttttttgttggaactgcaatgtaagatgtttgatatgaccgttggtgcttcaaatggacacagtgacggtgcattgcattgcattttgcactcggcctggtcaccaagtgctactttcgt

SEQ ID NO: 72778 - DNA, 1278 bp, Zea Mays
ggccggccgcgcggcatgcacgcaacgccagcatacgctgtggcgtcaccgcgtctccagcatcgaccaccgagggcagcagcagtttctttccgaagtcggaaccctgtgcgcggtggtgcgtcgttgccgagagagaggtagctagccgtaccgcggcgccatgggcgggcgtggggctccggacgcgacaaggatgctggtggtggctgtggtcggcgtcatggtcgccgcggcggctgtcctgtgcccggccccggcggcggctgggaagttaggcaaacaagccaaggcgctggtggccgtcaaggcggcgctgcatgatcccggcaacgctctctgggactgggacctcaagttcggcaacgacccgtgccactggaacatggtcacctgccatgagggacagattcaggagttgtctatgacgaacaagaacctctccggcacactgtcgccggcgatcggaaaaatcaggtcgctgcgttatctgttgttacaccagaatgctatctctggtcctatccctgacaccataggaaggatgaagctgcttgaagtgcttgacctgtcgaacaatcatttcagtggaagcatcccaagtacgctgggcaatctggccaaccttcagtacctgagattgaacaataacagcttatctggacctatacctgaatcactagccacggatgctctcatgatcttcaacctggatgtttccttcaacaacctgagtggtcaccggccggcttttcgaacgtggaatgtctttttcgaaggtaacccattcctaagtgatatcggctcagagtcaattgctgcgcccgtggctccaaaggatgttaaagaagaggatttacaattcatgagtaaaagcatttttatgctgctagtgtgcatagcaattggttgttcactggttgccgtggtgactggagctgtgctgttttggaaaaggcgtcagcgtgagcgagtctttgcagttgcagatgatgaggatcctaatgttacatatgctgggatcgtccagctctatcttcttattaacatgtttgccattacataagaaatttgtttagaaattaaaatgttacattgctgtatggactgtttatacacatatacatttcacaacaatatcattcagtagatatgggaaattatattggagtccatatatatatatatatatatatatatatatatatattaattgtggaatttttgttgttgtcttcctttttatttttatggctttgattttcataaagattgtac

SEQ ID NO: 72779 - DNA, 1088 bp, Zea Mays
ggccggccgcgcggcatgcacgcaacgccagcatacgctgtggcgtcaccgcgtctccagcatcgaccaccgagggcagcagcagtttctttccgaagtcggaaccctgtgcgcggtggtgcgtcgttgccgagagagaggtagctagccgtaccgcggcgccatgggcgggcgtggggctccggacgcgacaaggatgctggtggtggctgtggtcggcgtcatggtcgccgcggcggctgtcctgtgcccggccccggcggcggctgggaagttaggcaaacaagccaaggcgctggtggccgtcaaggcggcgctgcatgatcccggcaacgctctctgggactgggacctcaagttcggcaacgacccgtgccactggaacatggtcacctgccatgagggacagattcaggagttgtctatgacgaacaagaacctctccggcacactgtcgccggcgatcggaaaaatcaggtcgctgcgttatctgttgttacaccagaatgctatctctggtcctatccctgacaccataggaaggatgaagctgcttgaagtgcttgacctgtcgaacaatcatttcagtggaagcatcccaagtacgctgggcaatctggccaaccttcagtacctgagattgaacaataacagcttatctggacctatacctgaatcactagccacggatgctctcatgatcttcaacctggatgtttccttcaacaacctgagtggtcaccggccggcttttcgaacgtggaatgtctttttcgaaggtaacccattcctaagtgatatcggctcagagtcaattgctgcgcccgtggctccaaaggatgttaaagaagaggatttacaattcatgagtaaaagcatttttatgctgctagtgtgcatagcaattggttgttcactggttgccgtggtgactggagctgtgctgttttggaaaaggcgtcagcgtgagcgagtctttgcagttgcagatggctgaacaccagaaacatcctaaagagaaagaactttaaggttcaaggcgacaattacagttgtgctatttgtcaacttcaaagagaagaaactgc

SEQ ID NO: 72780 - DNA, 2287 bp, Zea Mays
gtcaccgcgtctccagcatcgaccaccgagggcagcagcagcagtttctttccgaagtcggaaccctgtgcgcggtggtgcgtcgttgccgagagagaggtagctagccgtaccgcggcgccatgggcgggcgtggggctccggacgcgacaaggatgctggtggtggctgtggtcggcgtcatggtcgccgcggcggctgtcctgtgcccggccccggcggcggctgggaagttaggcaaacaagccaaggcgctggtggccgtcaaggcggcgctgcatgatcccggcaacgctctctgggactgggacctcaagttcggcaacgacccgtgccactggaacatggtcacctgccatgagggacagattcaggagttgtctatgacgaacaagaacctctccggcacactgtcgccggcgatcggaaaaatcaggtcgctgcgttatctgttgttacaccagaatgctatctctggtcctatccctgacaccataggaaggatgaagctgcttgaagtgcttgacctgtcgaacaatcatttcagtggaagcatcccaagtacgctgggcaatctggccaaccttcagtacctgagattgaacaataacagcttatctggacctatacctgaatcactagccacggatgctctcatgatcttcaacctggatgtttccttcaacaacctgagtggtcaccggccggcttttcgaacgtggaatgtctttttcgaaggtaacccattcctaagtgatatcggctcagagtcaattgctgcgcccgtggctccaaaggatgttaaagaagaggatttacaattcatgagtaaaagcatttttatgctgctagtgtgcatagcaattggttgttcactggttgccgtggtgactggagctgtgctgttttggaaaaggcgtcagcgtgagcgagtctttgcagttgcagatgtttcagttcatcatgacccagaaggttgtcttggccatctgaagcagtacagttttcaggagatgagaatggctaccaataacttcagccaaagaaatattttgggagagggaggatatggtatagtatacaagggtgatttgcctgatggaacaactgttgctgttaaaagacttaaggatcatgattcagttgttggggatgatcaattccacacagaagttgaagtgataagcttggctgtccatcgtaatctccttcatcttaatgggttttgcgttgcaaataatgaaaggcttcttgtgtatccctacatgccgaatggaacggttgcttctaaattaaaagaatgcgttgatggagaaccagccttagactgggcaaagagaaagaggatagcccttggtgcgtcacagggactgctctatttgcatgaacaatgtgatcctaagataatccatcgtgacatcaaggcctccaatgtcctccttgatgaatatcttgaagcagttgttgcagattttggattggcaaaacttgtagatcattggatgtcccatgttgtcacatcagtgcgcggaacaattgggcgcataccacccgagtattatctgtctggccacgcttcggagaagactgatgtcttttgctttggtcttctgttgattgagttagtcactggtcgatcaacgctggagcttcatgagaatgaatttgataagggaggaattattgaattggccaaagaacttctggaacaaaataagctaagcatgtttgtggaccggaagctaggaagcaactacgacagtgctgaattggaggagatggttcagattgctttgctctgcacaatgtacagatcttgccaccgccccaggatgtctgaaattgttaagatgctggaaggaggagatggggttgcagaaaaatggcaggccatgaaagatattgaggaaccaaaccccgactcgtcatcagaatttgtgtgcattggtataaattatgacgtagacgagtgcaattcaatcgagcttcaagccgttgaactctcagggccaaggtgatctgactacagcttgtcatgtgtatatatatgtaaagatcattttgggactaacaacttgggaagacaaaggaagcgtagggatgcttcagactttcagttgagtaccgtgccatgtctataatgtctctttatgtatgtggcttttctgagaagacctgtttatggcaaggcggccttgctggacaaaagttagtaataatgaaatgaactggattatatatgtagataaaaaaattaactagtagaatcctgtgttctgcgtctgag

SEQ ID NO: 72781 - DNA, 2223 bp, Zea Mays
cggaaccctgtgcgcggtggtgcgtcgttgccgagagagaggtagctagccgtaccgcggcgccatgggcgggcgtggggctccggacgcgacaaggatgctggtggtggctgtggtcggcgtcatggtcgccgcggcggctgtcctgtgcccggccccggcggcggctgggaagttaggcaaacaagccaaggcgctggtggccgtcaaggcggcgctgcatgatcccggcaacgctctctgggactgggacctcaagttcggcaacgacccgtgccactggaacatggtcacctgccatgagggacagattcaggagttgtctatgacgaacaagaacctctccggcacactgtcgccggcgatcggaaaaatcaggtcgctgcgttatctgttgttacaccagaatgctatctctggtcctatccctgacaccataggaaggatgaagctgcttgaagtgcttgacctgtcgaacaatcatttcagtggaagcatcccaagtacgctgggcaatctggccaaccttcagtacctgagattgaacaataacagcttatctggacctatacctgaatcactagccacggatgctctcatgatcttcaacctggatgtttccttcaacaacctgagtggtcaccggccggcttttcgaacgtggaatgtctttttcgaaggtaacccattcctaagtgatatcggctcagagtcaattgctgcgcccgtggctccaaaggatgttaaagaagaggatttacaattcatgagtaaaagcatttttatgctgctagtgtgcatagcaattggttgttcactggttgccgtggtgactggagctgtgctgttttggaaaaggcgtcagcgtgagcgagtctttgcagttgcagatgttcatcatgacccagaaggttgtcttggccatctgaagcagtacagttttcaggagatgagaatggctaccaataacttcagccaaagaaatattttgggagagggaggatatggtatagtatacaagggtgatttgcctgatggaacaactgttgctgttaaaagacttaaggatcatgattcagttgttggggatgatcaattccacacagaagttgaagtgataagcttggctgtccatcgtaatctccttcatcttaatgggttttgcgttgcaaataatgaaaggcttcttgtgtatccctacatgccgaatggaacggttgcttctaaattaaaagaatgcgttgatggagaaccagccttagactgggcaaagagaaagaggatagcccttggtgcgtcacagggactgctctatttgcatgaacaatgtgatcctaagataatccatcgtgacatcaaggcctccaatgtcctccttgatgaatatcttgaagcagttgttgcagattttggattggcaaaacttgtagatcattggatgtcccatgttgtcacatcagtgcgcggaacaattgggcgcataccacccgagtattatctgtctggccacgcttcggagaagactgatgtcttttgctttggtcttctgttgattgagttagtcactggtcgatcaacgctggagcttcatgagaatgaatttgataagggaggaattattgaattggccaaagaacttctggaacaaaataagctaagcatgtttgtggaccggaagctaggaagcaactacgacagtgctgaattggaggagatggttcagattgctttgctctgcacaatgtacagatcttgccaccgccccaggatgtctgaaattgttaagatgctggaaggaggagatggggttgcagaaaaatggcaggccatgaaagatattgaggaaccaaaccccgactcgtcatcagaatttgtgtgcattggtataaattatgacgtagacgagtgcaattcaatcgagcttcaagccgttgaactctcagggccaaggtgatctgactacagcttgtcatgtgtatatatatgtaaagatcattttgggactaacaacttgggaagacaaaggaagcgtagggatgcttcagactttcagttgagtaccgtgccatgtctataatgtctctttatgtatgtggcttttctgagaagacctgtttatggcaaggcggccttgctggacaaaagttagtaataatgaaatgaactggattatatatgtagataaaaaaattaactagtagaatcctgtgttctgcgtctgag

SEQ ID NO: 72782 - DNA, 1254 bp, Zea Mays
cgcgcttcgtcccctcggcaagcaagcccaagattcgatcgatccacccccgccaccgcaccacactctcactgcgattccgctctcacccacctcctcttcctctcccctcccgggatcacgaggcgacgccacccgcgagattgacgggagccgatagatctgcgcggctacgctacgcagtcacactgcgctcacctgacctgactccgctctgttcatgccgcggaggtagagtccgcgggccggcggtggccacggccagcctcctcggccgtcgggatgaagccgcggaggttcggctacggctacggctacggctacggccgggtcaggcgcgcggcggcgctgctgctgctgctgctgctctgcctctgcctcagcagcctgttcctcctgcttctccatggctcctccacgccgctggagcccgcggcggcggcggcggcggcggaagcaagagttgccgaggcgcaggcggaggtcgaggaggcgccgctgccgccggggaactccaagggtgacaaggaggggaggttctccatcctcgtgcactcgcggccgggcttcgtgctcacacgagccaccactcgatcccgattcttctacaaccgtcaggtcaacgatagcatccaggtggattggggggaggcgagcatgatcacggctgagcgcattttgctcagccatgctctcaaggatccactcaatgaccgctttgtttttgtatctgacagctgtgtaccactatacaatttcagctatacttacgactacataatgtcgtcatcgaccagctttgtagacagttttgctgatacaaaggcagggagatacaacccaagaatggacccagttatcccagtggagaattggagaaaaggctcacagtgggctgtgctaattaaaaagcatgctgaggttgtggttgatgatgaagtggtgttaccagaattccagaagcattgcaggaggagacccttgccagagttctggcgggattgggatcgtcctattcctgcggaggcatggaaagcccataactgcataccagatgagcactatgttcagacgttgcttgcacaaagtggtctagaagaagaacttacgcggcgatcagtaacacatagtgcatgggatctttcagcttctaaagatcgtgaaagacgcgggtggcatcctgtaacatataaagtctctgatgctactacaagacttataaaatctataaagggttatcaacatcgattcttg

SEQ ID NO: 72783 - DNA, 1734 bp, Zea Mays
cgcgcttcgtcccctcggcaagcaagcccaagattcgatcgatccacccccgccaccgcaccacactctcactgcgattccgctctcacccacctcctcttcctctcccctcccgggatcacgaggcgacgccacccgcgagattgacgggagccgatagatctgcgcggctacgctacgcagtcacactgcgctcacctgacctgactccgctctgttcatgccgcggaggtagagtccgcgggccggcggtggccacggccagcctcctcggccgtcgggatgaagccgcggaggttcggctacggctacggctacggctacggccgggtcaggcgcgcggcggcgctgctgctgctgctgctgctctgcctctgcctcagcagcctgttcctcctgcttctccatggctcctccacgccgctggagcccgcggcggcggcggcggcggcggaagcaagagttgccgaggcgcaggcggaggtcgaggaggcgccgctgccgccggggaactccaagggtgacaaggaggggaggttctccatcctcgtgcactcgcggccgggcttcgtgctcacacgagccaccactcgatcccgattcttctacaaccgtcaggtcaacgatagcatccaggtggattggggggaggcgagcatgatcacggctgagcgcattttgctcagccatgctctcaaggatccactcaatgaccgctttgtttttgtatctgacaggatcttctctctgtggcagctgtgtaccactatacaatttcagctatacttacgactacataatgtcgtcatcgaccagctttgtagacagttttgctgatacaaaggcagggagatacaacccaagaatggacccagttatcccagtggagaattggagaaaaggctcacagtgggctgtgctaattaaaaagcatgctgaggttgtggttgatgatgaagtggtgttaccagaattccagaagcattgcaggaggagacccttgccagagttctggcgggattgggatcgtcctattcctgcggaggcatggaaagcccataactgcataccagatgagcactatgttcagacgttgcttgcacaaagtggtctagaagaagaacttacgcggcgatcagtaacacatagtgcatgggatctttcagcttctaaagatcgtgaaagacgcgggtggcatcctgtaacatataaagtctctgatgctactacaagacttataaaatctataaaggatattgataatatatattacgagaccgaaaatagaagggagtggtgtacaagtaatggaaagccagccccctgcttcctttttgccaggaagtttacacgtggagctggtctgaagcttcttgattcatcactgatagcttcaaagtgatgaatattagtgacagatgcaagtgccttttgattgtttcacctttcgagaatatttcagttcacacaaatgtaaaggtacgggaccacggaaaagacacaaaataacaggactttctttttattcagtgtgtgattatcatatattattttgttgcttcatagaaaggcacgatacatgttgtaaagaattatcttcgttccttttatttcctaggatagcacgtccattaacacatgactcagcattataacatcagtcgaccagttggtcgtggagtcctgagaaaacttgtcggcaaaattatgaagaaatgttctctcatactgccc

SEQ ID NO: 72784 - DNA, 935 bp, Zea Mays
tgtcaatcctccgccaccgcgtcctatagttttgctgatacaaaggcagggagatacaacccaagaatggacccagttatcccagtggagaattggagaaaaggctcacagtgggctgtgctaattaaaaagcatgctgaggttgtggttgatgatgaagtggtgttaccagaattccagaagcattgcaggaggagacccttgccagagttctggcgggattgggatcgtcctattcctgcggaggcatggaaagcccataactgcataccagatgagcactatgttcagacgttgcttgcacaaagtggtctagaagaagaacttacgcggcgatcagtaacacatagtgcatgggatctttcagcttctaaagatcgtgaaagacgcgggtggcatcctgtaacatataaagtctctgatgctactacaagacttataaaatctataaaggatattgataatatatattacgagaccgaaaatagaagggagtggtgtacaagtaatggaaagccagccccctgcttcctttttgccaggaagtttacacgtggagctggtctgaagcttcttgattcatcactgatagcttcaaagtgatgaatattagtgacagatgcaagtgccttttgattgtttcacctttcgagaatatttcagttcacacaaatgtaaaggtacgggaccacggaaaagacacaaaataacaggactttctttttattcagtgtgtgattatcatatattattttgttgcttcatagaaaggcacgatacatgttgtaaagaattatcttcgttccttttatttcctaggatagcacgtccattaacacatgactcagcattataacatcagtcgaccagttggtcgtggagtcctgagaaaacttgtcggcaaaattatgaagaaatgttctctcatactgccc

SEQ ID NO: 72785 - DNA, 976 bp, Zea Mays
aaacagtagaattatcaatgcagaaagttacccatacaaggaagcccaagggcctgtccggtctatcacgttttgctgatacaaaggcagggagatacaacccaagaatggacccagttatcccagtggagaattggagaaaaggctcacagtgggctgtgctaattaaaaagcatgctgaggttgtggttgatgatgaagtggtgttaccagaattccagaagcattgcaggaggagacccttgccagagttctggcgggattgggatcgtcctattcctgcggaggcatggaaagcccataactgcataccagatgagcactatgttcagacgttgcttgcacaaagtggtctagaagaagaacttacgcggcgatcagtaacacatagtgcatgggatctttcagcttctaaagatcgtgaaagacgcgggtggcatcctgtaacatataaagtctctgatgctactacaagacttataaaatctataaaggatattgataatatatattacgagaccgaaaatagaagggagtggtgtacaagtaatggaaagccagccccctgcttcctttttgccaggaagtttacacgtggagctggtctgaagcttcttgattcatcactgatagcttcaaagtgatgaatattagtgacagatgcaagtgccttttgattgtttcacctttcgagaatatttcagttcacacaaatgtaaaggtacgggaccacggaaaagacacaaaataacaggactttctttttattcagtgtgtgattatcatatattattttgttgcttcatagaaaggcacgatacatgttgtaaagaattatcttcgttccttttatttcctaggatagcacgtccattaacacatgactcagcattataacatcagtcgaccagttggtcgtggagtcctgagaaaacttgtcggcaaaattatgaagaaatgttctctcatactgccc

SEQ ID NO: 72786 - DNA, 932 bp, Zea Mays
atcgtcgcgaggcgctgatcgagcagttttgctgatacaaaggcagggagatacaacccaagaatggacccagttatcccagtggagaattggagaaaaggctcacagtgggctgtgctaattaaaaagcatgctgaggttgtggttgatgatgaagtggtgttaccagaattccagaagcattgcaggaggagacccttgccagagttctggcgggattgggatcgtcctattcctgcggaggcatggaaagcccataactgcataccagatgagcactatgttcagacgttgcttgcacaaagtggtctagaagaagaacttacgcggcgatcagtaacacatagtgcatgggatctttcagcttctaaagatcgtgaaagacgcgggtggcatcctgtaacatataaagtctctgatgctactacaagacttataaaatctataaaggatattgataatatatattacgagaccgaaaatagaagggagtggtgtacaagtaatggaaagccagccccctgcttcctttttgccaggaagtttacacgtggagctggtctgaagcttcttgattcatcactgatagcttcaaagtgatgaatattagtgacagatgcaagtgccttttgattgtttcacctttcgagaatatttcagttcacacaaatgtaaaggtacgggaccacggaaaagacacaaaataacaggactttctttttattcagtgtgtgattatcatatattattttgttgcttcatagaaaggcacgatacatgttgtaaagaattatcttcgttccttttatttcctaggatagcacgtccattaacacatgactcagcattataacatcagtcgaccagttggtcgtggagtcctgagaaaacttgtcggcaaaattatgaagaaatgttctctcatactgccc

SEQ ID NO: 72787 - DNA, 929 bp, Zea Mays
cacagctaggccacgtcctcgagttttgctgatacaaaggcagggagatacaacccaagaatggacccagttatcccagtggagaattggagaaaaggctcacagtgggctgtgctaattaaaaagcatgctgaggttgtggttgatgatgaagtggtgttaccagaattccagaagcattgcaggaggagacccttgccagagttctggcgggattgggatcgtcctattcctgcggaggcatggaaagcccataactgcataccagatgagcactatgttcagacgttgcttgcacaaagtggtctagaagaagaacttacgcggcgatcagtaacacatagtgcatgggatctttcagcttctaaagatcgtgaaagacgcgggtggcatcctgtaacatataaagtctctgatgctactacaagacttataaaatctataaaggatattgataatatatattacgagaccgaaaatagaagggagtggtgtacaagtaatggaaagccagccccctgcttcctttttgccaggaagtttacacgtggagctggtctgaagcttcttgattcatcactgatagcttcaaagtgatgaatattagtgacagatgcaagtgccttttgattgtttcacctttcgagaatatttcagttcacacaaatgtaaaggtacgggaccacggaaaagacacaaaataacaggactttctttttattcagtgtgtgattatcatatattattttgttgcttcatagaaaggcacgatacatgttgtaaagaattatcttcgttccttttatttcctaggatagcacgtccattaacacatgactcagcattataacatcagtcgaccagttggtcgtggagtcctgagaaaacttgtcggcaaaattatgaagaaatgttctctcatactgccc

SEQ ID NO: 72788 - DNA, 777 bp, Zea Mays
ttatatttccaacaatctcaaaagaactagaaaaaggagacccttgccagagttctggcgggattgggatcgtcctattcctgcggaggcatggaaagcccataactgcataccagatgagcactatgttcagacgttgcttgcacaaagtggtctagaagaagaacttacgcggcgatcagtaacacatagtgcatgggatctttcagcttctaaagatcgtgaaagacgcgggtggcatcctgtaacatataaagtctctgatgctactacaagacttataaaatctataaaggatattgataatatatattacgagaccgaaaatagaagggagtggtgtacaagtaatggaaagccagccccctgcttcctttttgccaggaagtttacacgtggagctggtctgaagcttcttgattcatcactgatagcttcaaagtgatgaatattagtgacagatgcaagtgccttttgattgtttcacctttcgagaatatttcagttcacacaaatgtaaaggtacgggaccacggaaaagacacaaaataacaggactttctttttattcagtgtgtgattatcatatattattttgttgcttcatagaaaggcacgatacatgttgtaaagaattatcttcgttccttttatttcctaggatagcacgtccattaacacatgactcagcattataacatcagtcgaccagttggtcgtggagtcctgagaaaacttgtcggcaaaattatgaagaaatgttctctcatactgccc

SEQ ID NO: 72789 - DNA, 776 bp, Zea Mays
ccccatgtgccacctcaaaccctacattagatgtgcttaccttaccactgagatttcctatgaaaagaggtgcccctgcctgcggaggcatggaaagcccataactgcataccagatgagcactatgttcagacgttgcttgcacaaagtggtctagaagaagaacttacgcggcgatcagtaacacatagtgcatgggatctttcagcttctaaagatcgtgaaagacgcgggtggcatcctgtaacatataaagtctctgatgctactacaagacttataaaatctataaaggatattgataatatatattacgagaccgaaaatagaagggagtggtgtacaagtaatggaaagccagccccctgcttcctttttgccaggaagtttacacgtggagctggtctgaagcttcttgattcatcactgatagcttcaaagtgatgaatattagtgacagatgcaagtgccttttgattgtttcacctttcgagaatatttcagttcacacaaatgtaaaggtacgggaccacggaaaagacacaaaataacaggactttctttttattcagtgtgtgattatcatatattattttgttgcttcatagaaaggcacgatacatgttgtaaagaattatcttcgttccttttatttcctaggatagcacgtccattaacacatgactcagcattataacatcagtcgaccagttggtcgtggagtcctgagaaaacttgtcggcaaaattatgaagaaatgttctctcatactgccc

SEQ ID NO: 72790 - DNA, 1742 bp, Zea Mays
aaataatataaaagttagccaagcgaaccgaaccacactctcgtctccctcctccccgttccttattcgccagaccggagggaggggtacgagcttcaccgctttcatcccgcccgcgctcctccccagatctcgtctccattaaagccgaccttgcccagattcgcgccctcctcgctcatatctgaaagcggctctgattttccaagccgaccgcaggagcgatgggtgtcggcggagagaagttccagctggggacggtgggggcgctgagcctatccgtggtctcctccgtctccattgtcatctgcaacaaggccctcatgagctccctcggctttaacttcgccactaccttgacaagctggcatctgctggttacattctgctcccttcatgtggcattatggatgaaattctttgagcataagccttttgattcaagaactgtcatgggatttggagtacttaatggaatctccattgggctcctcaacttgagtcttggcttcaactctgttgggttttaccagatgactaagctggcgatcatcccgtgcactgtcatcttagagacacttttcttcaggaagaagttcagtcggagtatccagatgtccctttctgtgctccttcttggtgttggtgttgcaactgtcactgatctgcaactcaatgctgtgggatccatactctccttgctggcaattatcacgacttgcattgctcaaattatgacaaacactatccagaagaagttcaaggtctcatcgacccaactgctctaccagtcttgcccttatcaatcactgaccctgtttctcattggccccttccttgatggctttttgactaaccaaaacgtctttgcttttaattatacatcacaagttgtgtttttcattgtgttgtcatgcctgatatcggtctcagtgaacttcagcacttttcttgtgattggaaagacgtctcctgttacttaccaagtcctgggccatcttaaaacatgccttgttcttacctttggttatgttttgcttcatgacccatttagctggagaaacatacttgggatcctaattgcagtagttggaatggtcttatattcatacttctgcacagtggagacccagcataagaacactgaagtctccccacagcaggtgaaagaaagtgaggcagcccctttgatctcagactctttgagcaaagttgaaaatgggggcggtgttgttgatgacgagcctttgaaggtacccatgtggagctcaaagtattcgcgggagtgaaattttctcccgctagacggtggcatcatacaggattcagtttagtaggcagatagtagggttggaagccaacccagagtgtaatgaacatttgagttacattttttggccttttttagcgtcacgatctactactggtaaaagggtctgtttcttgggaggatcttaccttcaagattgccagatatacattgaaactagacggcagatattgtatgattgtatctggacatgttccacatcgtctaactgtaacttccaactggtacatggcatgcctatatccaaagatagatttctttttttttgtatcagaaagatccggtaagacttgcgcaaaatttgtagtactattggttcgagtttgtttctttcagttcatgttcactttaaaactttatcatgcaagttctgtatattacaagttcttgcatgcaaaggttttcctttatg

SEQ ID NO: 72791 - DNA, 1815 bp, Zea Mays
aaataatataaaagttagccaagcgaaccgaaccacactctcgtctccctcctccccgttccttattcgccagaccggagggaggggtacgagcttcaccgctttcatcccgcccgcgctcctccccagatctcgtctccattaaagccgaccttgcccagattcgcgccctcctcgctcatatctgaaagcggctctgattttccaagccgaccgcaggagcggtgcaccgggccgcgtgattccggcggcttgatttggaatttgtgatctttcggggcattcgtcggtttgtctatgggtgtcggcggagagaagttccagctggggacggtgggggcgctgagcctatccgtggtctcctccgtctccattgtcatctgcaacaaggccctcatgagctccctcggctttaacttcgccactaccttgacaagctggcatctgctggttacattctgctcccttcatgtggcattatggatgaaattctttgagcataagccttttgattcaagaactgtcatgggatttggagtacttaatggaatctccattgggctcctcaacttgagtcttggcttcaactctgttgggttttaccagatgactaagctggcgatcatcccgtgcactgtcatcttagagacacttttcttcaggaagaagttcagtcggagtatccagatgtccctttctgtgctccttcttggtgttggtgttgcaactgtcactgatctgcaactcaatgctgtgggatccatactctccttgctggcaattatcacgacttgcattgctcaaattatgacaaacactatccagaagaagttcaaggtctcatcgacccaactgctctaccagtcttgcccttatcaatcactgaccctgtttctcattggccccttccttgatggctttttgactaaccaaaacgtctttgcttttaattatacatcacaagttgtgtttttcattgtgttgtcatgcctgatatcggtctcagtgaacttcagcacttttcttgtgattggaaagacgtctcctgttacttaccaagtcctgggccatcttaaaacatgccttgttcttacctttggttatgttttgcttcatgacccatttagctggagaaacatacttgggatcctaattgcagtagttggaatggtcttatattcatacttctgcacagtggagacccagcataagaacactgaagtctccccacagcaggtgaaagaaagtgaggcagcccctttgatctcagactctttgagcaaagttgaaaatgggggcggtgttgttgatgacgagcctttgaaggtacccatgtggagctcaaagtattcgcgggagtgaaattttctcccgctagacggtggcatcatacaggattcagtttagtaggcagatagtagggttggaagccaacccagagtgtaatgaacatttgagttacattttttggccttttttagcgtcacgatctactactggtaaaagggtctgtttcttgggaggatcttaccttcaagattgccagatatacattgaaactagacggcagatattgtatgattgtatctggacatgttccacatcgtctaactgtaacttccaactggtacatggcatgcctatatccaaagatagatttctttttttttgtatcagaaagatccggtaagacttgcgcaaaatttgtagtactattggttcgagtttgtttctttcagttcatgttcactttaaaactttatcatgcaagttctgtatattacaagttcttgcatgcaaaggttttcctttatg

SEQ ID NO: 72792 - DNA, 2392 bp, Zea Mays
aaataatataaaagttagccaagcgaaccgaaccacactctcgtctccctcctccccgttccttattcgccagaccggagggaggggtacgagcttcaccgctttcatcccgcccgcgctcctccccagatctcgtctccattaaagccgaccttgcccagattcgcgccctcctcgctcatatctgaaagcggctctgattttccaagccgaccgcaggagcggtgcaccgggccgcgtgattccggcggcttgatttggaatttgtgatctttcggggcattcgtcggtttgtctgtcggtgacggtggtgctgcgtttcgagggcagcgaagatgggtgtcggcggagagaagttccagctggggacggtgggggcgctgagcctatccgtggtctcctccgtctccattgtcatctgcaacaaggccctcatgagctccctcggctttaacttcggtgtgagatctgactgtttcctgcctcagtttcttgatttgttatgtgtatgctcgtgctggatgttcggtgattcgcgtagatttgcgtgctccattcgggttgtagttctggtgcatgagatgtgtacgcaagactcagcacttcagacggtgtttgcagggctttagcttcagtgataactaggagtgccaaatggtatctgtccaaacttcaacggtcgttgattggtgccagtttgattgtgaatggtgaaacatgtgtgaccctggagctaacctgatttcggtgaaagcttcagaaaagctattctttgcttggttatttctctagccctcagcactcgagtttgacaccatccgacccacacgccggcagctctgtcccatccgataatgtgtcccgctccatgttgttttcttctttattattttgctcccctagctgttaatgtgggactgcttttacctgctgggtctctcgaagcgtctccactgtccggccattttatattcagcgtcgttgccgatgctaccgagccactaccttgacaagctggcatctgctggttacattctgctcccttcatgtggcattatggatgaaattctttgagcataagccttttgattcaagaactgtcatgggatttggagtacttaatggaatctccattgggctcctcaacttgagtcttggcttcaactctgttgggttttaccagatgactaagctggcgatcatcccgtgcactgtcatcttagagacacttttcttcaggaagaagttcagtcggagtatccagatgtccctttctgtgctccttcttggtgttggtgttgcaactgtcactgatctgcaactcaatgctgtgggatccatactctccttgctggcaattatcacgacttgcattgctcaaattatgacaaacactatccagaagaagttcaaggtctcatcgacccaactgctctaccagtcttgcccttatcaatcactgaccctgtttctcattggccccttccttgatggctttttgactaaccaaaacgtctttgcttttaattatacatcacaagttgtgtttttcattgtgttgtcatgcctgatatcggtctcagtgaacttcagcacttttcttgtgattggaaagacgtctcctgttacttaccaagtcctgggccatcttaaaacatgccttgttcttacctttggttatgttttgcttcatgacccatttagctggagaaacatacttgggatcctaattgcagtagttggaatggtcttatattcatacttctgcacagtggagacccagcataagaacactgaagtctccccacagcaggtgaaagaaagtgaggcagcccctttgatctcagactctttgagcaaagttgaaaatgggggcggtgttgttgatgacgagcctttgaaggtacccatgtggagctcaaagtattcgcgggagtgaaattttctcccgctagacggtggcatcatacaggattcagtttagtaggcagatagtagggttggaagccaacccagagtgtaatgaacatttgagttacattttttggccttttttagcgtcacgatctactactggtaaaagggtctgtttcttgggaggatcttaccttcaagattgccagatatacattgaaactagacggcagatattgtatgattgtatctggacatgttccacatcgtctaactgtaacttccaactggtacatggcatgcctatatccaaagatagatttctttttttttgtatcagaaagatccggtaagacttgcgcaaaatttgtagtactattggttcgagtttgtttctttcagttcatgttcactttaaaactttatcatgcaagttctgtatattacaagttcttgcatgcaaaggttttcctttatg

SEQ ID NO: 72793 - DNA, 1218 bp, Zea Mays
aattagacaacaagctccaacaattttttagccgaacattttattgacgttgtaacatccttctaatgaacgcagaacatttttcttgtgaaaccagaacttattttatgtagaggatacataaatttcgtaaaccccatggagatgtacgcttacattttatgatacaaagacatcgcttatacaattgagatcaatctcatccaacgacttctttttgatacatagaatcgtcaaaccattaacctctcttgagtcattgttgaccttaaatagttcacaaaaatatttcaattttaaaaagcttctctctgtcgatgtaatcatcatgtgtatagtaaataatactcactctgtatcaaaatagaattcgttttgcttctctaatggattcatcatcatttgttgaatatagacataaaaatgaagaactaaaacaaatattgttttagaacagagggagtattcgataggtaattgagatattagtttaacaatctaaacgaagttgattgatagtgcgtcgctctttgtatatttatatctagggtaaataggtttaacgggaaaaggtactagcgtatagtagataggtgtccctctgtccttgggtgccgggtctgtctatttactacacctcgttgaatacttaaaaaaaacgtgtcatctagagcgcttgtgcgaaatagaaagtcgaaataaaaagagcataggagcgcgtctattaacaacatccgataatttgacagcaaggaggtctcccctgtacgccaggatctgcaatggagacagtgaaaaatagccggccaagagcataacataagcagtgattatactggtgtaaatggagtgtggtgggctacttactattgggatcgttggtaaccccataaatcaataatgacatgaccaagatcagaagaggcagcagccgccgagtcaggaaaccgtaaccgtatctttgcatgtttccttgtaggcgccgagagctagggatgactatgctacgcctaaaatcataaagattccagagcctattaatagccgttgccccggctgctgcaactgaacccttgacccgggaggttgtgagaaatctgatccaggtaggaggattagtcttttaccgtgcattgtgtgtaagtttgacgagtctcctttgtggtcttatctcagctttcaacttcctgagcatggatttcaagcatacgaaaggag

SEQ ID NO: 72794 - DNA, 754 bp, Zea Mays
tgcgttcaatcagccgccgcaacttaattctcccctatgtgattctctccttttcccagctataaagcgtgctcgccagccctcatttccaaagcctcaacgctcaatctctgctctcctcctcgcacacgcttgcacagcctctgtcaacgctgttctgtacactgccgctgctcgccggtgccgagtttcttcgccgacgcgctgccgcgatgccactcgaagttgtcgccgtttggacgtcgctgtaattcgtccaggattcctctactgcacgcctagaacctcgcctctcgaccacctcccatcgtgcttgccccagttctgctgttgccgcatcctgaggtgcgtgtacctattagaggctgattgtgtgatagaggatccaaattcctttgaggaagacccacatgaccatttcgagcaagagggtgatgatgaagacattttagatgacgttgatgaatattgagtctaacgatgtgtcagtcaacttcctgtggaagagtgtccatgtttaattccgtcgtactttgataatgatacttgttaagatactgtgatctggatgatgtaataaagttactctactcccttttacgcctttattgcattgtcttttgatatattacacttgtgacgtcaatatatgtgtggaaaatggatcttggcacacctatgctatgcatttggttttgcccaaaaaccgggtgtgacaacgaaccacctttgtacaaaattacaatcatgcccc

SEQ ID NO: 72795 - DNA, 977 bp, Zea Mays
cgacgccctctctctctctatcaggcgcacactgtcaagcggcacaggcacagaaaacctagaaggcaccttttccaagagcaccccagccccattcttgtcaccccggcctagcttgttcatgtccactgcaagtgcaaggcacgaagcatccagcgtcaaaaccatcaagttactagaaccctccactcctacccttattacgattctcatgctgttttcagcgaacggcctgaccatgatgagctagggaagaagatcaagagggagtagtcaccggcggagcgcatggcggcggcggcacggaggagctgcagctcgccggcgggggctggtgctgttgcaggggccgcgatgaacataatcacgccgtgcgccgcgtgtaagctgctccggcgacggtgcgcgcaggagtgccccttctcgccctacttctcgccgctggagccgcacaagttcgccgccgtccacagggtcttcggcgccagcaacgtctccaagatgctcctggaggtgcacgagagccagcgcgccgacacggcgaacagcctggtgtacgaggcgaacctgcggctccgggaccccgtctacggctgcatgggcgccatcctcaccctgcagcagcaggtgcaagcgctggaggccgagctcgccaccgtcagggccgagatcgtcaggcacagctgccgtccggcggccgcggcggtggccacggtgctcccctcgtcgcacgcctcccatctcctcgcggcctcggccgccgccagccgcgggctgcacgctggcagcagcaagtcggtaggggcaagagcggcaactttggcggcggccgctgccgtggggcctgcggcctcctcgtcgtcgtcatcggcggtgtacgccgccgccgcgtcgagctcaacggactatagctccgtcaccaatgagaacgttccttattttggttgaggtagcagcacgtttctgcttgaatgtat

SEQ ID NO: 72796 - DNA, 3221 bp, Zea Mays
gcttggtggtgtgctgtccctgggcgttttggccaccactgctgttccactgtgccttgcccttgcgtggtggtcatgcagtagggaggtggagcatattagttttgttttcccatgtgataagtcctattaaagccacgaatagcccattgcttgtaatgtcttgccatgacagttgaagcctagaactgaaccttgtggtgctctcgtagcttccatgacctgctcactgtgccttaccattcttctatacctgtgttaacttcttcagccactcatgtcgcccagttgctttgttcaagacagatgctcgacatcgtcctcctgtgtagtgaccttggccaccagccccttcacctcacagtagccagaatgtagtcgcgccaccgcaaatcatcgccgtgtttagtttcatcgtcgaccagccaacgtgcgtcttccccaagcagtttcatgcacccaccgagaacttggactgtcagagctcccagcagaaggagtgtaaattaaagatgaagtggtcgtggaagagaagtttgctccagtgcctgttcatcaagtggatggagctatctaactggttattgggtagaagatctagaacctcttcactgcaataaggcaagccccggtgcattcaaccccttctctgtgtttttaaattatttttacacactttaagtctagtgaaggtgcattaggtttataggagttgcttggaaaccctttgatgcattggctaccttgaaatccattccttttatagatacttctggtgaagtatcaaaatatgatttacaaaaaaatgcttagccctgcttttaagcagatagagtttgtcctttgcacttatgcctagctcgggtttatcctgaggaaggatggtctctacctgcaagaatattttcattgggagcatggtgggatcttactgcaaagttccctataatgctattttcatccttaggaacacaaacaatactaaggatggaagtacttaaatcgggacttgggctaggaacaggtgatgttctacccaggttaattaaggattggatgcgtatgtaggtctgtatgatcaaggactatcttaactagccacatgccctggatatgggacatagtaagcttgaacccggctattccatacatgaaaagacaatcgcgcactgggagtggagagatagcgagagtggcacgtacctcctggcaaaggaccgcctaaaaggggtggtgtgctctcgggtggcgcggacctgttcatgcagtggaggatccatgggaatggtagacatatgcaagagttacgagaaacatatgtcgtgtggttagagatcctcagctgagtaaatcgattcagatcaccgttatatcctcggagagtggagacttgatcgctgccctacaacctaagtcaagatgtaaacattatgagtaaaaatgatgttgtattgatgagatggtgaaattagactaggtgcaaccagagtctattaatatttaatctggcgttaaaatattgaaagtaaggactcactttagtaagctatttctgcaaaagtatctaagttgattcttgctaagagcctctccttgaatcctaaatccagcatgtccttgagagtctttttccttagtcgggtaagacttgcgaaagtacactccgtactcagggttttcgaacccatgttgttgtaggtgatgaggagtactataattgttcccgaggctggagggcgtttccagttctggaggaagattagttaggcttatgtataagattttgagggttcctaccttcctgcttttgtaataagttatgcactttgagtatatcaggacttgtaataaatgtaactcttcctatataataaccttcagttttagaaataaaaagaacgttttgtaaagtcttccgctcttatctccgaagtgtgtgtatatcgaatgtgattactgtaatatgcatgtatggtgggagatccttgggatgacgagttcaagttgttgaactcgtgatagccttgttaagttacatggtatacgtgcagagccatctgaggtcatcaaggcaaggattggtgcatgtgggcccgataacttgggagggctgccacatcttgcttctattactaaattaaataatgaggtggcaagtcttaatgcccaacttaagacttgcaaggttgattttgataaattgaaattttctagggatgcctacactattggtagacacccttcaattaatgatggacttggttttcgaaaggaaaccaagaacttaacaagccaaaggactcccgttcccaacaaggagaaagggaaggcccctatggcgagtagtcctcaaacgaaccatgcttttatttatgataataaaattgctagccgttctcattataataagagttatgttcatgttgcttttaatgattcacatgctatgtttgcctctagctccacttttgttcatggtagaagtaggcctaagagaaatcatgttgtgtctcatgctcgtaggagaatgtgccatgaaccttctaccatttatcatgcttgcaatacttcatttgtactttcatgtaagaacacaaaagtagttgctaagaagttgggatccaaatgcaagggagacaagacttgtatttgggttccaaaagttattgtgactaaccttgtaggacccaacaagagttgggtacctaaaacccaagcttaaattccttgcaggtttatgcatccgagggctctagctggattattgacagcgaatgcacaaaccacatgacggggagaagaagatgttcacctcctacgtcaagaacaaggattcccatgatacgatcatctttggagatgggaaccaaggcaaggtcaaaggcttgggcaagatagccctcactaacgagcactcaatatcgaatgtatttttagtagagtcgctcgggtacaatcttctgtctgtaagtcaattgtgtcacatgggttacaattgcttgtttacaaatgttgatgtatctgtctttagaagaagtgatggttcattagcttttaagggtgtattagacggcaagctctacttagttgatttttcgaaagagaatgccaatctagatgcatgcttaatagctaagacaaatatgggctggctttagaatcgccgtctagcacatgttgggatgaagaaccttcataagcttctaaagggagatcatgtg

SEQ ID NO: 72797 - DNA, 2121 bp, Zea Mays
taggtgactgcatcgcaaaacatcggtcttattaccatgcgccgccccctgtttttttccatcctttttccgcctctgtctatctaatttctcgtggcggcaagcagatacacatacacaggagagagaacccacgcaagagagagagaaagagggggacacacaagcgctctcctcgcgattggacagggcgcgagcagcccgaggccgcgagcagcctgagggacgggggtgacagcctcgccgtcaccggggtccggggagtccgtttcgagctctgtcccgcctcggatttggtgggatccggcaaagaaataccgcggttggtgaggaggagaggaggggaggaaaggaggtgttgcggatgggcgtcagtgcggagcccaaggagcaggctgcactgtggccacgagttccatctagattgcattggatcagcatttaatgccaaagggggtatgcaatgccccaactgccgcaaaattgagaaagggaattggctttatgcaaatggtttccgacctgcacatgatgttagcatggatgagtgggcccatgatgaagacctttatgatgttagctactcagaaatgccatttcgcttccattggtgtccatttggtcgcttagctcaacttccatctttatttgagtatgttcttcttcagatgattattttttactattgtttagcattctgttcaaatattctaaacacacagttctatctaattgattatttttggccagtaggtttaacatacaagccacattatctacatatgtagctttaccttgtaatagattcataatgactcatatcttttgttcaacttaaatcacccatttgggatttgctattggagatcagtcttaacaaatggtatagttgaacctagtcccatgggaccgaccaggcgattaatcacgatagttgcctaccagtccgattagtcgagcctatcatagttgttcatatagtcatcctgtatatcaggacatatacccactatatatacacatactatatagtagacttgtgagagctttctgcactgtccagaactccatattcctgtcccaaacttcattttttttgctgacttgctgctggaataccaaagaagaccataattagcaacacatgtagtcttggtcttgattaacttataattataattagagcaactcaacatcagcactgctgcattagcaaataactagcatttatcagaccatagcagctacacacccagcatattgcataaccaaacgagttcagtacttcagaacatattacataggctgaaaagcagcctgctagccacctagataagttaagtgttcaacacaaacattgacattcaatagttcaacacaagtaggcaactagccatctaattaagcaaatcatcattcaaacggaagcctccatgtccatctccagttgcagttggtgcagatctgtcacacccagatttaaggggtaaacccatgtgcgtctcatatgtacgccaaagaagaacaacacatatagagtgtgtttggtttaaggaatgaagtgatccatcttcttctcacccctcacttttttatttggtttgtggaatagaatgggttgatccatcaccaccccattcctcataagctaataattactatatacattgaggagtgggttgattccaccaaaattgatggaatgaacatatgatgcatcacctcatgaagcatagagtgactccacaaaccaaacacaccaataatgaccaagtgtatagagataaatgtcacaaacattattacataacgagaatgtcttacaaaataactgataataaataaagcgaactaatattatttccttgacgccattaagtcgactgaaagacgactcctagacctcatcaaactcctcgtagtagtcctcctgggctacttgctcttcacttgtgggggggggggggttatatatcgcaagggtgagctcacaaaagttcatcgctcaacaatgtgcatgagcttatcaatagtaggggctcatgtgaagtgtaaggctgatcaacaaataatggttaaagttgagcattgcttttaataagttggtcaaattttatttcc

SEQ ID NO: 72798 - DNA, 5578 bp, Zea Mays
atcagatctgatcttaggagataactggaataaacacattaaatgtacagattccatatcttcatattgcttgatacataattttcaaccaatcactggtcaaactagcaggtgcggaatctggcaatacattattgtagattgttcaggattgcatatcaacacaaataatcaagtttcccgcaaaaatcagagtatcctccatgagatcttccttatattacacatgaagcactatggcaatatgaattgtcaaatgtcaatcattacttgaattatgcttctcataagggacatgtatactcttatcttggaagaatgacactacggaccttaggattagctcacttgttttctctaatacaccctacataggtaaagcacctattatcaccatcagtggtgttcaccattaaccatcctaatcgactggactggaggtgccaagacgattagctcgatcagaattcagaaagctagtcgtccgactagaacagggacaaccagattggttgctctgttttttgaagcctgtttaactgggcctacgtatgggagtacaagagcaccacagaaacacaaagcaagggagacacgcaggtaaatccaaacgatggctgtaatttctcccgcacacgactcctcccttcccatgcacgatttcccactcccgctcatgattcctcctccgtgtgctgttctgtttcccatgcatcatcctcctctctagtgagcggtgtagccagtgccctctgccagttcaagtggctgccaatattcgtgatgagctcctccgatgaaggtgtgtgcctttccctctccatcttcctctctctcctcccccatccctcactctgcagcctctgctaggttgcttgctcgttgtgctgtccctctgctattctttggttctccatcctaagatattatgcttgcatatgagtatattgcagatgtccgatgagtggactgacacaagccaccaccatctcatcaatttccttgctaatagtccagcagggacattcttcctagggtctgttgatgcttcaagtgaggtagcaaatgcacatattttggctgacttgttggggaagcaaattgataaggttgagaaggaatatgtggtgcagattgtcactgacaatggagccaagttcaaggcagcaggaggcttctaatggagaggatcccacatttgttttggacatcttatgctgcccattgcttggatttcttgttggcggacattggaaagatcaataaatcaacacttgcatcaacatggtaaagaaaatatgcagatttgtctacaagcatgggagggatcatgatctaatgagatgcttggatttcttgttcgcggacattggaaagatcaagaaattcaacacttgcatcaacatggcaaagaaaatatgcagatttgtctacaagcatgggagggttcatgatctaatgagagataagataggtcaagatcttgtgaggccagctgtaactcgctttgccacttcatttctcacattgacaagcatgtataagcacaggaatggattgaaaaaatttattgttatgaatggcatgctactagcttccctacctctcaagaaggtcggcaagttgagaacattgtcctttcaatgtcattttggaataaactggaatggtgcctaagagcttcacagccacttcttgttgctctaaggatagcagatggagataccagcagctcctgagattatggcagccatggatgttgcaaagaccacaatcaaggattctttgaaagacgaaccaagtttacttaaggaggtactaggatcatggtttttaaagcagtaaggcagtccaaggcgttggagcactgcctggacgcctaggcggcgcctaggcgaggtaggcgggcaaggcgcctaggcgttagagcaccgcccggacgcctaggcgacgccttaagaacagagactaggatactatgacaagagatgggaaaaccaaatggagcaaaagccatatagtgcagccctattcgtgaatccaagcaagtactttttcataaggaaaaaagataggagacaagctacggagctgagaattgtgtttaatgaagttatgtgaaagttggtgaatggtgatggggataagataagtaagcaagccgatgactatgagagagctgaaggcgaatccttctcaaagcatggagcaataagaaacagatagaaaataaaaacctagtaagttctgtataactatttccttccttttttctcagaaaaaaatgaactaataatggaattgtatgtttggaatgcaaattacagttctttggtggggtgggtgcatatggtgccctgacatatgagctccaacgtttagcaaaaagaattgttagcctttgttgtgctgcatctaaatacaagtgtaattggagtgaattttctcatggaagtgttgggacaggtctgaagggacgtaacttgcctagggctggtgctgctcgtgctgttgttgctgcccctgtaaggcatagttatgctaggaacaggaagcatctaaggaagacagtggctcaaagatattgatgaggaatataatgatgaagaccaagatcagcatggagaatctgattcagcaacagcaatggaagagaatgaagaatctattcatactgcccatggatcttgtaatacccaacttttataaagaagtggagttaataccctatatgaatgcgcttgcatttgtgatcacatgtaaagtaaatggaaataaatcttgcatatcatgctggtgtttttgtatgaggtgcatctaaatgggaatctaaggattcaaaacccacttgaattcaaaatttaaaaaaaggggaaaatgaaaaacttaaaaatctagaaagaaaattctaatgaagattaactatcctttccttaattagataataggaaaaaaattgccaaggcctaaggaggcccacgaaggggctgcgacagcagcagccatgggccctccaaggggattagataaagatagttagagataagattagaagattagttgagattatctaggagattagtcgaaattatctaggaaggttatcagttagtagttgttgagagcttttaggagagtttaaggagataaggatctctagctagataggggcggccagcgggcctatttatgtaatcaatggatgagaaataaaggaggcaagaattagaagggagaaaccctcctcttgctcggtcgtgggcagaggcccccgaccgacgttcctgtccatcaatacccctctccaatccctcaccgatctagcgaccataacaaaaataaataatattattgcaaacagtaggagttatattcacattaggattatgtttgatatttggaaatctgaagttcaaaacaggaatttaaatttagtttgaatacttgaatttggaaatagaaaagataaaaatggaaaagataaagaaaaggagaatcacctgttttgggccaccaggctagaattcggcccacctaacctacatgtcgcgcgcagcccatctctgcggttggcgccgacgcgtgggccccgcccgtcagacactgcaccacgcttgactcttccttccctcactgattcacgggcccgctcatcagctggctccttcaacgcgcgcggactcgagcgtctcgctggtgcgtgggccttcaccaactattgttcctcttcccgaccctgcggcatcagcgcggttggttacgccacccgaatcttcagctgggggcggtaaggttgcgacgtccataaaacaggagttgcgcaggtcacctcgcccttccatgcgccacaaccaaacattagggatcagtgttgccaacaaaatcaagggagcatgagagggcagcgagctctgagagtcaccgcgggtgaactccggctcgccgttgaccgagtcctcagggttgtgtcctagggcttcttcaggctaggtgggtggacgaacccgtgccgcttgggattcatcgccaacgccgcctgaatagctcactgacggtgataccccgccgcggaccgcaagcccccgcagccagggccgcccatgcgtctaaccttggtgagatgtccttcccgtgcctcgccatgtcctactctacattatgcggccaccggtgcggggtttcgggcgaaaaaatggggccgggctatgccccggcaagggcaccgccgtgcggggagagcgccgccagccggagtcaggggagaggtgcgagatcatgccagccgttgaatccctgatttgcggctctgatcggctccgacgtagcgattggattagaggacgctggaccgttgatccggttaggtgcggtcgtgatgagataggagggtactatttcgtattttaaatctatgtcgtagatcggaaagtgggcggatctaggatgggtgaggcgtggtcaaatttggaccattgaatttggatcgggcaactgcaatcgcgtaccagttcggtagagatagattgtaatcgtggccgtctagggtagatcggacggctgtaattgcacgataaccctttgcagtgacaattatgctaaagaacccttctgttttgggaaataaacctgtcgtccacatcagttataaagtaattgaatctaagtccagaaattgagatttagcccatgtgctgtcggaattttagacccgcagcccaggaagtgaataaattggataatataatacagaaaatgttttctagtatagaaaacattccagaatcttgattaattcataagtgattcattttaactccttttttatccattccagttgcattaaatttgtattaatattgtttatcatccagtagccttatttcagggtgaacctatggttaaaagcatgcacttaatttgttttatgtctaacttctaaatctttagaaaatcataacttcttaatcgtaactccgattttagtggttctcgaacctacgatctcgttacgatgcgtagatcattattatgcaatatgttctcatgattagtgtgatgttaatttctcatataccatgtttgtttgtattactgcgagtagacgagcaagtgaccgaggacctcggtactctgcaggtggaaaactctgagcaggagctcattgaaggcaagttgtgtccttgatcacttttctttacccaataatgttcctgttaatcattatgatctgcataggttaattttgttgggacccaataggtcaccctagtttggtcatctttataccttgtttaccactgaacttttgggtagtacatgctattgctttatgtggttttgggtgttaagatacacattattcacaaccatgccttttattgtcaatgagttatttactgttcatgacaagatcattatgttaattggaacatggagcgaccacctaggaaaacagtgctaccacaagggtgctatgggacgcccttggctgactaattaggaaagctagtggaggactatcttacccgaaagggacaagggcggtaggtgagttgtcggtatagggaggttctcgggt

SEQ ID NO: 72799 - DNA, 5403 bp, Zea Mays
atcagatctgatcttaggagataactggaataaacacattaaatgtacagattccatatcttcatattgcttgatacataattttcaaccaatcactggtcaaactagcaggtgcggaatctggcaatacattattgtagattgttcaggattgcatatcaacacaaataatcaagtttcccgcaaaaatcagagtatcctccatgagatcttccttatattacacatgaagcactatggcaatatgaattgtcaaatgtcaatcattacttgaattatgcttctcataagggacatgtatactcttatcttggaagaatgacactacggaccttaggattagctcacttgttttctctaatacaccctacataggtaaagcacctattatcaccatcagtggtgttcaccattaaccatcctaatcgactggactggaggtgccaagacgattagctcgatcagaattcagaaagctagtcgtccgactagaacagggacaaccagattggttgctctgttttttgaagcctgtttaactgggcctacgtatgggagtacaagagcaccacagaaacacaaagcaagggagacacgcaggtaaatccaaacgatggctgtaatttctcccgcacacgactcctcccttcccatgcacgatttcccactcccgctcatgattcctcctccgtgtgctgttctgtttcccatgcatcatcctcctctctagtgagcggtgtagccagtgccctctgccagttcaagtggctgccaatattcgtgatgagctcctccgatgaaggtgtgtgcctttccctctccatcttcctctctctcctcccccatccctcactctgcagcctctgctaggttgcttgctcgttgtgctgtccctctgctattctttggttctccatcctaagatattatgcttgcatatgagtatattgcagatgtccgatgagtggactgacacaagccaccaccatctcatcaatttccttgctaatagtccagcagggacattcttcctagggtctgttgatgcttcaagtgaggtagcaaatgcacatattttggctgacttgttggggaagcaaattgataaggttgagaaggaatatgtggtgcagattgtcactgacaatggagccaagttcaaggcagcaggaggcttctaatggagaggatcccacatttgttttggacatcttatgctgcccattgcttggatttcttgttggcggacattggaaagatcaataaatcaacacttgcatcaacatggtaaagaaaatatgcagatttgtctacaagcatgggagggatcatgatctaatgagatgcttggatttcttgttcgcggacattggaaagatcaagaaattcaacacttgcatcaacatggcaaagaaaatatgcagatttgtctacaagcatgggagggttcatgatctaatgagagataagataggtcaagatcttgtgaggccagctgtaactcgctttgccacttcatttctcacattgacaagcatgtataagcacaggaatggattgaaaaaatttattgttatgaatggcatgctactagcttccctacctctcaagaaggtcggcaagttgagaacattgtcctttcaatgtcattttggaataaactggaatggtgcctaagagcttcacagccacttcttgttgctctaaggatagcagatggagataccagcagctcctgagattatggcagccatggatgttgcaaagaccacaatcaaggattctttgaaagacgaaccaagtttacttaaggagttctttggtggggtgggtgcatatggtgccctgacatatgagctccaacgtttagcaaaaagaattgttagcctttgttgtgctgcatctaaatacaagtgtaattggagtgaattttctcatggaagtgttgggacagtaagtactagtgctaagtaattggagtttggtagcaatattactgcatggtatgtgattctgcattgtattttgtgtaggtccatacaaaaaaaagaacctggttcgaacaccgaaggttaaataagtaggtgtatgtcagctacaaccggaagatggaaaacagattttttaaaactagaagctgggttccaaaagaaagaaatgcaagccactcttgattgaacaattttaattgggaaaatggatggtcggtgaaaattgtgaaccagttcccgtaggtggtgacaatgctatgacttgggttaatgtgaatgatgatattggtgcaactcagggtctgaagggacgtaacttgcctagggctggtgctgctcgtgctgttgttgctgcccctgtaaggcatagttatgctaggaacaggaagcatctaaggaagacagtggctcaaagatattgatgaggaatataatgatgaagaccaagatcagcatggagaatctgattcagcaacagcaatggaagagaatgaagaatctattcatactgcccatggatcttgtaatacccaacttttataaagaagtggagttaataccctatatgaatgcgcttgcatttgtgatcacatgtaaagtaaatggaaataaatcttgcatatcatgctggtgtttttgtatgaggtgcatctaaatgggaatctaaggattcaaaacccacttgaattcaaaatttaaaaaaaggggaaaatgaaaaacttaaaaatctagaaagaaaattctaatgaagattaactatcctttccttaattagataataggaaaaaaattgccaaggcctaaggaggcccacgaaggggctgcgacagcagcagccatgggccctccaaggggattagataaagatagttagagataagattagaagattagttgagattatctaggagattagtcgaaattatctaggaaggttatcagttagtagttgttgagagcttttaggagagtttaaggagataaggatctctagctagataggggcggccagcgggcctatttatgtaatcaatggatgagaaataaaggaggcaagaattagaagggagaaaccctcctcttgctcggtcgtgggcagaggcccccgaccgacgttcctgtccatcaatacccctctccaatccctcaccgatctagcgaccataacaaaaataaataatattattgcaaacagtaggagttatattcacattaggattatgtttgatatttggaaatctgaagttcaaaacaggaatttaaatttagtttgaatacttgaatttggaaatagaaaagataaaaatggaaaagataaagaaaaggagaatcacctgttttgggccaccaggctagaattcggcccacctaacctacatgtcgcgcgcagcccatctctgcggttggcgccgacgcgtgggccccgcccgtcagacactgcaccacgcttgactcttccttccctcactgattcacgggcccgctcatcagctggctccttcaacgcgcgcggactcgagcgtctcgctggtgcgtgggccttcaccaactattgttcctcttcccgaccctgcggcatcagcgcggttggttacgccacccgaatcttcagctgggggcggtaaggttgcgacgtccataaaacaggagttgcgcaggtcacctcgcccttccatgcgccacaaccaaacattagggatcagtgttgccaacaaaatcaagggagcatgagagggcagcgagctctgagagtcaccgcgggtgaactccggctcgccgttgaccgagtcctcagggttgtgtcctagggcttcttcaggctaggtgggtggacgaacccgtgccgcttgggattcatcgccaacgccgcctgaatagctcactgacggtgataccccgccgcggaccgcaagcccccgcagccagggccgcccatgcgtctaaccttggtgagatgtccttcccgtgcctcgccatgtcctactctacattatgcggccaccggtgcggggtttcgggcgaaaaaatggggccgggctatgccccggcaagggcaccgccgtgcggggagagcgccgccagccggagtcaggggagaggtgcgagatcatgccagccgttgaatccctgatttgcggctctgatcggctccgacgtagcgattggattagaggacgctggaccgttgatccggttaggtgcggtcgtgatgagataggagggtactatttcgtattttaaatctatgtcgtagatcggaaagtgggcggatctaggatgggtgaggcgtggtcaaatttggaccattgaatttggatcgggcaactgcaatcgcgtaccagttcggtagagatagattgtaatcgtggccgtctagggtagatcggacggctgtaattgcacgataaccctttgcagtgacaattatgctaaagaacccttctgttttgggaaataaacctgtcgtccacatcagttataaagtaattgaatctaagtccagaaattgagatttagcccatgtgctgtcggaattttagacccgcagcccaggaagtgaataaattggataatataatacagaaaatgttttctagtatagaaaacattccagaatcttgattaattcataagtgattcattttaactccttttttatccattccagttgcattaaatttgtattaatattgtttatcatccagtagccttatttcagggtgaacctatggttaaaagcatgcacttaatttgttttatgtctaacttctaaatctttagaaaatcataacttcttaatcgtaactccgattttagtggttctcgaacctacgatctcgttacgatgcgtagatcattattatgcaatatgttctcatgattagtgtgatgttaatttctcatataccatgtttgtttgtattactgcgagtagacgagcaagtgaccgaggacctcggtactctgcaggtggaaaactctgagcaggagctcattgaaggcaagttgtgtccttgatcacttttctttacccaataatgttcctgttaatcattatgatctgcataggttaattttgttgggacccaataggtcaccctagtttggtcatctttataccttgtttaccactgaacttttgggtagtacatgctattgctttatgtggttttgggtgttaagatacacattattcacaaccatgccttttattgtcaatgagttatttactgttcatgacaagatcattatgttaattggaacatggagcgaccacctaggaaaacagtgctaccacaagggtgctatgggacgcccttggctgactaattaggaaagctagtggaggactatcttacccgaaagggacaagggcggtaggtgagttgtcggtatagggaggttctcgggt

SEQ ID NO: 72800 - DNA, 2635 bp, Zea Mays
aaaaaataaagagagaagccagccacagccagcgagcgccccctccggctccggccctcctcttcctcttcccccaattcccattcccaattcgccctcctcaaatccggcgccgcattcccgacattccgcagatctgggatccgccgccgacggatcccctgccgcccgcaacgacccgggacgcgcgtgatcccgccgcctagccgccaagttggcgcctcagcggaggtcgcagcgcctcgccggcggcggcgcgggctctgccgccgccgccgccgcgcagccgcccggagcctctagcgcgcacgctgcgacgggtgactcgggcgacgccgtcatggcgcgctggctgcagtccgcggggcttcagcacctcgcaacgtcctccgccgccggcgctggcggcgcggactaccgtggtgggatgcctgggtttgggggcgctggcgccggaagcatgctgtcgagcctgctcatgcagggctatgggccagaatcaattgaagaaaagcagaggctttatacgcttctgagaggtctaaattttagcggagagtctgtacccacatcaatctctgagccttacacaccaacagctcagagctttggtggtgggaaccctgtagaggggttttattcgcctgaacttagaggggatcttggtgctggacttctagaccttcatgctatggatgatactgggcttctgtctgaggatgtagcatcggaaccatttgagccatcaccttttatgccgaaggatattgatgatgatgatgaggatgtgatagcagggagtcagcaagcctcagtagataattatggtgtggtgaccagtgaaaaagagaccactgctagagaaaataatgtagcaaagattaaagtagtggtaaggaaaagacctttgaacagaaaggagctatctcgaaaggaagaagacatcataactgtggaggattcatcatttttgacagtttatgagcctaagctgaaggtggatctgacagcctatgtggagaagcatgaattttgttttgatgctgttttggacgaacatgtttccaatgatgaggtttaccgtgaaacagttgagcccataattccaattatatttcagagaacgaaagcaacatgttttgcttatggccaaacaggtagtggcaagacgtacacaatgcaacctttgcctctgagagctgcacaagacatggttcgtctattgcaccaacctgtctatcggaatcagaattttaagttgtggcttagctattttgaaatatatggtgggaaactatttgatcttctatctgacagaaggcaactactgatgagggaagatggcaagaaacaagtttgcattgttggtctacaggaatttgaggtgtctgatgtacagatcgtaaaggaatatattgaaagaggaaatgcagctagaagcacagggtcaacaggggccaatgaggaatcatcaaggtcacatgctattctacaactggctgtgaagaagcatatcattgtaaaagataccaggagacagagagatcgtgatgctaatgaagctaaaaatacaaaggctgtggggaaaatatcatttattgaccttgctggaagtgagcgtggtgctgatactaccgataatgatagacaaacaaggattgagggagcagagataaataaaagtctgttagctctcaaggaatgcattcgagcacttgataatgatcagatacacattcctttcagaggaagcaagcttactgaggtccttcgtgactcatttgttggtaactctaggacagtgatgatttcttgcatttctccaaacgcaggttcatgtgaacacacactaaatacattgagatacgctgatagggtcaaaagtctttccaagggcggaaatacaagaaaagagcagtccacaggaccaactaccacttctagccgggattctttgtcagctttatcatattcattgcctgctgaagctgaagaaattcctaatcaagttcaagagaagagaccagtcgatacttataggaagggcactgaaaattttatctccaacccttctgtggagtctgaccgaaattcctttagtacgattccaaattattccaatagagggagagaagaaaatggtgcagcatctggtaatgacagggagagctatgatttgaagtccagccaacctgcttacactagtaagccacagttggttcagaattcagcaaacacacaggaggaggagaaagtcacaaaagtctcacctcctcggagaaaggcttatagagaagacaaatctgataggcagagcaactatatgaaaaaggataatggtcctgagacaagtcgggttgggtataagatgcagcaggcaaagcagctgcaacagcaacaaagaccagcatctgcttcagcctcatcaaggcaatctgaaaaggaaagttcttgtgatgatgtagaaattgatgcaattcttgaggaagaggaggccctcattgcagttcacaggaaggagatcgagaatactatggagattgtgcgggaaatgcaattatccagtcctttgtgcaaacaagggcttccaccatctcaggatcaaggcgacttcgatatggatcgacaacacgac

SEQ ID NO: 72801 - DNA, 3332 bp, Zea Mays
aagccagccacagccagcgagcgccccctccggctccggccctcctcttcctcttcccccaattcccattcccaattcgccctcctcaaatccggcgccgcattcccgacattccgcagatctgggatccgccgccgacggatcccctgccgcccgcaacgacccgggacgcgcgtgatcccgccgcctagccgccaagcggactaccgtggtgggatgcctgggtttgggggcgctggcgccggaagcatgctgtcgagcctgctcatgcagggctatgggccagaatcaattgaagaaaagcagaggctttatacgcttctgagaggtctaaattttagcggagagtctgtacccacatcaatctctgagccttacacaccaacagctcagagctttggtggtgggaaccctgtagaggggttttattcgcctgaacttagaggggatcttggtgctggacttctagaccttcatgctatggatgatactgggcttctgtctgaggatgtagcatcggaaccatttgagccatcaccttttatgccgaaggatattgatgatgatgatgaggatgtgatagcagggagtcagcaagcctcagtagataattatggtgtggtgaccagtgaaaaagagaccactgctagagaaaataatgtagcaaagattaaagtagtggtaaggaaaagacctttgaacagaaaggagctatctcgaaaggaagaagacatcataactgtggaggattcatcatttttgacagtttatgagcctaagctgaaggtggatctgacagcctatgtggagaagcatgaattttgttttgatgctgttttggacgaacatgtttccaatgatgaggtttaccgtgaaacagttgagcccataattccaattatatttcagagaacgaaagcaacatgttttgcttatggccaaacaggtagtggcaagacgtacacaatgcaacctttgcctctgagagctgcacaagacatggttcgtctattgcaccaacctgtctatcggaatcagaattttaagttgtggcttagctattttgaaatatatggtgggaaactatttgatcttctatctgacagaaggcaactactgatgagggaagatggcaagaaacaagtttgcattgttggtctacaggaatttgaggtgtctgatgtacagatcgtaaaggaatatattgaaagaggaaatgcagctagaagcacagggtcaacaggggccaatgaggaatcatcaaggtcacatgctattctacaactggctgtgaagaagcatatcattgtaaaagataccaggagacagagagatcgtgatgctaatgaagctaaaaatacaaaggctgtggggaaaatatcatttattgaccttgctggaagtgagcgtggtgctgatactaccgataatgatagacaaacaaggattgagggagcagagataaataaaagtctgttagctctcaaggaatgcattcgagcacttgataatgatcagatacacattcctttcagaggaagcaagcttactgaggtccttcgtgactcatttgttggtaactctaggacagtgatgatttcttgcatttctccaaacgcaggttcatgtgaacacacactaaatacattgagatacgctgatagggtcaaaagtctttccaagggcggaaatacaagaaaagagcagtccacaggaccaactaccacttctagccgggattctttgtcagctttatcatattcattgcctgctgaagctgaagaaattcctaatcaagttcaagagaagagaccagtcgatacttataggaagggcactgaaaattttatctccaacccttctgtggagtctgaccgaaattcctttagtacgattccaaattattccaatagagggagagaagaaaatggtgcagcatctggtaatgacagggagagctatgatttgaagtccagccaacctgcttacactagtaagccacagttggttcagaattcagcaaacacacaggaggaggagaaagtcacaaaagtctcacctcctcggagaaaggcttatagagaagacaaatctgataggcagagcaactatatgaaaaaggataatggtcctgagacaagtcgggttgggtataagatgcagcaggcaaagcagctgcaacagcaacaaagaccagcatctgcttcagcctcatcaaggcaatctgaaaaggaaagttcttgtgatgatgtagaaattgatgcaattcttgaggaagaggaggccctcattgcagttcacaggaaggagatcgagaatactatggagattgtgcgggaaaggttgatcaaccaggcagcctgattgacaactacgtgacacaactgagctttctgctgtcacgcaaggctgcaggtttggtaagcctccaatcacacttggcacggtttcagcaccgcctcaaagagcaagagatccttagccgcaagaaaccttccagatagtatgctcaacaatggctctggattttgcctggaaatcttattgcttggagctcaatcgcagtctattagttggttttctcctgtgcgctccagtaaatgttagacccaagcaaagcagtgatagagaggacacatgggagttgcttgagggtgtggtgatcttgatgttgaggatggtgtggtcctggttgatgtctccactttgtgtttgtcagggttgacaaccagtttggtagtagtcctttttacagtggggctgcttgggtgtttttttttggcagatgtcatgtatggcttgcccactttgcctttttttttcttttccccattttgtacgagaaactggaatgtctggaatgttgtttgcagacaccggtgggtcgatattcaccgagggggtctgtggaaaccgatacattgttgtatactagtcggttgaccgtgcgttacaacggcttacaacaatatccacgtaaactattcataaaaaatttttaagattttttattgattgtctccgcgctctctgtataatatattttttgatttggctaactgatgttattgtttactccatgcaaatatatcttggtacaacacggccaataaagtgagcgattagaagagagttcacaatgattgactgaatgaacagagattataaaatgacataattccatcataaggagaccaaataagagagtttgtgagatcaagtttctaaaaaagtcccatgaagtcaaacttataaaaaagatagattaaaatatggagtgattgctaaagtcaggcatcaataaaaactggatgcgctccatataaattatg

SEQ ID NO: 72802 - DNA, 3253 bp, Zea Mays
cagccagcgagcgccccctccggctccggccctcctcttcctcttcccccaattcccattcccaattcgccctcctcaaatccggcgccgcattcccgacattccgcagatctgggatccgccgccgacggatcccctgccgcccgcaacgacccgggacgcgcgtgatcccgccgcctagccgccaagcggactaccgtggtgggatgcctgggtttgggggcgctggcgccggaagcatgctgtcgagcctgctcatgcagggctatgggccagaatcaattgaagaaaagcagaggctttatacgcttctgagaggtctaaattttagcggagagtctgtacccacatcaatctctgagccttacacaccaacagctcagagctttggtggtgggaaccctgtagaggggttttattcgcctgaacttagaggggatcttggtgctggacttctagaccttcatgctatggatgatactgggcttctgtctgaggatgtagcatcggaaccatttgagccatcaccttttatgccgaaggatattgatgatgatgatgaggatgtgatagcagggagtcagcaagcctcagtagataattatggtgtggtgaccagtgaaaaagagaccactgctagagaaaataatgtagcaaagattaaagtagtggtaaggaaaagacctttgaacagaaaggagctatctcgaaaggaagaagacatcataactgtggaggattcatcatttttgacagtttatgagcctaagctgaaggtggatctgacagcctatgtggagaagcatgaattttgttttgatgctgttttggacgaacatgtttccaatgatgaggtttaccgtgaaacagttgagcccataattccaattatatttcagagaacgaaagcaacatgttttgcttatggccaaacaggtagtggcaagacgtacacaatgcaacctttgcctctgagagctgcacaagacatggttcgtctattgcaccaacctgtctatcggaatcagaattttaagttgtggcttagctattttgaaatatatggtgggaaactatttgatcttctatctgacagaaggcaactactgatgagggaagatggcaagaaacaagtttgcattgttggtctacaggaatttgaggtgtctgatgtacagatcgtaaaggaatatattgaaagaggaaatgcagctagaagcacagggtcaacaggggccaatgaggaatcatcaaggtcacatgctattctacaactggctgtgaagaagcatatcattgtaaaagataccaggagacagagagatcgtgatgctaatgaagctaaaaatacaaaggctgtggggaaaatatcatttattgaccttgctggaagtgagcgtggtgctgatactaccgataatgatagacaaacaaggattgagggagcagagataaataaaagtctgttagctctcaaggaatgcattcgagcacttgataatgatcagatacacattcctttcagaggaagcaagcttactgaggtccttcgtgactcatttgttgggtcaaaagtctttccaagggcggaaatacaagaaaagagcagtccacaggaccaactaccacttctagccgggattctttgtcagctttatcatattcattgcctgctgaagctgaagaaattcctaatcaagttcaagagaagagaccagtcgatacttataggaagggcactgaaaattttatctccaacccttctgtggagtctgaccgaaattcctttagtacgattccaaattattccaatagagggagagaagaaaatggtgcagcatctggtaatgacagggagagctatgatttgaagtccagccaacctgcttacactagtaagccacagttggttcagaattcagcaaacacacaggaggaggagaaagtcacaaaagtctcacctcctcggagaaaggcttatagagaagacaaatctgataggcagagcaactatatgaaaaaggataatggtcctgagacaagtcgggttgggtataagatgcagcaggcaaagcagctgcaacagcaacaaagaccagcatctgcttcagcctcatcaaggcaatctgaaaaggaaagttcttgtgatgatgtagaaattgatgcaattcttgaggaagaggaggccctcattgcagttcacaggaaggagatcgagaatactatggagattgtgcgggaagagatgaaccttttggcagaggttgatcaaccaggcagcctgattgacaactacgtgacacaactgagctttctgctgtcacgcaaggctgcaggtttggtaagcctccaatcacacttggcacggtttcagcaccgcctcaaagagcaagagatccttagccgcaagaaaccttccagatagtatgctcaacaatggctctggattttgcctggaaatcttattgcttggagctcaatcgcagtctattagttggttttctcctgtgcgctccagtaaatgttagacccaagcaaagcagtgatagagaggacacatgggagttgcttgagggtgtggtgatcttgatgttgaggatggtgtggtcctggttgatgtctccactttgtgtttgtcagggttgacaaccagtttggtagtagtcctttttacagtggggctgcttgggtgtttttttttggcagatgtcatgtatggcttgcccactttgcctttttttttcttttccccattttgtacgagaaactggaatgtctggaatgttgtttgcagacaccggtgggtcgatattcaccgagggggtctgtggaaaccgatacattgttgtatactagtcggttgaccgtgcgttacaacggcttacaacaatatccacgtaaactattcataaaaaatttttaagattttttattgattgtctccgcgctctctgtataatatattttttgatttggctaactgatgttattgtttactccatgcaaatatatcttggtacaacacggccaataaagtgagcgattagaagagagttcacaatgattgactgaatgaacagagattataaaatgacataattccatcataaggagaccaaataagagagtttgtgagatcaagtttctaaaaaagtcccatgaagtcaaacttataaaaaagatagattaaaatatggagtgattgctaaagtcaggcatcaataaaaactggatgcgctccatataaattatg

SEQ ID NO: 72803 - DNA, 1085 bp, Zea Mays
attctagatgctataatcaagcaagcgaactgggactgctctaaaatgctagagaaatttcggcgtgatatcgaagatcatgcactttcaattcgtgaaagcaagctatccgaaatgacaagacacgctaaggacaaactaagaaaagcacttgctgaacctgtggagtctctatttgatgctgcagaccaaacaacctggcaatcaataagaaacatttacaaacgtgagacagaggccatcctaccagagtttctgaataacctttgtcagtttgaaatggaatatgctccagcagaagaaatggtatccaaattaaaggattatgcccgaagtgttgtggaaagtaaagctaaagaggaatctagcaaagtatcgatccatatgaaggagaggttcacaacagtgtttagccatgacaaggattcaattccaagggtctggacaggaaaggaagatgttcgtgcaatagtaaaggaagctcgatctgcggctctcaaacttctgtctgtaatggcagccattcgctgggatgacgagccagataggattgaaagcatcctcacttcaacacttctagaaggctctgttgtatcaaagattgcaagtgctgcttctgctgatccacttgcttctaccacttgggaagaggtaactttgtgttggtctgttcttgcacaagcaaacaatggaagcacaggtgtgcatgtaacaccactttatgaaactcgaaacagattcctccaaagcatacaatgattaccccgtatcagtgcaagtcactatggaaacaatttaaagtagaaactgagttcacgattacacaagcagtatccacacaggtgtgcatttcatacaacatagctttgatttctgatatcagtcagcatggtgcttattcttggtttcaatgagatcatggtgcttattaggaatcccatttatctgttcttgctatttgtgggctacttgatggtcaaagctttggcgatgcagctagatgtcagcagagaattccagaatggagtgcctccccaaaccggaagtctactgcctactgcctcgcattctcacttggtatgtag

SEQ ID NO: 72804 - DNA, 1162 bp, Zea Mays
aacgatttgctcggttcgtcgacgacaacctccatcttcacattccgtcctctctccctctccctctccctcttcctcctcactccccacccccctactccctctctcgtcatccgccacacgccgccaccgtctccgggcaggcaggaagcaaagcggtaagatgatgatgacgcgggccccgatgggaccgatggagggcgcggcggtggacgaggtggtgcgccgtctcgtggagggcggccgcggcggccgccaggtgcagctgtcagaggcggagatccggcagctctgcgtagacggaaagcgggtgctcctttcccagcccaacctcctccgaattcacgcccccgtcaagatctgcggtgatatccatggccagtttgttgatcttctgaggttgttcgatttgggtggttatcctccagcttcaacttatgtattccttggagactatgtcgatagaggcaaacagagcttggagactatatgcctgctgctggcatacaaaatcaggtatcccgaaaaaattttcctgttgagggggaaccatgaggatgcgaagatcaacagagtctatggtttctatgacgaatgtaagaggaggttcaatgttcggctgtggaagatattctcagattgcttcaactgcctgcctattgcagcgctcattgatgacaagatactgtgcatgcatggtggtctctcaccagaatggactagtttggatcagataaaggatattgagaggcctgctgagattcctgattatggtctcttgtgtgatctgctttggtctgatcctagtcctgatggagaagggtggggggagagtgacagaggtgtttcgtgtacgtttggtgcagataagctcgtagagtttttggagaagaacgatctcgaccttatatgccgagctcatcaggtagttgaagatggttatgagttttttgcacaacgaagattagtgacaatcttttcagctccaaattactgtggagagttcgataacgccggtgctctgttgagcatagatgagagcctaatgtgttcatttcagattctgaagccaactgatatgggtccaccacatgcaagaaaacaaattccaaataaggtgtatgatttgaaggcaagcaaactgattacatgactctgtctt

SEQ ID NO: 72805 - DNA, 1574 bp, Zea Mays
aacgatttgctcggttcgtcgacgacaacctccatcttcacattccgtcctctctccctctccctctccctcttcctcctcactccccacccccctactccctctctcgtcatccgccacacgccgccaccgtctccgggcaggcaggaagcaaagcggtaagatgatgatgacgcgggccccgatgggaccgatggagggcgcggcggtggacgaggtggtgcgccgtctcgtggagggcggccgcggcggccgccaggtgcagctgtcagaggcggagatccggcagctctgcgtagacggaaagcgggtgctcctttcccagcccaacctcctccgaattcacgcccccgtcaagatctgcggtgatatccatggccagtttgttgatcttctgaggttgttcgatttgggtggttatcctccagcttcaacttatgtattccttggagactatgtcgatagaggcaaacagagcttggagactatatgcctgctgctggcatacaaaatcaggtatcccgaaaaaattttcctgttgagggggaaccatgaggatgcgaagatcaacagagtctatggtttctatgacgaatgtaagaggaggttcaatgttcggctgtggaagatattctcagattgcttcaactgcctgcctattgcagcgctcattgatgacaagatactgtgcatgcatggtggtctctcaccagaatggactagtttggatcagataaaggatattgagaggcctgctgagattcctgattatggtctcttgtgtgatctgctttggtctgatcctagtcctgatggagaagggtggggggagagtgacagaggtgtttcgtgtacgtttggtgcagataagctcgtagagtttttggagaagaacgatctcgaccttatatgccgagctcatcagttgaagatggttatgagttttttgcacaacgaagattagtgacaatcttttcagctccaaattactgtggagagttcgataacgccggtgctctgttgagcatagatgagagcctaatgtgttcatttcagattctgaagccaactgatatgggtccaccacatgcaagaaaacaaattccaaataagccagcaagagggtgaagccttcgaccagcatccaatactttcagcatcatgatcgtcagtcagctcaaagggggtgatctgttgtttggatagttggatccaccaggacatggcattagactcagcgtcttggttggcggcttggctgtaaaggatattctgtacagcattaggttggattcagcgcaccatctgttctattgttcttcctgccggcacagtacctcattggcagcttgacatccagtagatgttagtagtctctatttgttttttcttagctgtgtcatgcattgttttttgagcgtaacttgatgtatggtgatttttgtaatctttgtaatatgtaaatgctgcaggaaataggtctgcacaaattctgtccatcagcagtaccattcttttctttttttgacttccagttcttttgtggatctgaaagatgtgtgaagctgttatct

SEQ ID NO: 72806 - DNA, 1443 bp, Zea Mays
aacgatttgctcggttcgtcgacgacaacctccatcttcacattccgtcctctctccctctccctctccctcttcctcctcactccccacccccctactccctctctcgtcatccgccacacgccgccaccgtctccgggcaggcaggaagcaaagcggtaagatgatgatgacgcgggccccgatgggaccgatggagggcgcggcggtggacgaggtggtgcgccgtctcgtggagggcggccgcggcggccgccaggtgcagctgtcagaggcggagatccggcagctctgcgtagacggaaagcgggtgctcctttcccagcccaacctcctccgaattcacgcccccgtcaagatctgcggtgatatccatggccagtttgttgatcttctgaggttgttcgatttgggtggttatcctccagcttcaacttatgtattccttggagactatgtcgatagaggcaaacagagcttggagactatatgcctgctgctggcatacaaaatcaggtatcccgaaaaaattttcctgttgagggggaaccatgaggatgcgaagatcaacagagtctatggtttctatgacgaatgtaagaggaggttcaatgttcggctgtggaagatattctcagattgcttcaactgcctgcctattgcagcgctcattgatgacaagatactgtgcatgcatggtggtctctcaccagaatggactagtttggatcagataaaggatattgagaggcctgctgagattcctgattatggtctcttgtgtgatctgctttggtctgatcctagtcctgatggagaagggtggggggagagtgacagaggtgtttcgtgtacgtttggtgcagataagctcgtagagtttttggagaagaacgatctcgaccttatatgccgagctcatcagattctgaagccaactgatatgggtccaccacatgcaagaaaacaaattccaaataagccagcaagagggtgaagccttcgaccagcatccaatactttcagcatcatgatcgtcagtcagctcaaagggggtgatctgttgtttggatagttggatccaccaggacatggcattagactcagcgtcttggttggcggcttggctgtaaaggatattctgtacagcattaggttggattcagcgcaccatctgttctattgttcttcctgccggcacagtacctcattggcagcttgacatccagtagatgttagtagtctctatttgttttttcttagctgtgtcatgcattgttttttgagcgtaacttgatgtatggtgatttttgtaatctttgtaatatgtaaatgctgcaggaaataggtctgcacaaattctgtccatcagcagtaccattcttttctttttttgacttccagttcttttgtggatctgaaagatgtgtgaagctgttatct

SEQ ID NO: 72807 - DNA, 1250 bp, Zea Mays
ggccagtccgcctgctcgcttgctccagcactatctggtgatatccatggccagtttgttgatcttctgaggttgttcgatttgggtggttatcctccagcttcaacttatgtattccttggagactatgtcgatagaggcaaacagagcttggagactatatgcctgctgctggcatacaaaatcaggtatcccgaaaaaattttcctgttgagggggaaccatgaggatgcgaagatcaacagagtctatggtttctatgacgaatgtaagaggaggttcaatgttcggctgtggaagatattctcagattgcttcaactgcctgcctattgcagcgctcattgatgacaagatactgtgcatgcatggtggtctctcaccagaatggactagtttggatcagataaaggatattgagaggcctgctgagattcctgattatggtctcttgtgtgatctgctttggtctgatcctagtcctgatggagaagggtggggggagagtgacagaggtgtttcgtgtacgtttggtgcagataagctcgtagagtttttggagaagaacgatctcgaccttatatgccgagctcatcaggtagttgaagatggttatgagttttttgcacaacgaagattagtgacaatcttttcagctccaaattactgtggagagttcgataacgccggtgctctgttgagcatagatgagagcctaatgtgttcatttcagattctgaagccaactgatatgggtccaccacatgcaagaaaacaaattccaaataagccagcaagagggtgaagccttcgaccagcatccaatactttcagcatcatgatcgtcagtcagctcaaagggggtgatctgttgtttggatagttggatccaccaggacatggcattagactcagcgtcttggttggcggcttggctgtaaaggatattctgtacagcattaggttggattcagcgcaccatctgttctattgttcttcctgccggcacagtacctcattggcagcttgacatccagtagatgttagtagtctctatttgttttttcttagctgtgtcatgcattgttttttgagcgtaacttgatgtatggtgatttttgtaatctttgtaatatgtaaatgctgcaggaaataggtctgcacaaattctgtccatcagcagtaccattcttttctttttttgacttccagttcttttgtggatctgaaagatgtgtgaagctgttatct

SEQ ID NO: 72808 - DNA, 779 bp, Zea Mays
gccactgaagtcgaatcccctcacactataaagctcctccattgcgccgccgccactctcctttcggaggaggcggaccaggtaagcagcagcaggaaccctagcaccgccgcatccgcagccatgggtatcgacctcgttgccggtgggaggaacaagaagaccaagcgaccgtttcttggtcaggaggaccaagagcaacttcaatgctgtcattctcaagaggctcttcatgagcaaaaccaatcgcccaccaatctccatgcgccgccttgtcaagttcatggaaggaaaggagatgacaagaggatccaagaggttccagcaatgaaggttactgccctgaggttcaccaagccatatgtgcgctccaagggaaggaagttcgagaaggctcgtggcaggaggaacagccgtgggttcaaggtttaagaaagttgtgggccatcagcatagtaatcacttcctaccgagtagtagcacattttgttgccttggcttggattttgaaagatatttaaggattttcgtgccttgtctactggttactggttgagcaagaagacaatgttcttttgcacctctttttattggtcggcatattttgcgctgtgattggaactgtgttgtgttatctgctggatgtacttactgcatcacctagaaaggtggcttgggccatttggaatcataaaacgaaagttgctcgcttcaagctagaatacacgattcctcgaacccttgttttgagttacaaagtgaaaccacttttgttttga

SEQ ID NO: 72809 - DNA, 980 bp, Zea Mays
ctgaagtcgaatcccctcacactataaagctcctccattgcgccgccgccactctcctttcggaggaggcggaccaggtaagcagcagcaggaaccctagcaccgccgcatccgcagccatgggtatcgacctcgttgccggtgggaggaacaagaagaccaagcgaccgtttcttggtcaggaggaccaagagcaacttcaatgctgtcattctcaagaggctcttcatgagcaaaaccaatcgcccaccaatctccatgcgccgccttgtcaagttcatggaaggaaaggagaagaacattgctgtgattgttggcacagtcacagatgacaagaggatccaagaggttccagcaatgaaggttactgccctgaggttcaccgagacggcaagggccaggattgtcaatgctggtggggagtgcctcacatttgaccagcttgctctccgtgctccacttggcgagaacacagtcctcttgaggggccccaagaatgcccgtgaggcggtgaggcacttcggcaaggctcctggagtgccgcacagccacaccaagccatatgtgcgctccaagggaaggaagttcgagaaggctcgtggcaggaggaacagccgtgggttcaaggtttaagaaagttgtgggccatcagcatagtaatcacttcctaccgagtagtagcacattttgttgccttggcttggattttgaaagatatttaaggattttcgtgccttgtctactggttactggttgagcaagaagacaatgttcttttgcacctctttttattggtcggcatattttgcgctgtgattggaactgtgttgtgttatctgctggatgtacttactgcatcacctagaaaggtggcttgggccatttggaatcataaaacgaaagttgctcgcttcaagctagaatacacgattcctcgaacccttgttttgagttacaaagtgaaaccacttttgttttga

SEQ ID NO: 72810 - DNA, 947 bp, Zea Mays
gaaggagaacagaagcaggagagcacaacgttacaaggacgcatcgaggagactacctacggccatggcgaggagaaggcttctcgcgctcgcctcccggctctacgggaggcctcaggcgacgcagccgtggcggcgacccccgccccggtttctctcctcagctgcgtccggcaccctcgatcacctgaagtcgccgcctttcgcgcgtccggctgcccggaaccccgcctcctatccatgggatcgattcggaggagggcagaagaggaccatgttcatccagacacagtcgaccccgaacccgcagtcactcatgttctatcctggaaagccagttatggagattgggagctctgatttccctaatgctcggactgcgatgacatcccctttggctaagtcgctttttgctattgatggagtaaccagggtattctttggatctgattttgtaactgttacaaaatcagaagaaacttcctgggattgcctcaaacctgaggtttttgctgcaataatggacttctactcatctgggcaaccactttttctggactcaaatgctgcagcttctatggacacagcaattcacgaggaattgcttaaatgcttcttgaatgtgttgattcaatcctgtatgtgcactggttggtagaaataaaaggattgcgatgttcatcaactcagatgaagatgtgacctattatgatgagatatagagcgacattatggactttttgcactactttgcctcagaatctaattctagcaatctataatggagctgtgctgctacctaccacaaaaaaatgattgagcccctgaatcctcttattctaccaagagtccatgatgttacctatcactgacaacatacatttcaaaatcagttttatgttatgttggcctctattttccttgtggagttgtgatactgaatcttc

SEQ ID NO: 72811 - DNA, 2733 bp, Zea Mays
gaaacatctagcatgcacgatacagataaaacggagcaaaaatgcaccgaattatttctttgatatcgtcatggccatacaactttttaatctgatcccaccaagttaggaaccataaatgtcacagaattaaccctggtatactgctgttctagataagcatgcaacaacttccagacaacggtggcaaatacaacagacaagacaagacgaaccacaaacctgtgtacatgttacacaatagaccaatgaagaagactcaagaaaccagaatgggactcccaaaaacccatttgacattgtcttataagttgcgccaatactcatgcaacatgttatacagcacaggaaccgctttgacaaaaaacgacacgttccctatctttcaaggttctttctaccaacaggtaaaacaatataattcatttatgctgtataggaggcaaaacccaactcccgacaacacccgcgactccatgcctgatgcctcccaccagaggtggtgctggtgggagcaagagcccaaatgatccaaccggctgaccttcaagactgaccaccgaccaagctgcaccactggtaatgcagcccaaggactgaccctgctgactgggactgacatgacaactccctgagaccagaccaatgggactcaaccatgacttggttgacgccgctaccccacacctctgactagcccagagcactagccaaggcataatggcacagcggccattccaaatgggcatctgcatccaaagttgaatccacctgatggaacagagggctggttcccaaagttgaagccattctggggattgtcgcctgagggcatggcatcatcttcctcctccagccagtaggattccagcatcttcacagccttctcatatatctcggtgttgtcatggctctgcaggttctcaatcttgtccaggccctcagcatcatcaatcatctgtgcatagacattgacatcacctgcaccaaggtttttctctgcctcgccaaccttcaggatgttctcgagaccctccaagcaaactgttacgattctgggatccgggcaaacaagcagatcacagagtggcttaatgcaaccctgggcaacaaggtacctacatttcatacagcagacaatgttatcaaatatacttataaatgaagcatactaataacacaagctaaaatgaatttaaaactagatatttgcatacttgatctgatcatgtgtgccaccagaagtggcatttgaaattgcccaggctgcttctttcttgatgtcaaattcagcagtttgcaggagttgcaccagaggtgcaattatatttgcattgatcacagcctgcaaccataatttgggaagaaaccaaacagaacggagcagttgaataagagaccaaccaggtgatatcattgaagttgctgggactgggagaaaatgtgagtttattgagataatttcaagtcatacatcaactcttcttcaaatgaaatagcatatgataattttcaagtcatacatcaactatgtaaaagacttgaaatatcaacagaattttaagcacacaaacctgaatctgctccttgttaccagctgtgatgtttgagatcgtccagcatgcttctttcttgatgcttttcttgtggttggtagtcagaagattcaaaaggcatggaagtgcttgattgtcaatgacacactgcaggaaggagaaataataatgatgaacacagaaacatttagactcagtggaataaagaatgtcaacatgataacagtgtggaaagataattctgaaaattcatctcaatgatgaaattggcaaggaattcttgtcatcaaagctgacgatcaatactaccaattatacgaaccatcttaagttagcttaaccagtcatcatcaggacctacatccaacaggacctgctaaacaatactgcaaaagtgcaattgtacttataaactaggatgtgaactgtaacagaacaatttcaaaggagctagaaccttagatttaacaaaacagccaattgattcagcatcaatttcgtattgacaacttttttaaaagtagatgcatctgtacaggagatcaaatcaggtaacttagcctggcataatcaagaagtgaataggccgatgcaatgaaagggcagaagtatagatacaaggtgggagggagacttacatatgatatgaatgaaaataatatagtacatgtttatttcttgccaaaccaaaaagttaatgattcccagtgtgtgtgcttatttctgctccatgataatattgatttgactgctaggtaaggtatctagtctagcaaataaaaattgtttaattaaacttgtagccacaatgaaacaaactagtgtctgccacctgcatgaacccatattagcaccatgactaatcatgtctggaacatatacaatgatacccccacgacagaagcttctaaatctagcctagaccatttttgcagctacattactcacggaatcaagaacatcaatacaagggtagtctgatttaagccagtgtgatgactgatgacaacccggattcacttagcaacaaaataatatacatcaatgtacaaaaaataaaaacattaaaaagaaggtccaacttgccaattgagtttacctgagtctgcatgtcatccccagttacaatgttacccaccgtgcgaagagctggaatgagtacagaggccgaaggatg

SEQ ID NO: 72812 - DNA, 665 bp, Zea Mays
tccacaattgcccgtattgtttaacactatcccgcacggtgcgagaacatccaaaaatggacgccaccgtcgtcgccatcgccgacgaccatgatgactccgactgccgccgccccctgctcgcccagaacgaagagatccacctctacacagagccccctaaccgtcaacatcctccactggatgctgcggcgacgcagctcgaggagcagcggaagccggagagagtggcctctctggacgtgttccgcggcttcaccgttgccatgatgatactcgtggacgacgccggcggggcgtggccgggcatcaaccacgcgccgtggttcggggttacggtggcggacttcgtcatgcctgccttcctcttcatcatcggcgtctccgccgcactcgtattcaagaaaatggcaaacaagacagctgcaactaagaaggctgcaattcgggcttcaaaacttttcatattgggtgtgattttgcaagggggatacattcatggacgacacaaattaacttatggtgttgatttggatcatattcgatggctaggtgtgttgcagaggatagctattggatactttgtagcagcaatgtcagagatttggcttgtcaacaataatttgaggatagctattggatactttgtagcagcaatgtcagag

SEQ ID NO: 72813 - DNA, 2081 bp, Zea Mays
tccacaattgcccgtattgtttaacactatcccgcacggtgcgagaacatccaaaaatggacgccaccgtcgtcgccatcgccgacgaccatgatgactccgactgccgccgccccctgctcgcccagaacgaagagatccacctctacacagagccccctaaccgtcaacatcctccactggatgctgcggcgacgcagctcgaggagcagcggaagccggagagagtggcctctctggacgtgttccgcggcttcaccgttgccatgatgatactcgtggacgacgccggcggggcgtggccgggcatcaaccacgcgccgtggttcggggttacggtggcggacttcgtcatgcctgccttcctcttcatcatcggcgtctccgccgcactcgtattcaagaaaatggcaaacaagacagctgcaactaagaaggctgcaattcgggcttcaaaacttttcatattgggtgtgattttgcaagggggatacattcatggacgacacaaattaacttatggtgttgatttggatcatattcgatggctaggtgtgttgcagaggatagctattggatactttgtagcagcaatgtcagagatttggcttgtcaacaataatttggtggattcacctgtaccatttgtgaagaaatacttcatagagtggttcatggccatagctattacagtactttatgttgccttggtatttggcctttatgttgcaaactgggaatttgaaattcaaactagcaattcaaccctttctatcccaagcaattcaattgaaacaaagatgatccaatgtggagtcagaggtagtcttggaccaccttgcaatgcagttggcttggtagatcgagttttgcttggtgaaaatcacctatataagaacccagtctacaaaaggacaaaggaatgcagtattaattctcctgattatggaccacttcctccgaatgcaccagattggtgtctggctccatttgatcctgagggtttattaagaatcattcacagcgaatgctaatatggctgctagcttctgtggtgctgacaatctctgcgtatttagtgctattattaggcatgccttttagcaagcctttgtatacagtgaactacatgctactcactggaggagtatctgggttcttgttgctgctgttgtactacatagttgatgttattcatattaagaagcccttcgtactattccaatggatgggcatgaacgcacttatagtctatgttctcgctgcttgtgagctattccccacccttattcaagggttttattggcggtcacctgagaacaacctggtggatgttactgaatccctgctccaggccatcttccagtcgaaacgatggggcaccttggtgttcgtcctcctagagatagtcttttggtgcttggccgccggcttcctgcacatgaaaggcgtttacttgaaactgtagaaccaaatcgtggacagttctctgatggaacggaattgacgtcctgcaaacattggtggaaggcccggtatccctgttttttctgtaaatgcaacgcgattctggaaccatgggtgtagcggttgattacaggacgttgtggtcccaaggtcctccaactcatccgcctccatgcacaccaggaaaacatcttgctgaaagtcacaagcgtttcaccacgtgaagacccagtctgatggtctttcagttgtttggtaaaactgtttctgttttcctgcagaaatcatttctagtttctagtgattttggaaaccaggatgtttctgtttatcacttgtaatcttgggtaaatctcaaaaacgtagtgtattttgctaatgattccacgatgaagtgagtgagtggacatgtacacagtagacagtatgaaagtatgtatgaaccgtcgatcaccgtataatccatctactccaactcattgcagtgaaatgctgtgttgtacctccaagttctggcctctcaggcatgtacatatcaatggaaaatgctgtaccgtttaatttcatggcatgagtatggccattgaattgaaatgccagaactcttaacaaca

SEQ ID NO: 72814 - DNA, 2396 bp, Zea Mays
attgcaagtagagtacatatttttttatttaatatttgcttgctttgattatattgtcatcagtcaaaggttgacattgtgaggaaaatggatcccgacccgtttgactaagtgattttggtgtttaatgatcaacataatctcgatccatttgactaagtgcattttacgaacaagaaatacatctcctcttagtaaaaaaaacacaacacacaaaaaaaagagaaaatacatagtgcttcatctgcgggggcgcgtgcaggaaacacgcattgatttctaggcctcgaggggcttgcagacgatggtggcatgcttggcgatctggttgctgaactggccgggcttctccgtggtgtcgatcttgtccagccccggcggcggcagcagctggaagttctgcaccagccggcccagggtgatgccgatgataggcagcgcgaggatgatcccagggcagctccggcggccgaccccaaagggcacgaatcggaagtcgttgccgtgggcctccacggacttctcctcctccaggaagcgctcgggccggaactcgtcggggcgcacccacctcttggggtcgttggcgaggaaccaggcattgacgaggatcttggactcggcggggatgtcgaagccggcgagcttgccgtcgttgaggttcatgtgggggaccagcagcgggatggccatgcgcaggcggagcgtctccttgacgatggcctgaaggtaggggaggcgctcgaggtccggctccgtcacaggcacgccggcgcccagcaccgaggcgagctcctcccggagcttgtgctggatggccgggtggttcaccagctcggcgatgccccactcgatcgaccacagcgtcgtctcgatcgctgcaaaagcaaacaaattagttttttttttttgccaccgactgcctgcaggtgtggcagcttggatatacaaatcaaaacgcaattctttttgaggcgtggtcacgtggtggcggcttcaactaccttttgatacacagatagatactatgcctagcagataaatacgggagcccacttgaagtgtgacaccgcattaggctcagtatgttgccggttaattaaggacggaattaagttggctgacggagacttgattaagacgtgccttatattattatatcttccgatattgcagtgctatttgtttgtgtagtagcgctggactgcagtagttgaatgataagtctcacttggttcttcagacatagcatactctgtttccgtttcattgcactgagcagtgacgattatcgatacctgcgacgttgatgttctcgacgatgtagaggacgttgtcgtggttgatctcgcccttcctctcggcctcgaggatgtgatccatggcgcaccggatctcaccagtctgagccatcaccttcctgtgagtacgcaacgcatccatgttagttttgtcttcccaacccaatgaattgaaaccaagtcaacaaccgaatgaattttgtaaagtatatgttgcatgccccctcgtggtcgtgcggtgggcacgcacgcacgaatggttggttcatggaaccaccgcactctctgcctagtaggtgacaaataaactagtcttctactacattattggcatgcgtgtcatgctgatgtccttccagctatcatgaagcagcagagcgtggtatatctccgtcgctctcggtgtgtcgttgccccgaccttaagctttcggccttgcgcggaaagcaaagcaacgcaaatcaagcgagtccctttttctttttccttcgtgggctgatcatctgtcaccggaagccacgagatgagtagtgccgctcacctatccttctttgatctgttaacctgttgtggacaactacaagttgttgtttaggagtagtaggtactagtactccctaacccgtgcggtgggtcttttagttacgtgtcaaacatgactggagccagccatgcatcacaaaagtcgtccgatctcgccaaaattcaatgactagcaaaataaaataaaatatggacttggctgttgattcgtccttgtccactggcagatggcattgatttgtccaccggtagatggcatcggttgcagcatgtgcgcagccaccaccacagaggcacagatgcaatgcatgcaactgtcttccgcccagctccagcctccagctcatacctcacccgccgacgatgcaacttgcaactccacccgccgtcaaccaaccaccagcccaggtggccagctcaaaagaaaaaggaaaggaaagaaaatggaatatggcagacttacttgcgctcctgtacgaagttgtcctcgaagaccttcatgcggcgcgtcttgaggtcgtggcagcggttgaggtagccgcggaggaaggg

SEQ ID NO: 72815 - DNA, 2364 bp, Zea Mays
gtaaattcttataatagcttacagggaaaagactcttcaatctgaagcaaaatgtaccgggaatgttgaagagcgggactcttaagcagtagtgagatgcggcggtggtggtcgccggcgttggcggctgtggagccgcggtccgtgcagctcctgctcctgggcgtcgctctcgtcgcagcttctttctacgccggcaccctcttcggctcctccgcgtcccctgcgctcgtactgcccccttcgcgcccccgatcgcccgattccttcagggccaaagatgttccagtgtttaccaacagagtttctcgtacgtaccgggcaaaatcagtgacagttccagatcacggagttgatgtgtgtcctttggaatacaatgagtatgtcccctgccatgatggagcctatataagcagcttgaagagcctggatacatctaggcatgtggatcttgaaagtatttgtcctccatgggagaagcggttgttttgtttggtgccccctccaaatgactacaagataccaataagatggccaacaagccgagactacgtatggcgtagtaatgtcaaccattcacatcttgctgaggtcaaaggaggacagaactgggtgcatgagaagggcaaactttggtggtttcctggaggtggcactcacttcaaacatggtgcatcagaatacatagagaggctaggaaatatgatgacaaatagtactggtgatcttcgttctgccggagtagttcaagttttggatgttggatgtggtgttgctagcttttctgcatatcttcttccgctagacattcgaaccatgtcatttgctccaaaagatggccatgagaatcaaatccagtttgctttagaacgtgggattggtgcaatgatctctgtgttggccacaaaacaattaccttatcctgaaaattcatttgaaatggttcactgttcaagatgtcgtgttgattggcatgaaaatgatggaatattactcaaagaggtagaccgtcttttgcgacctaatgggtattttgtatactctgctccaccagcttatagaaaagataaggactttcctgttatttgggagaagctagttaatattacaacaacaatgtgttggaagcttattgctaagcatgttcaaacagctatttgggttaaacctgaagatgagtcctgcagacagaaaaatgttgatatgaatctactgagtatttgtgaatccaatgacaacatttcaccatcatggaaaattccgttaatgaattgtgtgaagctcaacaaggacaaatccaatattcagaaattgccttccagatctgatcgcctatcattttattccaagagtttggagataataggagttgcaccagagaggtttgagaagaataaccagttctggaagaaccaggttcacaagtattggtcatttcttcatgttgaaaagactagcattcgaaacgtcatggacatgaatgctaattatggtggatttgctgcagcactaagcagtgaccctgtctggattatgaatatagtaccctataccatgatgaacacattgcctgttatctatgaccgtgggttactcggttcttaccatgactggtgtgagccattctcaacatatcctagatcctatgacttgttgcatgctttccacctcttttctcattataaacgccgcaaggaagattgtttgttggaggatatcatgttagaaatggatcgcatcattcgaccacagggttttatcattattagagacgagaatgacactctctcaagaatcatcaatctagcaccgaagttcctttgggatgttaccacgcacatgttggaaaatgaggaaagcgggacagatcaagttctgttttgcaggaagaaattctgggctattgtttgagttatacttgggtggaaattgggaagctgccatattttatcctacttttggttgccctttgtatcagtgacagagcagagcgtaaggagagctgtttggcatgatagatgttccaatgaaacataatatttcattgcacgttctctgcagttgacagtagtgcattgttgagaaggcatatggtacggtggtgcggttgacagggttatccagaaactagctcggataatttttgcttttgagctgtactatttgtctacgaaggacatgggtgagccggtttaggttctcaagttctcaacaacatgttggtagtgctgtttctgttgttccatctggggagcatctgtagtactataaaccttatgtaaggtactgtttccagccaatgccgaggtgcatttgttacattatttgttttttgttttgcttatacgttactctctttgttct

SEQ ID NO: 72816 - DNA, 2370 bp, Zea Mays
gtaaattcttataatagcttacagggaaaagactcttcaatctgaagcaaaatgtaccgggaatgttgaagagcgggactcttaagcagtagtgagatgcggcggtggtggtcgccggcgttggcggctgtggagccgcggtccgtgcagctcctgctcctgggcgtcgctctcgtcgcagcttctttctacgccggcaccctcttcggctcctccgcgtcccctgcgctcgtactgcccccttcgcgcccccgatcgcccgattccttcagggccaaagttacagatgttccagtgtttaccaacagagtttctcgtacgtaccgggcaaaatcagtgacagttccagatcacggagttgatgtgtgtcctttggaatacaatgagtatgtcccctgccatgatggagcctatataagcagcttgaagagcctggatacatctaggcatgtggatcttgaaagtatttgtcctccatgggagaagcggttgttttgtttggtgccccctccaaatgactacaagataccaataagatggccaacaagccgagactacgtatggcgtagtaatgtcaaccattcacatcttgctgaggtcaaaggaggacagaactgggtgcatgagaagggcaaactttggtggtttcctggaggtggcactcacttcaaacatggtgcatcagaatacatagagaggctaggaaatatgatgacaaatagtactggtgatcttcgttctgccggagtagttcaagttttggatgttggatgtggtgttgctagcttttctgcatatcttcttccgctagacattcgaaccatgtcatttgctccaaaagatggccatgagaatcaaatccagtttgctttagaacgtgggattggtgcaatgatctctgtgttggccacaaaacaattaccttatcctgaaaattcatttgaaatggttcactgttcaagatgtcgtgttgattggcatgaaaatgatggaatattactcaaagaggtagaccgtcttttgcgacctaatgggtattttgtatactctgctccaccagcttatagaaaagataaggactttcctgttatttgggagaagctagttaatattacaacaacaatgtgttggaagcttattgctaagcatgttcaaacagctatttgggttaaacctgaagatgagtcctgcagacagaaaaatgttgatatgaatctactgagtatttgtgaatccaatgacaacatttcaccatcatggaaaattccgttaatgaattgtgtgaagctcaacaaggacaaatccaatattcagaaattgccttccagatctgatcgcctatcattttattccaagagtttggagataataggagttgcaccagagaggtttgagaagaataaccagttctggaagaaccaggttcacaagtattggtcatttcttcatgttgaaaagactagcattcgaaacgtcatggacatgaatgctaattatggtggatttgctgcagcactaagcagtgaccctgtctggattatgaatatagtaccctataccatgatgaacacattgcctgttatctatgaccgtgggttactcggttcttaccatgactggtgtgagccattctcaacatatcctagatcctatgacttgttgcatgctttccacctcttttctcattataaacgccgcaaggaagattgtttgttggaggatatcatgttagaaatggatcgcatcattcgaccacagggttttatcattattagagacgagaatgacactctctcaagaatcatcaatctagcaccgaagttcctttgggatgttaccacgcacatgttggaaaatgaggaaagcgggacagatcaagttctgttttgcaggaagaaattctgggctattgtttgagttatacttgggtggaaattgggaagctgccatattttatcctacttttggttgccctttgtatcagtgacagagcagagcgtaaggagagctgtttggcatgatagatgttccaatgaaacataatatttcattgcacgttctctgcagttgacagtagtgcattgttgagaaggcatatggtacggtggtgcggttgacagggttatccagaaactagctcggataatttttgcttttgagctgtactatttgtctacgaaggacatgggtgagccggtttaggttctcaagttctcaacaacatgttggtagtgctgtttctgttgttccatctggggagcatctgtagtactataaaccttatgtaaggtactgtttccagccaatgccgaggtgcatttgttacattatttgttttttgttttgcttatacgttactctctttgttct

SEQ ID NO: 72817 - DNA, 1298 bp, Zea Mays
agtattgaagcacacattgacgacgtcgtccgtggcgcccatgacgccgtagtgacacagcatgtcgcagaggcgcgtgccgcactgcatggacgtggagatggcactgaggccagttcaagcccactttctggcacaccctgttatgctccttgtgttggttggccacgcataccagcgtcacggggagttccaaggcctcgaactccgtcaccagctgctccatggtcagcttggcggggcgtctcacgagagtcacgagccccaccaccacgtatgtcggttaagtatgtcgtcgtgcgccatcagccacgacaccaaaggctctaagttgaaggggtgcttgcccgtgagccggacaagcgccgggtggcgccgcacccacgcgtcagatgtggcctcgccacgcgagtcgcagacgactggctccacctcgaggcacaggaggtacgatgatcgccagtccggcgggaatgttgtatttttccatggaatcaaaatcggggcgggtgcgacgcttgcctcctgggccaccggagcagaacatgttgaagctcttgggaggcacaatggtcgaccacgggtgggggggcaggtgccgctcaacagaggtcgccattatcggcacgagctacgagaacgatttttaattgtgatgtccagagctcgaggttaatcggaagctcgaggaatataatcatgcatgccctcagaaagaaaacatagaataaaaaaggaaacacaataaattaggcaagggaaacagtcagtcacgattttctgatacaatcaggcgatatattaatagatattacacgacattatatatgaagcaagtattaacacaacattatatcaataggtcgggaaagtatattacacggcaattataagggaaacacaataaatcaggcaagtatattacacgatattgcatagaatacaatcaggagcaaattcagatactatgctgatccaaactgctgtattcggtagattatgtttgcaaatctacgattctagggacaactcacgtaaacaaaacttaagatttcaaaaaagaagccaggttaggtaagactaccgcaagactgttactgcaagcaagctggcataaagctgcattcgagatcacgtttttattcatcttggtcagcgcgccttcatgctgatttttgtatttgccaaaaaagtgttgggctgtaatatagttgaaaaagaatccccaagtgtctctaatgattcctgcgaaaagtcctctcggcaattctttgctataagtgcttccagaatcttct

SEQ ID NO: 72818 - DNA, 1008 bp, Zea Mays
caaacctcaggaaacaaatcaccgtgtccacgtgtgttaatcttcactagttgatttgtttcttccctctctaaagttctcttgctcacattgttttgagtttgctcccaaagttatccgcattgattgagcaactcatagcaagaagaactatcttccactcctgtaacgcaccggtctaaacaaccgaagctaaacatgtatttaagcaccagaaaacaatctctagtgaaatacattacacaagtggtgccatagtcatacataactttatttagtacattcggttacaataataacaccaactagaagaactatagtcgataaacacgagggtagtatcttcttcccacatggtggcttctatagcatcggcaccacgccaaacttgggtatagggcacaaagtactcaaaattcctcgggcacgaaatcaggatcctctataaaaataatgggtgagcacaaaggtactcagcaagtcccacctcgcctttacacggagggagttacagattagtatgcaatgatcaataaacatgattaacaagtgcaatactagaactatatccatgctcgttatccatctcataagtcaggtagctcaactagttgaagtgtccacaccataacctgtcctataccaaggacacggaccattcgaatggattatacactctgcagaggttgtacgttgtacccacacgcacatcaccgtcccaagatggctctatcaatagctgacacccaaacatggctcaacctcgcctagccacccacaaaccctgggtcctaaccactcaggtctccaacccaaaacatatccacctcagacgactaccaggccagctagtgggattaggctaaggctttcccatacaagctcatgtggtcatacaggaaataagttaggtgagatggcaccacaacacacagtccttatggttcaccagagcagccaccaaccaaaactagcaaacccgagatgtcaccacggcacctcggtcgc

SEQ ID NO: 72819 - DNA, 1688 bp, Zea Mays
tggctccgtttatgggccctgggccgccattcgggagtcaattatttggctggtccggcctacgccgaagcccttatataaagtctcgaaccctagaggccagcaccttcctccccaactcgccgtcgtcttctgcggttctgccgtctacgcctccaatttggcctctctcccttgcaagtttaagcttcaccttcaaccatgggtaaggagaagtcccacatcaacattgtggtcattggccacgtcgactctggcaagtcgaccaccaccggccacctgatctacaagcttggaggcattgacaagcgtgtaatagagaggtttgagaaggaggctgctgagatgaacaagcggtccttcaagtatgcttgggtgctcgacaagctcaaggctgagcgtgagaggggtatcaccattgatattgctctgtggaagtttgagaccaccaagtattactgcaccgtcattgatgcccctggacaccgtgacttcatcaagaacatgatcactggtacctcccaggctgactgtgctgtccttatcattgactccaccactggtggttttgaggctggtatctccaaggatggccagacccgtgagcatgctctccttgcgttcactcttggagtgaagcagatgatttgctgctgcaacaagatggatgcaacgactcccaaatactccaaggcgcgttatgatgagattgtgaaggaagtctcatcctacctcaagaaagttgggtacaaccctgataagattgcctttgtccccatctctggttttgagggcgacaacatgattgagaggtccaccaaccttgactggtacaaaggcccgaccctgcttgaggctcttgaccagatcaccgagcccaagagaccttcggacaagcccctgcgtctccccctgcaggatgtgtacaagattggtggtattggaactgtaccggttggtcgtgtggagactggtgtcatcaagcctggtatggttgtcaccttcggtccaactggcctgactactgaggtgaagtctgttgagatgcaccacgaggctcttcaggaggcccttcctggtgacaatgttggcttcaacgtgaagaacgttgctgtgaaggatctcaagcgtggttttgtggcctcaaactccaaggatgaccctgccaaggaggctgccagcttcacgtcccaggtcatcatcatgaaccaccctggccagatcggcgttctggcaaggagcttgagaaagagcccaagttcttgaagaacggcgatgctggtatggtgaagatgattcccaccaagcccatggtggtggagacattctcgcagtatcctccccttggtaggtttgctgtccgcgacatgaggcagacagttgctgttggagtcatcaagagtgtggagaagaaggacccgaccggcgccaaggttaccaaggcagctgccaaaaagaaatgatgcaacctgtcgttaatcctttttgtatgcggttgttactgttattgtgtactgttaagctctgctgcggcgtgccctgttgtttgggtagcgtcaacgtcgagcgccacttgcgggtgtgcctttgtctgctatcagtagcggcaaaaattgaaagctctcgagacttatgtcccttttgggcgccgttgaactgattattttaaagtctgcccacatttttct

SEQ ID NO: 72820 - DNA, 1534 bp, Zea Mays
gttgtactctactgcctgcccgtgccttttaagcttcaccttcaaccatgggtaaggagaagtcccacatcaacattgtggtcattggccacgtcgactctggcaagtcgaccaccaccggccacctgatctacaagcttggaggcattgacaagcgtgtaatagagaggtttgagaaggaggctgctgagatgaacaagcggtccttcaagtatgcttgggtgctcgacaagctcaaggctgagcgtgagaggggtatcaccattgatattgctctgtggaagtttgagaccaccaagtattactgcaccgtcattgatgcccctggacaccgtgacttcatcaagaacatgatcactggtacctcccaggctgactgtgctgtccttatcattgactccaccactggtggttttgaggctggtatctccaaggatggccagacccgtgagcatgctctccttgcgttcactcttggagtgaagcagatgatttgctgctgcaacaagatggatgcaacgactcccaaatactccaaggcgcgttatgatgagattgtgaaggaagtctcatcctacctcaagaaagttgggtacaaccctgataagattgcctttgtccccatctctggttttgagggcgacaacatgattgagaggtccaccaaccttgactggtacaaaggcccgaccctgcttgaggctcttgaccagatcaccgagcccaagagaccttcggacaagcccctgcgtctccccctgcaggatgtgtacaagattggtggtattggaactgtaccggttggtcgtgtggagactggtgtcatcaagcctggtatggttgtcaccttcggtccaactggcctgactactgaggtgaagtctgttgagatgcaccacgaggctcttcaggaggcccttcctggtgacaatgttggcttcaacgtgaagaacgttgctgtgaaggatctcaagcgtggttttgtggcctcaaactccaaggatgaccctgccaaggaggctgccagcttcacgtcccaggtcatcatcatgaaccaccctggccagatcggcgttctggcaaggagcttgagaaagagcccaagttcttgaagaacggcgatgctggtatggtgaagatgattcccaccaagcccatggtggtggagacattctcgcagtatcctccccttggtaggtttgctgtccgcgacatgaggcagacagttgctgttggagtcatcaagagtgtggagaagaaggacccgaccggcgccaaggttaccaaggcagctgccaaaaagaaatgatgcaacctgtcgttaatcctttttgtatgcggttgttactgttattgtgtactgttaagctctgctgcggcgtgccctgttgtttgggtagcgtcaacgtcgagcgccacttgcgggtgtgcctttgtctgctatcagtagcggcaaaaattgaaagctctcgagacttatgtcccttttgggcgccgttgaactgattattttaaagtctgcccacatttttct

SEQ ID NO: 72821 - DNA, 2136 bp, Zea Mays
gtctccccacgctccgacttcatcacgctaataatttaatcaccatttatttactcgctattagtccctctccctccatccctcccgactccgtctccctacccttcccccctccgccgaggcgaccagccccgtcaatccgagactcccacgcaaaccctagccagctagctagccacaccggctgggtccaatggcggaggacggctgcgacagggaccagcagcagcagcagccggcggccgccgcggcgtcaggtggcgccggggtcgaggggcgcagcagggagagcgtcaagctcttcgtggggcaggtgcccaaacagatgtcggaggccgagctggtcgccatgttccgcggcgtcgccctcgtcgacgaggtcacggtcatccgcgacagggccaccagggtctcgcgaggctgctgcttcctgatatgtccatcaagggaggaggctgacaaggctgtgactgcataccacaacaagcgcacactacctggggcctcaagtcccttgcaagtaaaatatgctgatggggagttggaaagattagagcacaagctctttgttggaatgctaccaaaaaatgtaacagatgctgaaatgatagatttattttcaaaatatgggaatatcaaggatttgcagattttgagaggttctcaacaaacgagcaaagctggctgtgcctttctaaaatatgaaacaaaagagcaagctgtggctgctatagaagctctaaatggaacacacaaaatagagggttcaagtgttcccttggttgtcaaatgggctgacactgaaaaggaaaggcaagctcgaaaagcgcaaaaatctccattccagtcttctaacatgttgaatgcaaatgctatgcggcagaattcagtgtttggagctctacagatgggatatgtgccgcagtacaatggatttggctaccagccacaaggaacctacgggcttatgcaatacccacctctatctcctgtgcaaaatcaagctgccttccagaatatggtccagcctattaatcaagcaagctcgacccgtggagctaattctgaacttccccctgatttagttcctagatcatttaattccacacagttgggaagcccctattcgcctctgcctggcttgcagtatcctggagtgtatcctggtggccctattaatcatcgccccttttcaaattctcacagttcaaccaaagttcaaaatttaaatgctaatttaccgtcttcaagtcccagcagcaatcctgccccccagatagagggccctcctggagccaatttgttcatatatcacattccacaagaatttggtgaccatgatcttgcaaatgcatttcatagttttggtagagtactgagtgctaaagtttttgtagacaaggcaactggtgttagtaaatgctttggtttcgtaagctacgattctccagcttctgcacaagcagccattagtgtgatgaatggataccaattaggtggtaaaaagttgaaagttcaactcaagagagacaacagcaagcacagtaaacctttctgacacagcgaattcattgtatgctcacatgatcaggaaaatcggtacatactatgtttcacaattgattattacattgtttcctctggctcttgtatctttgttcaattcacatccttgaaaactgtcacatcgtgtatttttatcgcagcatagttgtagcatttgtaccattagatcttgtacatcagacattaattcattcaattctttatttttaattttcatcatgaatcattttattgtaaataatcttctaggatttacgatatggcatgtttcagtgtttgttgtccttaaccaaatcttacgggtacccagagagtaagaaaagaacaacgctgtttgaggaataataatgttctattgtagcatgctaatttctttttgaccttttcttattactggatgtttactgaccatgttacaaatcttgtttaaaaaggcattgtgtggatggttactgtgtttggtttgtgtcccttctgttcaagccagatttcaccaaagctagcaaaatataatttccgttgttttttttattttcaatctttttaaactatttctaaaaataacatgag

SEQ ID NO: 72822 - DNA, 2180 bp, Zea Mays
cacgctaataatttaatcaccatttatttactcgctattagtccctctccctccatccctcccgactccgtctccctacccttcccccctccgccgaggcgaccagccccgtcaatccgagactcccacgcaaaccctagccagctagctagccacaccggctgggtccaatggcggaggacggctgcgacagggaccagcagcagcagcagccggcggccgccgcggcgtcaggtggcgccggggtcgaggggcgcagcagggagagcgtcaagctcttcgtggggcaggtgcccaaacagatgtcggaggccgagctggtcgccatgttccgcggcgtcgccctcgtcgacgaggtcacggtcatccgcgacagggccaccagggtctcgcgaggctgctgcttcctgatatgtccatcaagggaggaggctgacaaggctgtgactgcataccacaacaagcgcacactacctggggcctcaagtcccttgcaagtaaaatatgctgatggggagttggaaagattagagcacaagctctttgttggaatgctaccaaaaaatgtaacagatgctgaaatgatagatttattttcaaaatatgggaatatcaaggatttgcagattttgagaggttctcaacaaacgagcaaagctggctgtgcctttctaaaatatgaaacaaaagagcaagctgtggctgctatagaagctctaaatggaacacacaaaatagagtttcgaatgaaagatgcttaccgtgattgcaatttgcaaacatcacctatcagccacacattggatgggttcaagtgttcccttggttgtcaaatgggctgacactgaaaaggaaaggcaagctcgaaaagcgcaaaaatctccattccagtcttctaacatgttgaatgcaaatgctatgcggcagaattcagtgtttggagctctacagatgggatatgtgccgcagtacaatggatttggctaccagccacaaggaacctacgggcttatgcaatacccacctctatctcctgtgcaaaatcaagctgccttccagaatatggtccagcctattaatcaagcaagctcgacccgtggagctaattctgaacttccccctgatttagttcctagatcatttaattccacacagttgggaagcccctattcgcctctgcctggcttgcagtatcctggagtgtatcctggtggccctattaatcatcgccccttttcaaattctcacagttcaaccaaagttcaaaatttaaatgctaatttaccgtcttcaagtcccagcagcaatcctgccccccagatagagggccctcctggagccaatttgttcatatatcacattccacaagaatttggtgaccatgatcttgcaaatgcatttcatagttttggtagagtactgagtgctaaagtttttgtagacaaggcaactggtgttagtaaatgctttggtttcgtaagctacgattctccagcttctgcacaagcagccattagtgtgatgaatggataccaattaggtggtaaaaagttgaaagttcaactcaagagagacaacagcaagcacagtaaacctttctgacacagcgaattcattgtatgctcacatgatcaggaaaatcggtacatactatgtttcacaattgattattacattgtttcctctggctcttgtatctttgttcaattcacatccttgaaaactgtcacatcgtgtatttttatcgcagcatagttgtagcatttgtaccattagatcttgtacatcagacattaattcattcaattctttatttttaattttcatcatgaatcattttattgtaaataatcttctaggatttacgatatggcatgtttcagtgtttgttgtccttaaccaaatcttacgggtacccagagagtaagaaaagaacaacgctgtttgaggaataataatgttctattgtagcatgctaatttctttttgaccttttcttattactggatgtttactgaccatgttacaaatcttgtttaaaaaggcattgtgtggatggttactgtgtttggtttgtgtcccttctgttcaagccagatttcaccaaagctagcaaaatataatttccgttgttttttttattttcaatctttttaaactatttctaaaaataacatgag

SEQ ID NO: 72823 - DNA, 2734 bp, Zea Mays
cggaggcgtgctgcctccggccgtccgtctctcgggaggggttccttgcttttgagggctcaactttgtgggtgctaagctagttcggggcaatgccgctgaagttgctgttttcctgttcgtgggtgttcatgcggagccgaaaagctagcggatctcgtcattcgctaggaattggctgttttaccagcgatccctgtgcaatgggtgatatgatgcgttcacttggtgttacctcttgttctctctgtgtgttacagaaatgcatgctgtgatgcgacctccctttggtggaggatagctttgaacatcttatagtttgatatgttttatgttggaagttgttttgtttgctcggaggactgctgggacttgaaccctttgactcttttggtacccaaagctggcgtacgatgttgcaaatttgcaatgttttgtttgcttatcttcagtttccatccttctcttttgatgaatttgcaggattagatccacagtttgctgttttgatggactttaggcttttagctcctgccaatactttggatcttgcttcttatcatctgtttttgatcccgtgatgcaaaattttgtgttgattgcttgagatttagttggacctgggctttgatttgagctggttagtttcagttggcccccgaatataggctgcctgtgttttagtacataccaactgataactgaagatgctcttgtatgatttggctaaaatttagggacaacagaatctcacacatgtttgctgtttttgtctatttaagaacatcattggttcaagaattttattagtatacgaccattcaaaactccattgaccgtgttttagtaagagtttggttctttgcaacactacaggggagtggagcttctttattgtgactggtttgaatttttgtggaggctgctgcttcctgatatgtccatcaagggaggaggctgacaaggctgtgactgcataccacaacaagcgcacactacctggggcctcaagtcccttgcaagtaaaatatgctgatggggagttggaaagattagagcacaagctctttgttggaatgctaccaaaaaatgtaacagatgctgaaatgatagatttattttcaaaatatgggaatatcaaggatttgcagattttgagaggttctcaacaaacgagcaaagctggctgtgcctttctaaaatatgaaacaaaagagcaagctgtggctgctatagaagctctaaatggaacacacaaaatagagtttcgaatgaaagatgcttaccgtgattgcaatttgcaaacatcacctatcagccacacattggatggtacttccagtttacatatcattgtgctgggttcaagtgttcccttggttgtcaaatgggctgacactgaaaaggaaaggcaagctcgaaaagcgcaaaaatctccattccagtcttctaacatgttgaatgcaaatgctatgcggcagaattcagtgtttggagctctacagatgggatatgtgccgcagtacaatggatttggctaccagccacaaggaacctacgggcttatgcaatacccacctctatctcctgtgcaaaatcaagctgccttccagaatatggtccagcctattaatcaagcaagctcgacccgtggagctaattctgaacttccccctgatttagttcctagatcatttaattccacacagttgggaagcccctattcgcctctgcctggcttgcagtatcctggagtgtatcctggtggccctattaatcatcgccccttttcaaattctcacagttcaaccaaagttcaaaatttaaatgctaatttaccgtcttcaagtcccagcagcaatcctgccccccagatagagggccctcctggagccaatttgttcatatatcacattccacaagaatttggtgaccatgatcttgcaaatgcatttcatagttttggtagagtactgagtgctaaagtttttgtagacaaggcaactggtgttagtaaatgctttggtttcgtaagctacgattctccagcttctgcacaagcagccattagtgtgatgaatggataccaattaggtggtaaaaagttgaaagttcaactcaagagagacaacagcaagcacagtaaacctttctgacacagcgaattcattgtatgctcacatgatcaggaaaatcggtacatactatgtttcacaattgattattacattgtttcctctggctcttgtatctttgttcaattcacatccttgaaaactgtcacatcgtgtatttttatcgcagcatagttgtagcatttgtaccattagatcttgtacatcagacattaattcattcaattctttatttttaattttcatcatgaatcattttattgtaaataatcttctaggatttacgatatggcatgtttcagtgtttgttgtccttaaccaaatcttacgggtacccagagagtaagaaaagaacaacgctgtttgaggaataataatgttctattgtagcatgctaatttctttttgaccttttcttattactggatgtttactgaccatgttacaaatcttgtttaaaaaggcattgtgtggatggttactgtgtttggtttgtgtcccttctgttcaagccagatttcaccaaagctagcaaaatataatttccgttgttttttttattttcaatctttttaaactatttctaaaaataacatgag

SEQ ID NO: 72824 - DNA, 2322 bp, Zea Mays
gcaatgttttgtttgcttatcttcagtttccatccttctcttttgatgaatttgcaggattagatccacagtttgctgttttgatggactttaggcttttagctcctgccaatactttggatcttgcttcttatcatctgtttttgatcccgtgatgcaaaattttgtgttgattgcttgagatttagttggacctgggctttgatttgagctggttagtttcagttggcccccgaatataggctgcctgtgttttagtacataccaactgataactgaagatgctcttgtatgatttggctaaaatttagggacaacagaatctcacacatgtttgctgtttttgtctatttaagaacatcattggttcaagaattttattagtatacgaccattcaaaactccattgaccgtgttttagtaagagtttggttctttgcaacactacaggggagtggagcttctttattgtgactggtttgaatttttgtggaggctgctgcttcctgatatgtccatcaagggaggaggctgacaaggctgtgactgcataccacaacaagcgcacactacctggggcctcaagtcccttgcaagtaaaatatgctgatggggagttggaaagattagagcacaagctctttgttggaatgctaccaaaaaatgtaacagatgctgaaatgatagatttattttcaaaatatgggaatatcaaggatttgcagattttgagaggttctcaacaaacgagcaaagctggctgtgcctttctaaaatatgaaacaaaagagcaagctgtggctgctatagaagctctaaatggaacacacaaaatagagtttcgaatgaaagatgcttaccgtgattgcaatttgcaaacatcacctatcagccacacattggatggtacttccagtttacatatcattgtgctgggttcaagtgttcccttggttgtcaaatgggctgacactgaaaaggaaaggcaagctcgaaaagcgcaaaaatctccattccagtcttctaacatgttgaatgcaaatgctatgcggcagaattcagtgtttggagctctacagatgggatatgtgccgcagtacaatggatttggctaccagccacaaggaacctacgggcttatgcaatacccacctctatctcctgtgcaaaatcaagctgccttccagaatatggtccagcctattaatcaagcaagctcgacccgtggagctaattctgaacttccccctgatttagttcctagatcatttaattccacacagttgggaagcccctattcgcctctgcctggcttgcagtatcctggagtgtatcctggtggccctattaatcatcgccccttttcaaattctcacagttcaaccaaagttcaaaatttaaatgctaatttaccgtcttcaagtcccagcagcaatcctgccccccagatagagggtttgttttcttctgccctcctggagccaatttgttcatatatcacattccacaagaatttggtgaccatgatcttgcaaatgcatttcatagttttggtagagtactgagtgctaaagtttttgtagacaaggcaactggtgttagtaaatgctttggtttcgtaagctacgattctccagcttctgcacaagcagccattagtgtgatgaatggataccaattaggtggtaaaaagttgaaagttcaactcaagagagacaacagcaagcacagtaaacctttctgacacagcgaattcattgtatgctcacatgatcaggaaaatcggtacatactatgtttcacaattgattattacattgtttcctctggctcttgtatctttgttcaattcacatccttgaaaactgtcacatcgtgtatttttatcgcagcatagttgtagcatttgtaccattagatcttgtacatcagacattaattcattcaattctttatttttaattttcatcatgaatcattttattgtaaataatcttctaggatttacgatatggcatgtttcagtgtttgttgtccttaaccaaatcttacgggtacccagagagtaagaaaagaacaacgctgtttgaggaataataatgttctattgtagcatgctaatttctttttgaccttttcttattactggatgtttactgaccatgttacaaatcttgtttaaaaaggcattgtgtggatggttactgtgtttggtttgtgtcccttctgttcaagccagatttcaccaaagctagcaaaatataatttccgttgttttttttattttcaatctttttaaactatttctaaaaataacatgag

SEQ ID NO: 72825 - DNA, 5362 bp, Zea Mays
tcgggtcccctcaaatcaatcgatcacacgcgtcccgccccattcggccattcccagccttcgagaggtcgccgccgccggtcgctgctccgccgactcggggatgccaccggcggtagcgcccgcctcgccgcgccaagaccctagcggctccagtctttccgccgcagccgccgcggcttccatggcgaacccggtcctagggcttggcctcgcgccaccgggcgctgagccctccgccggaacgccaccgtcttcacgccgcgcgccgcgcttggccaagcggcgccacgcgcccgcctcctcccgtttccgcgcggcgcaggcctcagtcggaacatggaacccgtttggcggcggcggcggtacggatggacagactcgaggttttgtgtttggtgctgcttccccagtgagccagcagccttcggagccagcagtggagatatcttcatccagtgaggcgcccttcgtgtttcagagtgtgagggagaaccttcctcggtttgaggagggattgtctggttcatcaatgctccctgataagatggggaagctgaacctgcgcacatcaggtgaggttggcgatggtctcggtcaggggagggatcgaaaggatggaagttcagcatttggtgttgatatatctggtttgttttctaacaaggaagataatgggctccaggagaagcttacacagttgaatttaggccacagagaacccttgcaaagtgagaagagggatagtgctaatggtgtgccacaagcatttgtgtttggatgtaatggagctgggagttttgctgattgtaagaacacagttgcctctggtgcacagtcagatgatcctagttcagtttgtggcactgatgcaaaagctatggctgggaagtcgacgcaattcaatataggcagtcaagcaccttcctggggtggagggattgagggtactaatggagcaccagaagctttcacgtttcaaagtaccgcagtaagtggtcatgtggataatataaacaatgttgtctccggtgccaataccagtgccaatacaagttcgtccactgttgctaaaggtgtgggtgatgtagatttgcttccagaaaagttaacacggttgaatataggaagtgacatgcccttgcatgagtcgaaaagtggttatcagcccaaagtgtttagagcagtccaagggacaatttttggaaatgaaacaagcagcacatcagataggagcagtgaattcctctctgcaaatagcaatacttctagttcaagcagtgatttgttctctacagcaaatagcaacacttctaattcagctaatggcacttactgttttcctccagagaagacaccagatttgaatgcaggagagggagtcatgtcggagagcttggaaagtgatagttctaactgtccaccacaaacctttttatttgaaagaaatgaaacccgaagctctgtttcacactctgcaagcatagccatggatgacggtggcaattttgtcaatcacaaaaatactgacacctgtagttcagctcgtggtacatttgattatgcaggtgctctcccagagaagatgacgaaattaaatataggatgcagaaattcataccatagcaggaaagatgaaactgctactgaaccaccagaagtatttgtatttgggtgtaatgtttctagcttttcttctacccatactgcaagtaaatcacatgatcccacgactcctgaattttgttttcaaagtaaagcagaggcaacttcaggatatggggctgttccccaaaccaaagttcaggagtcatacttgtttacgactttgaataattcttgtagtccctctacttttgagaatgcagttcctgctttcagttttgggacaatggatgcagaaatagaaactgctccagatgatcatttttctgtcaaacaggatttgcctgggttttccagggagaccttatttggtttagacagtataaaatctgcatacaaggacaaaagggaagcacacaaaggcaaaatgaaaaataaaaggccaactaggctaaagcaacatgctcagctccatcaggttatttctaaggaagcctgtaacgatggaaaatcatcagatttagcaggtgactattcaccaatggattgttcgccatatcctgcagaagctgaacatgtgccaacagaggcatatgtggcttctggtcagcccgttcacattggtgatagtgttatctcaaactggaacaccagctgtgctgaagatgatgtagtttctgcaaccgagcacttgattattgatgtaaacctaccaatgtttggagatgaaggtagaggaccgaaactagatgcatctgagagcaattttggtagcagcttttctagttttcaaggagatcaaagtaatggaccacagcattctttcactaatattgggcaagactgtaacgataatacctacagaactccccatgattttgttgagcctcctgcttttcaatcaagctcatcaaatttcagtgggctgaactttagattcggtgtgtcatcctctccacaaatctctgcagcagcacaaagacgtaacacaagaaggaagttaagaacaaagggcagtctggcatcgaaaccttcaactatcggctcttttgaacagtcaaaatcttcacaagatactaagggcatgcggtttttctgtgaaacaagcaaaaatgaagacccagtgaaagagcaaccgtcaagaaagtcttctacttctgcggccttggaggcttgtgaaacctggcgtactagaggattattatacccgtggaataaactctgttacccactatggtgtttctggacattgttctcgcgcattgatgctgtgttacagcaaccgtgcagctacaagaatgtcgcttggcatgatgtgggaagcacttcaagattgtttgactgctacatcaattgaccccacctttcttaaagctaaagttagagctgccaattgccatcttgcattgggcgatcttgaagatgcattaaaggagttacatggcctgtttgaacagtaacactgggagttcttctgaccctaaaaatattagccgaggcttctgatggcctggaaagagtcaagagagtgatcgattgggtatccctgtgcaaggaacttattgagaaaaaaacatctcctgaagcaacaaaagccttagaattgatctccaatgcattgcacatatgtccatattcagacagcctcaaggagatgaaggcagaggcattgctgatgctacgaagatacgaagaagtgattcaactatgtcaggagtctgtaaatccgactgaaagaaagccagctttattcaaagataatggagaaccaaagaattccagtctctttgaacaaacacacttctctggaaggtattggcggccctatctcatttgcaagtcttatttcctttcaggcaagctggatgaggctgtcgaattattaaagaaacatgagcaagtcacacctgtcaaagaaagtgacgtgaacacatatcaagaaaatttctcatcattgtcagcgattataagagaactactttcccttaaggctgctggaaatgaatcatttcaagctgctgtctgtttttgcaatcgcgcagctgcgtatcaagcactcggtcaagttactgatgcaatagctgattgttcacttgccatggttcttgatacaaattaccccaaggcaatttcaagacgagccaccttatacgagatgataagggattatggacatgctgctaatgatttaaggaagctaatctcacttcttgaaaagaaagtcaatgtgtctggaatatcaccaaaagcttttaacaagcataaagatatcaagcaagcacatgcgaggctttcacacatacatgctgaagcaaaaaacgatacccccctgaatttgtatttaatcttgggagtggagccatcctgctcttcagcagatattaagaaggcataccggaaagctgcattgagacatcacccagacaaggctgctcaattattagtaaggaacgagaatgctgaagatggattttggagggatgttatcaaggaagtctatgcagatgcggatcatctgttcaaaacaattggggaggcatataatgttctttctgacccggacaagcgtcaagagtacgactttgaagagaatctaagaaatgctcggagagtatcgagttcaaggagcatgcgtaggtcacctgaacataactacagcgacagaggctttaatccacggcagtggcagtcaagcagagcatcacgttggtacagcaaatcagacgattactggtaaagaaggcactacggcgtggtcatgtggtgagaagcaacttttgcaactatgtcatgtgtggagcaaatgcctccttgcaccaaagatgggatgggatgcacctgccttcccttaggtgccggtgctaatgcaccagccttgcagtcagcagctttcctgtttgtttgctgcgtttctttttcagaggatggaaatattaggattgatcaattggggatctgggatgattgcttgacactggtagcgtcgtgacttgactagcacaggaaatatggaggattaggaagtggtatatcaaatagtcttttgttggcctggtgatgtctgaacactgactgcttgggagtggctggcatgatggtatctgctctgaagtcaaaacactgagaacaacatcaaaggttagaaatctgggtaaagatgtcagtttgtccaataggtacaggcattcttttgctgaatgcatggcccgctgtcgtaagtttacagcagatcagctgaaagaaaaagagacaggctcttctgtttggcgcgtgcgcgtgcagttttgttctgttgtttccttattaccaaatgatgtagcgttggaaagagtgggtacatattgtgactgcccaatgttgaaatctcgtaacatttatttattctttattactagacttgttagcctaatgttggaagcattttgagataatcaaggttccttcaaagcaagaagaggatctggttatggtaccgtttcgtttgtaaccatggtaccgtggagattcttttgattcgattctcgattgtgctagttcaaagttcttagtggttaaaaaatcagaaatatttgaagcttttagcaggattttggctttttttcacataaaatcggattataaggggaaacgagccatatgtgaagtgcatgttctctcatgttgcttatgataaaaatatttggatgacttgaacccgcccatggtttttttacggaacgccagggagccgtactattttttaaagcttagccctgac

SEQ ID NO: 72826 - DNA, 5334 bp, Zea Mays
tcgggtcccctcaaatcaatcgatcacacgcgtcccgccccattcggccattcccagccttcgagaggtcgccgccgccggtcgctgctccgccgactcggggatgccaccggcggtagcgcccgcctcgccgcgccaagaccctagcggctccagtctttccgccgcagccgccgcggcttccatggcgaacccggtcctagggcttggcctcgcgccaccgggcgctgagccctccgccggaacgccaccgtcttcacgccgcgcgccgcgcttggccaagcggcgccacgcgcccgcctcctcccgtttccgcgcggcgcaggcctcagtcggaacatggaacccgtttggcggcggcggcggtacggatggacagactcgaggttttgtgtttggtgctgcttccccagtgagccagcagccttcggagccagcagtggagatatcttcatccagtgaggcgcccttcgtgtttcagagtgtgagggagaaccttcctcggtttgaggagggattgtctggttcatcaatgctccctgataagatggggaagctgaacctgcgcacatcaggtgaggttggcgatggtctcggtcaggggagggatcgaaaggatggaagttcagcatttggtgttgatatatctggtttgttttctaacaaggaagataatgggctccaggagaagcttacacagttgaatttaggccacagagaacccttgcaaagtgagaagagggatagtgctaatggtgtgccacaagcatttgtgtttggatgtaatggagctgggagttttgctgattgtaagaacacagttgcctctggtgcacagtcagatgatcctagttcagtttgtggcactgatgcaaaagctatggctgggaagtcgacgcaattcaatataggcagtcaagcaccttcctggggtggagggattgagggtactaatggagcaccagaagctttcacgtttcaaagtaccgcagtaagtggtcatgtggataatataaacaatgttgtctccggtgccaataccagtgccaatacaagttcgtccactgttgctaaaggtgtgggtgatgtagatttgcttccagaaaagttaacacggttgaatataggaagtgacatgcccttgcatgagtcgaaaagtggttatcagcccaaagtgtttagagcagtccaagggacaatttttggaaatgaaacaagcagcacatcagataggagcagtgaattcctctctgcaaatagcaatacttctagttcaagcagtgatttgttctctacagcaaatagcaacacttctaattcagctaatggcacttactgttttcctccagagaagacaccagatttgaatgcaggagagggagtcatgtcggagagcttggaaagtgatagttctaactgtccaccacaaacctttttatttgaaagaaatgaaacccgaagctctgtttcacactctgcaagcatagccatggatgacggtggcaattttgtcaatcacaaaaatactgacacctgtagttcagctcgtggtacatttgattatgcaggtgctctcccagagaagatgacgaaattaaatataggatgcagaaattcataccatagcaggaaagatgaaactgctactgaaccaccagaagtatttgtatttgggtgtaatgtttctagcttttcttctacccatactgcaagtaaatcacatgatcccacgactcctgaattttgttttcaaagtaaagcagaggcaacttcaggatatggggctgttccccaaaccaaagttcaggagtcatacttgtttacgactttgaataattcttgtagtccctctacttttgagaatgcagttcctgctttcagttttgggacaatggatgcagaaatagaaactgctccagatgatcatttttctgtcaaacaggatttgcctgggttttccagggagaccttatttggtttagacagtataaaatctgcatacaaggacaaaagggaagcacacaaaggcaaaatgaaaaataaaaggccaactaggctaaagcaacatgctcagctccatcaggttatttctaaggaagcctgtaacgatggaaaatcatcagatttagcaggtgactattcaccaatggattgttcgccatatcctgcagaagctgaacatgtgccaacagaggcatatgtggcttctggtcagcccgttcacattggtgatagtgttatctcaaactggaacaccagctgtgctgaagatgatgtagtttctgcaaccgagcacttgattattgatgtaaacctaccaatgtttggagatgaaggtagaggaccgaaactagatgcatctgagagcaattttggtagcagcttttctagttttcaaggagatcaaagtaatggaccacagcattctttcactaatattgggcaagactgtaacgataatacctacagaactccccatgattttgttgagcctcctgcttttcaatcaagctcatcaaatttcagtgggctgaactttagattcggtgtgtcatcctctccacaaatctctgcagcagcacaaagacgtaacacaagaaggaagttaagaacaaagggcagtctggcatcgaaaccttcaactatcggctcttttgaacagtcaaaatcttcacaagatactaagggcatgcggtttttctgtgaaacaagcaaaaatgaagacccagtgaaagagcaaccgtcaagaaagtcttctacttctgcggccttggaggcttgtgaaacctggcgtactagaggattattatacccgtggaataaactctgttacccactatggtgtttctggacattgttctcgcgcattgatgctgtgttacagcaaccgtgcagctacaagaatgtcgcttggcatgatgtgggaagcacttcaagattgtttgactgctacatcaattgaccccacctttcttaaagctaaagttagagctgccaattgccatcttgcattgggcgatcttgaagatgcattaaaggagttacatggcctgtttgaacagtaacactgggagttcttctgaccctaaaaatattagccgaggcttctgatggcctggaaagagtcaagagagtgatcgattgggtatccctgtgcaaggaacttattgagaaaaaaacatctcctgaagcaacaaaagccttagaattgatctccaatgcattgcacatatgtccatattcagacagcctcaaggagatgaaggcagaggcattgctgatgctacgaagatacgaagaagtgattcaactatgtcaggagtctgtaaatccgactgaaagaaagccagctttattcaaagataatggagaaccaaagaattccagtctctttgaacaaacacacttctctggaaggtattggcggccctatctcatttgcaagtcttatttcctttcaggcaagctggatgaggctgtcgaattattaaagaaacatgagcaagtcacacctgtcaaagaaagtgacgtgaacacatatcaagaaaatttctcatcattgtcagcgattataagagaactactttcccttaagctgtctgtttttgcaatcgcgcagctgcgtatcaagcactcggtcaagttactgatgcaatagctgattgttcacttgccatggttcttgatacaaattaccccaaggcaatttcaagacgagccaccttatacgagatgataagggattatggacatgctgctaatgatttaaggaagctaatctcacttcttgaaaagaaagtcaatgtgtctggaatatcaccaaaagcttttaacaagcataaagatatcaagcaagcacatgcgaggctttcacacatacatgctgaagcaaaaaacgatacccccctgaatttgtatttaatcttgggagtggagccatcctgctcttcagcagatattaagaaggcataccggaaagctgcattgagacatcacccagacaaggctgctcaattattagtaaggaacgagaatgctgaagatggattttggagggatgttatcaaggaagtctatgcagatgcggatcatctgttcaaaacaattggggaggcatataatgttctttctgacccggacaagcgtcaagagtacgactttgaagagaatctaagaaatgctcggagagtatcgagttcaaggagcatgcgtaggtcacctgaacataactacagcgacagaggctttaatccacggcagtggcagtcaagcagagcatcacgttggtacagcaaatcagacgattactggtaaagaaggcactacggcgtggtcatgtggtgagaagcaacttttgcaactatgtcatgtgtggagcaaatgcctccttgcaccaaagatgggatgggatgcacctgccttcccttaggtgccggtgctaatgcaccagccttgcagtcagcagctttcctgtttgtttgctgcgtttctttttcagaggatggaaatattaggattgatcaattggggatctgggatgattgcttgacactggtagcgtcgtgacttgactagcacaggaaatatggaggattaggaagtggtatatcaaatagtcttttgttggcctggtgatgtctgaacactgactgcttgggagtggctggcatgatggtatctgctctgaagtcaaaacactgagaacaacatcaaaggttagaaatctgggtaaagatgtcagtttgtccaataggtacaggcattcttttgctgaatgcatggcccgctgtcgtaagtttacagcagatcagctgaaagaaaaagagacaggctcttctgtttggcgcgtgcgcgtgcagttttgttctgttgtttccttattaccaaatgatgtagcgttggaaagagtgggtacatattgtgactgcccaatgttgaaatctcgtaacatttatttattctttattactagacttgttagcctaatgttggaagcattttgagataatcaaggttccttcaaagcaagaagaggatctggttatggtaccgtttcgtttgtaaccatggtaccgtggagattcttttgattcgattctcgattgtgctagttcaaagttcttagtggttaaaaaatcagaaatatttgaagcttttagcaggattttggctttttttcacataaaatcggattataaggggaaacgagccatatgtgaagtgcatgttctctcatgttgcttatgataaaaatatttggatgacttgaacccgcccatggtttttttacggaacgccagggagccgtactattttttaaagcttagccctgac

SEQ ID NO: 72827 - DNA, 5351 bp, Zea Mays
tcgggtcccctcaaatcaatcgatcacacgcgtcccgccccattcggccattcccagccttcgagaggtcgccgccgccggtcgctgctccgccgactcggggatgccaccggcggtagcgcccgcctcgccgcgccaagaccctagcggctccagtctttccgccgcagccgccgcggcttccatggcgaacccggtcctagggcttggcctcgcgccaccgggcgctgagccctccgccggaacgccaccgtcttcacgccgcgcgccgcgcttggccaagcggcgccacgcgcccgcctcctcccgtttccgcgcggcgcaggcctcagtcggaacatggaacccgtttggcggcggcggcggtacggatggacagactcgaggttttgtgtttggtgctgcttccccagtgagccagcagccttcggagccagcagtggagatatcttcatccagtgaggcgcccttcgtgtttcagagtgtgagggagaaccttcctcggtttgaggagggattgtctggttcatcaatgctccctgataagatggggaagctgaacctgcgcacatcaggtgaggttggcgatggtctcggtcaggggagggatcgaaaggatggaagttcagcatttggtgttgatatatctggtttgttttctaacaaggaagataatgggctccaggagaagcttacacagttgaatttaggccacagagaacccttgcaaagtgagaagagggatagtgctaatggtgtgccacaagcatttgtgtttggatgtaatggagctgggagttttgctgattgtaagaacacagttgcctctggtgcacagtcagatgatcctagttcagtttgtggcactgatgcaaaagctatggctgggaagtcgacgcaattcaatataggcagtcaagcaccttcctggggtggagggattgagggtactaatggagcaccagaagctttcacgtttcaaagtaccgcagtaagtggtcatgtggataatataaacaatgttgtctccggtgccaataccagtgccaatacaagttcgtccactgttgctaaaggtgtgggtgatgtagatttgcttccagaaaagttaacacggttgaatataggaagtgacatgcccttgcatgagtcgaaaagtggttatcagcccaaagtgtttagagcagtccaagggacaatttttggaaatgaaacaagcagcacatcagataggagcagtgaattcctctctgcaaatagcaatacttctagttcaagcagtgatttgttctctacagcaaatagcaacacttctaattcagctaatggcacttactgttttcctccagagaagacaccagatttgaatgcaggagagggagtcatgtcggagagcttggaaagtgatagttctaactgtccaccacaaacctttttatttgaaagaaatgaaacccgaagctctgtttcacactctgcaagcatagccatggatgacggtggcaattttgtcaatcacaaaaatactgacacctgtagttcagctcgtggtacatttgattatgcaggtgctctcccagagaagatgacgaaattaaatataggatgcagaaattcataccatagcaggaaagatgaaactgctactgaaccaccagaagtatttgtatttgggtgtaatgtttctagcttttcttctacccatactgcaagtaaatcacatgatcccacgactcctgaattttgttttcaaagtaaagcagaggcaacttcaggatatggggctgttccccaaaccaaagttcaggagtcatacttgtttacgactttgaataattcttgtagtccctctacttttgagaatgcagttcctgctttcagttttgggacaatggatgcagaaatagaaactgctccagatgatcatttttctgtcaaacaggatttgcctgggttttccagggagaccttatttggtttagacagtataaaatctgcatacaaggacaaaagggaagcacacaaaggcaaaatgaaaaataaaaggccaactaggctaaagcaacatgctcagctccatcaggttatttctaaggaagcctgtaacgatggaaaatcatcagatttagcaggtgactattcaccaatggattgttcgccatatcctgcagaagctgaacatgtgccaacagaggcatatgtggcttctggtcagcccgttcacattggtgatagtgttatctcaaactggaacaccagctgtgctgaagatgatgtagtttctgcaaccgagcacttgattattgatgtaaacctaccaatgtttggagatgaaggtagaggaccgaaactagatgcatctgagagcaattttggtagcagcttttctagttttcaaggagatcaaagtaatggaccacagcattctttcactaatattgggcaagactgtaacgataatacctacagaactccccatgattttgttgagcctcctgcttttcaatcaagctcatcaaatttcagtgggctgaactttagattcggtgtgtcatcctctccacaaatctctgcagcagcacaaagacgtaacacaagaaggaagttaagaacaaagggcagtctggcatcgaaaccttcaactatcggctcttttgaacagtcaaaatcttcacaagatactaagggcatgcggtttttctgtgaaacaagcaaaaatgaagacccagtgaaagagcaaccgtcaagaaagtcttctacttctgcggccttggaggcttgtgaaacctggcgtactagtggaaataaagcctatgaaaatgggcactttgctactgcagaggattattatacccgtggaataaactctgttacccactatggtgtttctggacattgttctcgcgcattgatgctgtgttacagcaaccgtgcagctacaagaatgtcgcttggcatgatgtgggaagcacttcaagattgtttgactgctacatcaattgaccccacctttcttaaagctaaagttagagctgccaattgccatcttgcattgggcgatcttgaagatgcattaaaggagttacatggcctgtttgaacagtaacactgggagttcttctgaccctaaaaatattagccgaggcttctgatggcctggaaagagtcaagagagtgatcgattgggtatccctgtgcaaggaacttattgagaaaaaaacatctcctgaagcaacaaaagccttagaattgatctccaatgcattgcacatatgtccatattcagacagcctcaaggagatgaaggcagaggcattgctgatgctacgaagatacgaagaagtgattcaactatgtcaggagtctgtaaatccgactgaaagaaagccagctttattcaaagataatggagaaccaaagaattccagtctctttgaacaaacacacttctctggaaggtattggcggccctatctcatttgcaagtcttatttcctttcaggcaagctggatgaggctgtcgaattattaaagaaacatgagcaagtcacacctgtcaaagaaagtgacgtgaacacatatcaagaaaatttctcatcattgtcagcgattataagagaactactttcccttaagctgcgtatcaagcactcggtcaagttactgatgcaatagctgattgttcacttgccatggttcttgatacaaattaccccaaggcaatttcaagacgagccaccttatacgagatgataagggattatggacatgctgctaatgatttaaggaagctaatctcacttcttgaaaagaaagtcaatgtgtctggaatatcaccaaaagcttttaacaagcataaagatatcaagcaagcacatgcgaggctttcacacatacatgctgaagcaaaaaacgatacccccctgaatttgtatttaatcttgggagtggagccatcctgctcttcagcagatattaagaaggcataccggaaagctgcattgagacatcacccagacaaggctgctcaattattagtaaggaacgagaatgctgaagatggattttggagggatgttatcaaggaagtctatgcagatgcggatcatctgttcaaaacaattggggaggcatataatgttctttctgacccggacaagcgtcaagagtacgactttgaagagaatctaagaaatgctcggagagtatcgagttcaaggagcatgcgtaggtcacctgaacataactacagcgacagaggctttaatccacggcagtggcagtcaagcagagcatcacgttggtacagcaaatcagacgattactggtaaagaaggcactacggcgtggtcatgtggtgagaagcaacttttgcaactatgtcatgtgtggagcaaatgcctccttgcaccaaagatgggatgggatgcacctgccttcccttaggtgccggtgctaatgcaccagccttgcagtcagcagctttcctgtttgtttgctgcgtttctttttcagaggatggaaatattaggattgatcaattggggatctgggatgattgcttgacactggtagcgtcgtgacttgactagcacaggaaatatggaggattaggaagtggtatatcaaatagtcttttgttggcctggtgatgtctgaacactgactgcttgggagtggctggcatgatggtatctgctctgaagtcaaaacactgagaacaacatcaaaggttagaaatctgggtaaagatgtcagtttgtccaataggtacaggcattcttttgctgaatgcatggcccgctgtcgtaagtttacagcagatcagctgaaagaaaaagagacaggctcttctgtttggcgcgtgcgcgtgcagttttgttctgttgtttccttattaccaaatgatgtagcgttggaaagagtgggtacatattgtgactgcccaatgttgaaatctcgtaacatttatttattctttattactagacttgttagcctaatgttggaagcattttgagataatcaaggttccttcaaagcaagaagaggatctggttatggtaccgtttcgtttgtaaccatggtaccgtggagattcttttgattcgattctcgattgtgctagttcaaagttcttagtggttaaaaaatcagaaatatttgaagcttttagcaggattttggctttttttcacataaaatcggattataaggggaaacgagccatatgtgaagtgcatgttctctcatgttgcttatgataaaaatatttggatgacttgaacccgcccatggtttttttacggaacgccagggagccgtactattttttaaagcttagccctgac

SEQ ID NO: 72828 - DNA, 5310 bp, Zea Mays
tcgggtcccctcaaatcaatcgatcacacgcgtcccgccccattcggccattcccagccttcgagaggtcgccgccgccggtcgctgctccgccgactcggggatgccaccggcggtagcgcccgcctcgccgcgccaagaccctagcggctccagtctttccgccgcagccgccgcggcttccatggcgaacccggtcctagggcttggcctcgcgccaccgggcgctgagccctccgccggaacgccaccgtcttcacgccgcgcgccgcgcttggccaagcggcgccacgcgcccgcctcctcccgtttccgcgcggcgcaggcctcagtcggaacatggaacccgtttggcggcggcggcggtacggatggacagactcgaggttttgtgtttggtgctgcttccccagtgagccagcagccttcggagccagcagtggagatatcttcatccagtgaggcgcccttcgtgtttcagagtgtgagggagaaccttcctcggtttgaggagggattgtctggttcatcaatgctccctgataagatggggaagctgaacctgcgcacatcaggtgaggttggcgatggtctcggtcaggggagggatcgaaaggatggaagttcagcatttggtgttgatatatctggtttgttttctaacaaggaagataatgggctccaggagaagcttacacagttgaatttaggccacagagaacccttgcaaagtgagaagagggatagtgctaatggtgtgccacaagcatttgtgtttggatgtaatggagctgggagttttgctgattgtaagaacacagttgcctctggtgcacagtcagatgatcctagttcagtttgtggcactgatgcaaaagctatggctgggaagtcgacgcaattcaatataggcagtcaagcaccttcctggggtggagggattgagggtactaatggagcaccagaagctttcacgtttcaaagtaccgcagtaagtggtcatgtggataatataaacaatgttgtctccggtgccaataccagtgccaatacaagttcgtccactgttgctaaaggtgtgggtgatgtagatttgcttccagaaaagttaacacggttgaatataggaagtgacatgcccttgcatgagtcgaaaagtggttatcagcccaaagtgtttagagcagtccaagggacaatttttggaaatgaaacaagcagcacatcagataggagcagtgaattcctctctgcaaatagcaatacttctagttcaagcagtgatttgttctctacagcaaatagcaacacttctaattcagctaatggcacttactgttttcctccagagaagacaccagatttgaatgcaggagagggagtcatgtcggagagcttggaaagtgatagttctaactgtccaccacaaacctttttatttgaaagaaatgaaacccgaagctctgtttcacactctgcaagcatagccatggatgacggtggcaattttgtcaatcacaaaaatactgacacctgtagttcagctcgtggtacatttgattatgcaggtgctctcccagagaagatgacgaaattaaatataggatgcagaaattcataccatagcaggaaagatgaaactgctactgaaccaccagaagtatttgtatttgggtgtaatgtttctagcttttcttctacccatactgcaagtaaatcacatgatcccacgactcctgaattttgttttcaaagtaaagcagaggcaacttcaggatatggggctgttccccaaaccaaagttcaggagtcatacttgtttacgactttgaataattcttgtagtccctctacttttgagaatgcagttcctgctttcagttttgggacaatggatgcagaaatagaaactgctccagatgatcatttttctgtcaaacaggatttgcctgggttttccagggagaccttatttggtttagacagtataaaatctgcatacaaggacaaaagggaagcacacaaaggcaaaatgaaaaataaaaggccaactaggctaaagcaacatgctcagctccatcaggttatttctaaggaagcctgtaacgatggaaaatcatcagatttagcaggtgactattcaccaatggattgttcgccatatcctgcagaagctgaacatgtgccaacagaggcatatgtggcttctggtcagcccgttcacattggtgatagtgttatctcaaactggaacaccagctgtgctgaagatgatgtagtttctgcaaccgagcacttgattattgatgtaaacctaccaatgtttggagatgaaggtagaggaccgaaactagatgcatctgagagcaattttggtagcagcttttctagttttcaaggagatcaaagtaatggaccacagcattctttcactaatattgggcaagactgtaacgataatacctacagaactccccatgattttgttgagcctcctgcttttcaatcaagctcatcaaatttcagtgggctgaactttagattcggtgtgtcatcctctccacaaatctctgcagcagcacaaagacgtaacacaagaaggaagttaagaacaaagggcagtctggcatcgaaaccttcaactatcggctcttttgaacagtcaaaatcttcacaagatactaagggcatgcggtttttctgtgaaacaagcaaaaatgaagacccagtgaaagagcaaccgtcaagaaagtcttctacttctgcggccttggaggcttgtgaaacctggcgtactagaggattattatacccgtggaataaactctgttacccactatggtgtttctggacattgttctcgcgcattgatgctgtgttacagcaaccgtgcagctacaagaatgtcgcttggcatgatgtgggaagcacttcaagattgtttgactgctacatcaattgaccccacctttcttaaagctaaagttagagctgccaattgccatcttgcattgggcgatcttgaagatgcattaaaggagttacatggcctgtttgaacagtaacactgggagttcttctgaccctaaaaatattagccgaggcttctgatggcctggaaagagtcaagagagtgatcgattgggtatccctgtgcaaggaacttattgagaaaaaaacatctcctgaagcaacaaaagccttagaattgatctccaatgcattgcacatatgtccatattcagacagcctcaaggagatgaaggcagaggcattgctgatgctacgaagatacgaagaagtgattcaactatgtcaggagtctgtaaatccgactgaaagaaagccagctttattcaaagataatggagaaccaaagaattccagtctctttgaacaaacacacttctctggaaggtattggcggccctatctcatttgcaagtcttatttcctttcaggcaagctggatgaggctgtcgaattattaaagaaacatgagcaagtcacacctgtcaaagaaagtgacgtgaacacatatcaagaaaatttctcatcattgtcagcgattataagagaactactttcccttaagctgcgtatcaagcactcggtcaagttactgatgcaatagctgattgttcacttgccatggttcttgatacaaattaccccaaggcaatttcaagacgagccaccttatacgagatgataagggattatggacatgctgctaatgatttaaggaagctaatctcacttcttgaaaagaaagtcaatgtgtctggaatatcaccaaaagcttttaacaagcataaagatatcaagcaagcacatgcgaggctttcacacatacatgctgaagcaaaaaacgatacccccctgaatttgtatttaatcttgggagtggagccatcctgctcttcagcagatattaagaaggcataccggaaagctgcattgagacatcacccagacaaggctgctcaattattagtaaggaacgagaatgctgaagatggattttggagggatgttatcaaggaagtctatgcagatgcggatcatctgttcaaaacaattggggaggcatataatgttctttctgacccggacaagcgtcaagagtacgactttgaagagaatctaagaaatgctcggagagtatcgagttcaaggagcatgcgtaggtcacctgaacataactacagcgacagaggctttaatccacggcagtggcagtcaagcagagcatcacgttggtacagcaaatcagacgattactggtaaagaaggcactacggcgtggtcatgtggtgagaagcaacttttgcaactatgtcatgtgtggagcaaatgcctccttgcaccaaagatgggatgggatgcacctgccttcccttaggtgccggtgctaatgcaccagccttgcagtcagcagctttcctgtttgtttgctgcgtttctttttcagaggatggaaatattaggattgatcaattggggatctgggatgattgcttgacactggtagcgtcgtgacttgactagcacaggaaatatggaggattaggaagtggtatatcaaatagtcttttgttggcctggtgatgtctgaacactgactgcttgggagtggctggcatgatggtatctgctctgaagtcaaaacactgagaacaacatcaaaggttagaaatctgggtaaagatgtcagtttgtccaataggtacaggcattcttttgctgaatgcatggcccgctgtcgtaagtttacagcagatcagctgaaagaaaaagagacaggctcttctgtttggcgcgtgcgcgtgcagttttgttctgttgtttccttattaccaaatgatgtagcgttggaaagagtgggtacatattgtgactgcccaatgttgaaatctcgtaacatttatttattctttattactagacttgttagcctaatgttggaagcattttgagataatcaaggttccttcaaagcaagaagaggatctggttatggtaccgtttcgtttgtaaccatggtaccgtggagattcttttgattcgattctcgattgtgctagttcaaagttcttagtggttaaaaaatcagaaatatttgaagcttttagcaggattttggctttttttcacataaaatcggattataaggggaaacgagccatatgtgaagtgcatgttctctcatgttgcttatgataaaaatatttggatgacttgaacccgcccatggtttttttacggaacgccagggagccgtactattttttaaagcttagccctgac

SEQ ID NO: 72829 - DNA, 5375 bp, Zea Mays
tcgggtcccctcaaatcaatcgatcacacgcgtcccgccccattcggccattcccagccttcgagaggtcgccgccgccggtcgctgctccgccgactcggggatgccaccggcggtagcgcccgcctcgccgcgccaagaccctagcggctccagtctttccgccgcagccgccgcggcttccatggcgaacccggtcctagggcttggcctcgcgccaccgggcgctgagccctccgccggaacgccaccgtcttcacgccgcgcgccgcgcttggccaagcggcgccacgcgcccgcctcctcccgtttccgcgcggcgcaggcctcagtcggaacatggaacccgtttggcggcggcggcggtacggatggacagactcgaggttttgtgtttggtgctgcttccccagtgagccagcagccttcggagccagcagtggagatatcttcatccagtgaggcgcccttcgtgtttcagagtgtgagggagaaccttcctcggtttgaggagggattgtctggttcatcaatgctccctgataagatggggaagctgaacctgcgcacatcaggtgaggttggcgatggtctcggtcaggggagggatcgaaaggatggaagttcagcatttggtgttgatatatctggtttgttttctaacaaggaagataatgggctccaggagaagcttacacagttgaatttaggccacagagaacccttgcaaagtgagaagagggatagtgctaatggtgtgccacaagcatttgtgtttggatgtaatggagctgggagttttgctgattgtaagaacacagttgcctctggtgcacagtcagatgatcctagttcagtttgtggcactgatgcaaaagctatggctgggaagtcgacgcaattcaatataggcagtcaagcaccttcctggggtggagggattgagggtactaatggagcaccagaagctttcacgtttcaaagtaccgcagtaagtggtcatgtggataatataaacaatgttgtctccggtgccaataccagtgccaatacaagttcgtccactgttgctaaaggtgtgggtgatgtagatttgcttccagaaaagttaacacggttgaatataggaagtgacatgcccttgcatgagtcgaaaagtggttatcagcccaaagtgtttagagcagtccaagggacaatttttggaaatgaaacaagcagcacatcagataggagcagtgaattcctctctgcaaatagcaatacttctagttcaagcagtgatttgttctctacagcaaatagcaacacttctaattcagctaatggcacttactgttttcctccagagaagacaccagatttgaatgcaggagagggagtcatgtcggagagcttggaaagtgatagttctaactgtccaccacaaacctttttatttgaaagaaatgaaacccgaagctctgtttcacactctgcaagcatagccatggatgacggtggcaattttgtcaatcacaaaaatactgacacctgtagttcagctcgtggtacatttgattatgcaggtgctctcccagagaagatgacgaaattaaatataggatgcagaaattcataccatagcaggaaagatgaaactgctactgaaccaccagaagtatttgtatttgggtgtaatgtttctagcttttcttctacccatactgcaagtaaatcacatgatcccacgactcctgaattttgttttcaaagtaaagcagaggcaacttcaggatatggggctgttccccaaaccaaagttcaggagtcatacttgtttacgactttgaataattcttgtagtccctctacttttgagaatgcagttcctgctttcagttttgggacaatggatgcagaaatagaaactgctccagatgatcatttttctgtcaaacaggatttgcctgggttttccagggagaccttatttggtttagacagtataaaatctgcatacaaggacaaaagggaagcacacaaaggcaaaatgaaaaataaaaggccaactaggctaaagcaacatgctcagctccatcaggttatttctaaggaagcctgtaacgatggaaaatcatcagatttagcaggtgactattcaccaatggattgttcgccatatcctgcagaagctgaacatgtgccaacagaggcatatgtggcttctggtcagcccgttcacattggtgatagtgttatctcaaactggaacaccagctgtgctgaagatgatgtagtttctgcaaccgagcacttgattattgatgtaaacctaccaatgtttggagatgaaggtagaggaccgaaactagatgcatctgagagcaattttggtagcagcttttctagttttcaaggagatcaaagtaatggaccacagcattctttcactaatattgggcaagactgtaacgataatacctacagaactccccatgattttgttgagcctcctgcttttcaatcaagctcatcaaatttcagtgggctgaactttagattcggtgtgtcatcctctccacaaatctctgcagcagcacaaagacgtaacacaagaaggaagttaagaacaaagggcagtctggcatcgaaaccttcaactatcggctcttttgaacagtcaaaatcttcacaagatactaagggcatgcggtttttctgtgaaacaagcaaaaatgaagacccagtgaaagagcaaccgtcaagaaagtcttctacttctgcggccttggaggcttgtgaaacctggcgtactagtggaaataaagcctatgaaaatgggcactttgctactgcagaggattattatacccgtggaataaactctgttacccactatggtgtttctggacattgttctcgcgcattgatgctgtgttacagcaaccgtgcagctacaagaatgtcgcttggcatgatgtgggaagcacttcaagattgtttgactgctacatcaattgaccccacctttcttaaagctaaagttagagctgccaattgccatcttgcattgggcgatcttgaagatgcattaaaggagttacatggcctgtttgaacagtaacactgggagttcttctgaccctaaaaatattagccgaggcttctgatggcctggaaagagtcaagagagtgatcgattgggtatccctgtgcaaggaacttattgagaaaaaaacatctcctgaagcaacaaaagccttagaattgatctccaatgcattgcacatatgtccatattcagacagcctcaaggagatgaaggcagaggcattgctgatgctacgaagatacgaagaagtgattcaactatgtcaggagtctgtaaatccgactgaaagaaagccagctttattcaaagataatggagaaccaaagaattccagtctctttgaacaaacacacttctctggaaggtattggcggccctatctcatttgcaagtcttatttcctttcaggcaagctggatgaggctgtcgaattattaaagaaacatgagcaagtcacacctgtcaaagaaagtgacgtgaacacatatcaagaaaatttctcatcattgtcagcgattataagagaactactttcccttaagctgtctgtttttgcaatcgcgcagctgcgtatcaagcactcggtcaagttactgatgcaatagctgattgttcacttgccatggttcttgatacaaattaccccaaggcaatttcaagacgagccaccttatacgagatgataagggattatggacatgctgctaatgatttaaggaagctaatctcacttcttgaaaagaaagtcaatgtgtctggaatatcaccaaaagcttttaacaagcataaagatatcaagcaagcacatgcgaggctttcacacatacatgctgaagcaaaaaacgatacccccctgaatttgtatttaatcttgggagtggagccatcctgctcttcagcagatattaagaaggcataccggaaagctgcattgagacatcacccagacaaggctgctcaattattagtaaggaacgagaatgctgaagatggattttggagggatgttatcaaggaagtctatgcagatgcggatcatctgttcaaaacaattggggaggcatataatgttctttctgacccggacaagcgtcaagagtacgactttgaagagaatctaagaaatgctcggagagtatcgagttcaaggagcatgcgtaggtcacctgaacataactacagcgacagaggctttaatccacggcagtggcagtcaagcagagcatcacgttggtacagcaaatcagacgattactggtaaagaaggcactacggcgtggtcatgtggtgagaagcaacttttgcaactatgtcatgtgtggagcaaatgcctccttgcaccaaagatgggatgggatgcacctgccttcccttaggtgccggtgctaatgcaccagccttgcagtcagcagctttcctgtttgtttgctgcgtttctttttcagaggatggaaatattaggattgatcaattggggatctgggatgattgcttgacactggtagcgtcgtgacttgactagcacaggaaatatggaggattaggaagtggtatatcaaatagtcttttgttggcctggtgatgtctgaacactgactgcttgggagtggctggcatgatggtatctgctctgaagtcaaaacactgagaacaacatcaaaggttagaaatctgggtaaagatgtcagtttgtccaataggtacaggcattcttttgctgaatgcatggcccgctgtcgtaagtttacagcagatcagctgaaagaaaaagagacaggctcttctgtttggcgcgtgcgcgtgcagttttgttctgttgtttccttattaccaaatgatgtagcgttggaaagagtgggtacatattgtgactgcccaatgttgaaatctcgtaacatttatttattctttattactagacttgttagcctaatgttggaagcattttgagataatcaaggttccttcaaagcaagaagaggatctggttatggtaccgtttcgtttgtaaccatggtaccgtggagattcttttgattcgattctcgattgtgctagttcaaagttcttagtggttaaaaaatcagaaatatttgaagcttttagcaggattttggctttttttcacataaaatcggattataaggggaaacgagccatatgtgaagtgcatgttctctcatgttgcttatgataaaaatatttggatgacttgaacccgcccatggtttttttacggaacgccagggagccgtactattttttaaagcttagccctgac

SEQ ID NO: 72830 - DNA, 5403 bp, Zea Mays
tcgggtcccctcaaatcaatcgatcacacgcgtcccgccccattcggccattcccagccttcgagaggtcgccgccgccggtcgctgctccgccgactcggggatgccaccggcggtagcgcccgcctcgccgcgccaagaccctagcggctccagtctttccgccgcagccgccgcggcttccatggcgaacccggtcctagggcttggcctcgcgccaccgggcgctgagccctccgccggaacgccaccgtcttcacgccgcgcgccgcgcttggccaagcggcgccacgcgcccgcctcctcccgtttccgcgcggcgcaggcctcagtcggaacatggaacccgtttggcggcggcggcggtacggatggacagactcgaggttttgtgtttggtgctgcttccccagtgagccagcagccttcggagccagcagtggagatatcttcatccagtgaggcgcccttcgtgtttcagagtgtgagggagaaccttcctcggtttgaggagggattgtctggttcatcaatgctccctgataagatggggaagctgaacctgcgcacatcaggtgaggttggcgatggtctcggtcaggggagggatcgaaaggatggaagttcagcatttggtgttgatatatctggtttgttttctaacaaggaagataatgggctccaggagaagcttacacagttgaatttaggccacagagaacccttgcaaagtgagaagagggatagtgctaatggtgtgccacaagcatttgtgtttggatgtaatggagctgggagttttgctgattgtaagaacacagttgcctctggtgcacagtcagatgatcctagttcagtttgtggcactgatgcaaaagctatggctgggaagtcgacgcaattcaatataggcagtcaagcaccttcctggggtggagggattgagggtactaatggagcaccagaagctttcacgtttcaaagtaccgcagtaagtggtcatgtggataatataaacaatgttgtctccggtgccaataccagtgccaatacaagttcgtccactgttgctaaaggtgtgggtgatgtagatttgcttccagaaaagttaacacggttgaatataggaagtgacatgcccttgcatgagtcgaaaagtggttatcagcccaaagtgtttagagcagtccaagggacaatttttggaaatgaaacaagcagcacatcagataggagcagtgaattcctctctgcaaatagcaatacttctagttcaagcagtgatttgttctctacagcaaatagcaacacttctaattcagctaatggcacttactgttttcctccagagaagacaccagatttgaatgcaggagagggagtcatgtcggagagcttggaaagtgatagttctaactgtccaccacaaacctttttatttgaaagaaatgaaacccgaagctctgtttcacactctgcaagcatagccatggatgacggtggcaattttgtcaatcacaaaaatactgacacctgtagttcagctcgtggtacatttgattatgcaggtgctctcccagagaagatgacgaaattaaatataggatgcagaaattcataccatagcaggaaagatgaaactgctactgaaccaccagaagtatttgtatttgggtgtaatgtttctagcttttcttctacccatactgcaagtaaatcacatgatcccacgactcctgaattttgttttcaaagtaaagcagaggcaacttcaggatatggggctgttccccaaaccaaagttcaggagtcatacttgtttacgactttgaataattcttgtagtccctctacttttgagaatgcagttcctgctttcagttttgggacaatggatgcagaaatagaaactgctccagatgatcatttttctgtcaaacaggatttgcctgggttttccagggagaccttatttggtttagacagtataaaatctgcatacaaggacaaaagggaagcacacaaaggcaaaatgaaaaataaaaggccaactaggctaaagcaacatgctcagctccatcaggttatttctaaggaagcctgtaacgatggaaaatcatcagatttagcaggtgactattcaccaatggattgttcgccatatcctgcagaagctgaacatgtgccaacagaggcatatgtggcttctggtcagcccgttcacattggtgatagtgttatctcaaactggaacaccagctgtgctgaagatgatgtagtttctgcaaccgagcacttgattattgatgtaaacctaccaatgtttggagatgaaggtagaggaccgaaactagatgcatctgagagcaattttggtagcagcttttctagttttcaaggagatcaaagtaatggaccacagcattctttcactaatattgggcaagactgtaacgataatacctacagaactccccatgattttgttgagcctcctgcttttcaatcaagctcatcaaatttcagtgggctgaactttagattcggtgtgtcatcctctccacaaatctctgcagcagcacaaagacgtaacacaagaaggaagttaagaacaaagggcagtctggcatcgaaaccttcaactatcggctcttttgaacagtcaaaatcttcacaagatactaagggcatgcggtttttctgtgaaacaagcaaaaatgaagacccagtgaaagagcaaccgtcaagaaagtcttctacttctgcggccttggaggcttgtgaaacctggcgtactagtggaaataaagcctatgaaaatgggcactttgctactgcagaggattattatacccgtggaataaactctgttacccactatggtgtttctggacattgttctcgcgcattgatgctgtgttacagcaaccgtgcagctacaagaatgtcgcttggcatgatgtgggaagcacttcaagattgtttgactgctacatcaattgaccccacctttcttaaagctaaagttagagctgccaattgccatcttgcattgggcgatcttgaagatgcattaaaggagttacatggcctgtttgaacagtaacactgggagttcttctgaccctaaaaatattagccgaggcttctgatggcctggaaagagtcaagagagtgatcgattgggtatccctgtgcaaggaacttattgagaaaaaaacatctcctgaagcaacaaaagccttagaattgatctccaatgcattgcacatatgtccatattcagacagcctcaaggagatgaaggcagaggcattgctgatgctacgaagatacgaagaagtgattcaactatgtcaggagtctgtaaatccgactgaaagaaagccagctttattcaaagataatggagaaccaaagaattccagtctctttgaacaaacacacttctctggaaggtattggcggccctatctcatttgcaagtcttatttcctttcaggcaagctggatgaggctgtcgaattattaaagaaacatgagcaagtcacacctgtcaaagaaagtgacgtgaacacatatcaagaaaatttctcatcattgtcagcgattataagagaactactttcccttaaggctgctggaaatgaatcatttcaagctgctgtctgtttttgcaatcgcgcagctgcgtatcaagcactcggtcaagttactgatgcaatagctgattgttcacttgccatggttcttgatacaaattaccccaaggcaatttcaagacgagccaccttatacgagatgataagggattatggacatgctgctaatgatttaaggaagctaatctcacttcttgaaaagaaagtcaatgtgtctggaatatcaccaaaagcttttaacaagcataaagatatcaagcaagcacatgcgaggctttcacacatacatgctgaagcaaaaaacgatacccccctgaatttgtatttaatcttgggagtggagccatcctgctcttcagcagatattaagaaggcataccggaaagctgcattgagacatcacccagacaaggctgctcaattattagtaaggaacgagaatgctgaagatggattttggagggatgttatcaaggaagtctatgcagatgcggatcatctgttcaaaacaattggggaggcatataatgttctttctgacccggacaagcgtcaagagtacgactttgaagagaatctaagaaatgctcggagagtatcgagttcaaggagcatgcgtaggtcacctgaacataactacagcgacagaggctttaatccacggcagtggcagtcaagcagagcatcacgttggtacagcaaatcagacgattactggtaaagaaggcactacggcgtggtcatgtggtgagaagcaacttttgcaactatgtcatgtgtggagcaaatgcctccttgcaccaaagatgggatgggatgcacctgccttcccttaggtgccggtgctaatgcaccagccttgcagtcagcagctttcctgtttgtttgctgcgtttctttttcagaggatggaaatattaggattgatcaattggggatctgggatgattgcttgacactggtagcgtcgtgacttgactagcacaggaaatatggaggattaggaagtggtatatcaaatagtcttttgttggcctggtgatgtctgaacactgactgcttgggagtggctggcatgatggtatctgctctgaagtcaaaacactgagaacaacatcaaaggttagaaatctgggtaaagatgtcagtttgtccaataggtacaggcattcttttgctgaatgcatggcccgctgtcgtaagtttacagcagatcagctgaaagaaaaagagacaggctcttctgtttggcgcgtgcgcgtgcagttttgttctgttgtttccttattaccaaatgatgtagcgttggaaagagtgggtacatattgtgactgcccaatgttgaaatctcgtaacatttatttattctttattactagacttgttagcctaatgttggaagcattttgagataatcaaggttccttcaaagcaagaagaggatctggttatggtaccgtttcgtttgtaaccatggtaccgtggagattcttttgattcgattctcgattgtgctagttcaaagttcttagtggttaaaaaatcagaaatatttgaagcttttagcaggattttggctttttttcacataaaatcggattataaggggaaacgagccatatgtgaagtgcatgttctctcatgttgcttatgataaaaatatttggatgacttgaacccgcccatggtttttttacggaacgccagggagccgtactattttttaaagcttagccctgac
